United States Patent Application Publication US 2015/0315605 A1 - sequence listing, part 7

SEQ ID NO: 9072 - DNA, 3472 bp, Zea Mays
gcagcgaggcagcgtgcagcgaagaaagagaggggctctcatgcgatccgccagcgcccgtggagcgtggaccggagcgaagagagtacgagcagaggagaccgaggaaatctcgggacgtgcccgctgccgaccgatcgggggctcgaacccggcgcgtccgagatccacgagcggaatctatccaggctcacactcactgcctcaggtgtgtcacgggcggcacccgggggcgcgtccccggccgccgtccatccactcgacaaaaagcaaccgagacgagggcggtcctttctccgggctctggtaggggaggggaaggggaggagcagagccgggagccatggcggagccgggcgacgggagtaggcggcggcgggaggcggaggcgccggtggtggcgctggagtgcgtggcggggagctccaaggcggaggagtggggaggcggcgcgggcgtcgtgcaggagggggacgtggtggaggccgtccgcgtcggccgcggctccggcggcgggggcgccgcggccgcgctggagctcgaggcgccattcaagggcgggcgcgccgggctgcacaaggcgctgcacgcggcgttcaagcgcggggacacctccgtggaggtgcgcgtgcggggcggcaggcagctgcaggcctgcatcgtgccgcaccacgccagtcccggcgccggcggcggaggggtcaggaagcagtacgtcctgcggtcgctgcacgaccccaactacttgctcggattcgtcgaccgcctcgagagcgagtgcctcgtcttacaaggaacgaggagcacaagagtcgcgtcagccttgagcaaggcgcagctccaggatggctatgtcgcgtacccatgggacaagaagatgcgcgacacgctgcacacgcccaactccagctgctacctctcgatgcttgtcctgcccaaggctctggacagcaatgcctgtcactacgagtccttcgacgacaccgtggcgcgtgccaatgcatggttctactcttcgcaggccgccgggatacccatcgacttcatgaatgtgcagagcgaagctcttctcaccaaggtgcagacacaggctctctaattcagacatctcacagcgtaggttggcagttactacttactacagtgagacttcagctagttttaatcttctgacagtgtttagataactaagataagaaactgggcagtgagtttgttcaaatcctccgacaccgtttcgtgtttgagagattctactcacagttctgtcttggcactgtgacactctgaaacatgcagatatctggagagacagcgtccgcgtctgtgaattcgagctcattatctgatctgtcgaacgtcactaatgcgacgctctacggttttgaagattaccatggagtggatattggtgtggtaaaggcagcacggctttggtacagctgcgtaggaggagaattgctgctggaaatcccacttgaagaaggtgacacaaggcttggctttgctatcagccgaactgaagagggctttatctacatatcatctgtagtggaagatgacaaggaaagcgaggcaccatctacgcggtctgggctctgtgatctgttcaaccgggccaaggaggcgtcgaaactgctgatcatctcgagggtgtccaatgagaaggtcctaccttggatgatctccagttcaggggcagtccgctgcttcgacaccatctccctcagccagaaactctccttgcaccgcctcgcagtgcgccccatccagctgcatctacttgcctgggagaagccttctgctcccaacccagcagagagggccgtgcgttccccaaagctcaccatgccttcaacgctgctccctcacctacagcaaaaccttgtggagaccatagaaggcggagtagatgctgaagaggagtacgtggggaatttgtcgtttcggatcgatgatatctcatttgagagcagctgggtgtgattccaggtttcaattttgtcatacaggcggctgatgtgcatacatatgttttcatcttgtctagttctctagggcggtaatgctcagttctgtgcttcagaaaatgcagatgctggcttcaaaatgttcagaatatttcttgttttctagccgaatcagggatggataacatctgaaaagtatcttgtaatggaacatttttgttgatcataacataacaaaggagtgatccaaacatgttggtcaaagaaagctcaggcttcacttcgttagttgtttactccaaatctacagcaaacatgcggttcagcacctcaagtttcttgacctttggctcaaaacaaaaaaagaaaaatgttacacgagtgagttgacaccacactagctgttggtcaaagagacacaattatgctgccgatcttgttttgaggaccctgcacttgagcactctatcttgcacgtaaaaccccggcgtcaccattatcttcacttgacaaggactctgcaccggctgcctgtcatgcaggatgtcttccatgtacagctcatcaaatgcgcggccgtcttggacgcgcaggatcgtcagcggcgggccgaaggagaaggccagcaggtggagcagccagacgcacttggcggcgacgaagaagcactgaagcaactgctcgggccacggccgggaccaggcaagcgtcgccacgacgacgctcatcttccggtcgcagaaacggctgaagtcctcgctgtagtacttggtgcccttccgcagaacctcgttccagctaaggttgcgcagcgccacgaaggctgcgaagctctgccggctgtcttccgccgggtcgaggcacctcggcgagccgttccgctggaacgcggggttctcgaagtcctggaacatgacctggttcatgatcgcctcaagatggtacagcacggccttcgagcagtgtttgctgacgctgccgctgctgagcgcgagctggtacgggcgaaggagcaggttcagcttgtcggacaggccgtcactggactcttcgttcacctgctggatcagcgccttgcagagctgcttcacagagagccgcgcctccgacgcgatctgcaagaagccttccaccatcacctcgtggctcaccggcatcgagagctctcggctgggttcgatcgatttcgtcggtctccgggagacggacggcgagttggtggcctgccgcagtgccttcttgagctccgagcagtacgcttccacgctcaccagcttggtggccagctcccccagcgacgacctcacctcggcagcttcgtgcagggcggcgtcccggtgcgcgttggcctccgcgagctctttcttgagggactccatagatagcgccccccactcggtcagcagctgcggcatgttgccgcgctcgatggccgtcggcgacgtcatctccggtggcttggctttctttctcgacttggggaagagccacgagaggatctg

SEQ ID NO: 9073 - DNA, 3145 bp, Zea Mays
agctgcttgctccgccgccgccgccctcttcctcctctactggttgcagcctattccaccaccgacgctgaaggccatacgcccccaatcgaatcgatcacatctatgccgtcgatcaccagaggtgggcgtggggggctcttctccacgcaccggggcgcgctcttgtggctccgccgttgccaaagcccactcttgtcgacactagccggcggcggaggccggagcgacgcgccacatctgcccgtactcatcgtcggagctggccctgttgggctcgtcctctcattcctcctcaccaaattcgcactatagccctgatttgaacaaacagatctactcaatgttaccaatccatcaagagcactcgggtttgagtaacactttcaaacatcaaaacccatccggccaccatatgtaacccaaaagttccaagcttcatcggaactgctaaatgtcataccaatttgtggaattcaaaaaggaattgcagcaactatgcggttgtaaataatgcattcagaacacgaccaactggatgttctcatcatttaaagtagaacttcaaccatgcagaaacgaataactaagtaggagtagagcacaaaccttgcaggtgattcctcgagcagctgctgggtgttgtccatcgcaacatcaatagcttgttgggcacctgccggcgtgcttggtgctcttgtggagattgtacaggatctcgggtagactgcacagcgccaactttcttcaccacggacatttttttagtaccagcacagacaccttgctgcctccacaatcaacgaattgagagtgcaggaggacatcagctccagcacgtgcagggcagcacaggtgacggtgccttcatgcttcgtgggaagaggcattggggcaacgaatggaggagcaggcgaggaggtgcacacatggcagaggtggccccggaggttccaagagaaggtggcgggggcttgtaaaatgtggcacaatgagcatgaggtgctttgcccttcgatttgatatggacgaccaagattgtgagactgctacagttgcagtctctagctactgcaccagatccagggatcaaatgtgcggtgatagagaagaatgtggagttcactaggcacccacgagcgcacttcatcaacaaccgcacaatggagatcttccgcaagttggatggcttggccagggacattgagaggtcccagccaccagtagatttgtggaggaagttcgtatactgtacttcactctccggttctgtccttggatcggttgatcacatgaaacaggaagattttgacaaggtcattagtcctgtatccgttgcacatttctcacagtacaagttagttgatttgctactcaagaagcttgaaggtattggtttccagacatgctttcccagtgagattggtaactcaacacaagatttggtactggaaagcaagatattgatgggacacaagtgcacatcccttgatcagactgatgagggcattctggttggagcatcagttaacaatggagggatgataatagagagaaagctacactgtggtcttcttatagggacagatggcgcaagaagtacagtgcgtgaattggcaggtatatctatggaaggtgaaagggatttgcagaaactggtcagtgtgcattttcttagcagagatctaggcaggtatttgtccagtcagaggccagggatgctgttcttcatttttaatccaggtgcaattggtgtactagttgcacatgacctagagaatggggaatttgtattgcaggttccattttatcctcctcagcagatgtttgaagattttagtgctaaggtatgcgagcaaattattttcaaattagtcggatgggagccagcagatgttcatgttttagacataaaaccatgggcaatgcatgctgaagttgcagagaagtacatctgctgcaataatcgagtaatcctctctggtgatgccgcacaccggtttcctcctgctggtggttttggaatgaacaccggtgtccaggatgtacataatttggcttggaaattgggcttactgctgaatggtgtcgcctcaccatcaatattacaaacttatgagtcagagcgccggcctgttgcaattttcaataccgaacttagcgtggagaatttcaaggcagctatgtctattcctacaacccttggccttgatccaactgttgcaaactcagtgcatcaagttataaatagaagcctcggatcaatcattccaagaaatgtgcagaaggcagttctagaaggattgttttctcttggtagggcacaagtctcagactatatcctgaatgagaaaaatcccattgggtcgttgagactagcaagattgagaagtattctcgatgaaggcaaaagtcttcagctgcagttccctgcagaggatcttggcttccactatgcagaaggtgctctagttgttgaagctagttgtgagaagactcatgaaggagaaaaactacagcattctaagagggcatcaagagagtacatcccatctgctaaggttggttcgcggcttccccacatgctagtaagagaagtgcctgcttcgagtgagggcgcgttctcaacactggacctagtgagtggggataaactcgagtttgttctcatcattgcaccagtgaaagagtcatatgagattgcccgtgccaccctcaagatagcagatgagcttacgctatcagccagagtatgtgtaatgtggccacgaggttcgactgatgctgaagtggaagagagcagatccgagttgacaccctggacaaactacatcgatgtcgaggaagtgcctagggtgtcgggtggttcatggtgggagatgtgtcgtattagtaggaagagtgtccttttggttaggcctgatgagcacatagcatggctaacagaactggacagggtgagggatgctgagtcagaaattaggagggtcttctctcatgttctgtgcctaaatagccaccgggtgtaagaatttataaatttccttccatttaggctttgtttagatactttggtattcactttaatccacatgtatggaagcggattaggttataaattaaattaatttacatcctaatccac

SEQ ID NO: 9074 - DNA, 3566 bp, Zea Mays
gccagtagactagtagagtagtactctgcctttctggggtggctttgcgcggtaccgacgtaccgtcgcggtcggcagtaaaaaggaccccgttgcgttgagatgaaagattgacgagtacctgcggcagtgtacaaagagcacacagggtactgtacacggtttgattggcgcgggctggggtgtaccgccgctgcagccaggcggacccgacccacgtgcgccaccgccagccagccagcagcctgccccgtccccttgcctgccttgcccagtaggtgcgacgtcacggtggaaaccaaaaatctagcccgtactagatcttcttcgtatagccattgtttatacttttcgcctcggcgaatgtttccaaaccagcgccgcgccgcgctcctttttcgtttcctcgaaagggtcagccagccaagacagacaaacagaggaacgtgaggaagatgcggcatgtcacgtgacatgacacgagcgccgagattgggatggatggcgtcacgggctcaacaaatccattcaattccccccgtctaccctgccctggataggtggaatggggaaacccgacgactgatgcagtgtgtttagactctgtgctcgtgtcacacgcactctcgccaccgtgtctgtgccagtagtagtagtcgtagctccagctcagctattgtccctgctaatcacctcccgtaactgtcagcacccgtccaaatctactactcctacaatagtcctattatacaaaactcatcagctcatgcccaggagagcgcacgctcttaagcagcgggcggcagtggcacggagcacactccccagtccccagtcccccgctgggagcggcagccagcacgaggcaggagcagcgcgagggcaggcgccatgggggtccggtcggcggccacaaagctgcacatcccaccatccgccgcccgccgacccacgttcctgccattcgtggccgtcctcctcctctgctctgcctcctatctcatcggcgtctggcagcacggcggcttcgccactccatccgacaaacccgccgccgtctccaccgctacggccgtcgcctgcaccaacgtcgccgccgccccgaagaggaggacccggtccggcgccagctccccgtccctcgacttctccgcgcgccacgcggccgcggcggacgacgcgctcgacgctagcaccgccaccgccgcctcctcggccgcgccgcggaggtcgtcgtacccggcgtgccccgccaggtactccgagtacacgccgtgcgaggacgtggagcggtcgctgcggttcccgcgggaccgtctggtgtaccgcgagcggcactgcccggcgtcggagcgggagcggctgcggtgccttgtgcccgcgccgcccgggtaccgcaccccgttcccgtggcccgccagccgcgacgtcgcctggttcgccaacgcgccgcacaaggagctcaccgtcgagaaggcggtgcagaactggatccgcgtcgacggcgacaggctcaggttccccggcggcgggaccatgttccccaacggcgccgacgcctacatcgacgacattgccaagctcgtcccgctccacgacggctccatccgcaccgcgctcgacaccggatgcggggtaagcagtagacgctcacgctctcgcccaccgcgttggttagctttagctagtacagaaaaaataagtggatttggtcgactgacgagcgtcgacagggttagattggagaatttagttccaattaagcattgacttgagatcaaggccagtctcttgctagttccagtcccaactcccaaagggcactggacattggaaaagcgagtactactctgctccgcttctttcagagacgttctttttgtgtcggaaattttgcgcaggtggcgagctggggcgcgtacctgctgtcgcgggacatcctggccatgtcgttcgcgccgcgggactctcacgaggcgcaggtgcagttcgcgctggagcgaggcgtgccggccatgatcggcgtgctcgcgtccaaccgcctcacctacccggcccgcgccttcgacatggcgcactgctcccgctgcctcatcccctggcaactctacgatggactgtacctgatcgaggtcgaccgggtgctgcgtcccggagggtactggatcctgtccgggccgccgatcaactggaacaagtactggaaggggtgggagcggaccaaggaggacctcaacgccgagcagcaggccatcgaggccgtcgccaggagcctctgctggaccaaggtcaaggaggccggcgacatcgccgtctggcagaagccctacaaccacgccggctgcaaggcctccaagtcgtcccggcccttctgctcgcgcaagaaccctgacgcggcatggtacgacaagatggaggcctgcataacgccgctgccggagatctccaaggccagcgacgtcgccggcggcgcggtgaagagatggccgcagcggctcacggccgtgccgcccagggtctcccgcggcactgtcaggggcgtcacggccaggtcgttcgcgcaggacacggagctgtggcggaggagggtccggcactacaagtcggtggccagccagctcgagcagaaggggcggtaccgcaacgtgctggacatgaacgcgcgcctgggcgggttcgccgcggcgctggcgctggccggcgacccgctgtgggtcatgaacatggtcccgaccgtggcgaacgcgaccacgctcggggccatctacgagcgcggcctcatcggaagctaccaggactggtgcgagggcatgtctacctacccgaggacctacgacctcatccatgcggattcggtgttcaccctgtacaaggacaggtgtgagatggaccgcatcctcctggagatggacaggatcctgaggcccaggggcacggtgatcgtcagggaagacgtggacatgctggtgaaggtcaagagcctggcggacgggatgaggtgggagagccagatcgtcgaccacgaagacggcccgctcgtcagggagaagatcctcctggtcgtcaagacgtactggactgcccaggaccaagaccagtagcaggaccggacttgtcaagcgaagttcagcaatgttgataagcatttttcttgcttcgaattgcattggatcgccatttctagctccttgagctagtagtgttctctgtttgtttgctgttccttttggactgtacttgctcagataggaaatttgtatcctaaggtgtaacagggggaaatggaagggcttaggtaaaacccctggcccctgcaaagtttttttttgttttccttcaattgcgaaattgtggcaagtggtaaatagaaagtcactgttgcgagtcatcccggataagcacagctgggttcgttctagcattacagttttgttgtatgcaatcccccccttcccttcagatcttatttatgtgctgtgtttgtgctggattcaaggtttcagatctatttatgatatgaaataacactgtttctggtccccaacagtcgtgacagctaatgggcc

SEQ ID NO: 9075 - DNA, 1332 bp, Zea Mays
tgtatataatctttttcaggatagttcttgtgcaaaagaattacaaaaagatgggacttcaaatttaaattttgaattggaacttgactccttaagttctgaaaatcttgaaagagagatgtcgtcattgaaaaggcaaagtatgtacaaaagaaaacttgattcttcagtctcccagcacaaaagttgtttgaagataagttcattcaaggatttgaaggaggtgattcttcagtacaagaaatttgtatcctccttttcttgacagaatctatgacataataacatctcaggcatgcatggcaatgaggcacaatcaggattgagaacggatgggctacaaagttctttgaagatgctgctagaggtagagcgcccacacttatgttcatgacttttgttgataatttcccagcttgtcgacagttagaggctctcccattcttggatccactgaagcattttagagatctgaaagaccacatcgatgagttcatccatgcctccatggacgagcacaagacctgctttaagaagacgatccagaagatgtttgggatgtcgaaggctattgcagagagatccgcggcagaagcgaaggaagctggagttgaaagtgctttgccacttcagaccagtgtctcgcagtagaatttcacgttggtagtttcttgctcgatgctggctgaaagggaattaggcttacacctagttcctaaataattttggtggttgaattgcccaacacaaataattggactaactagtttgctctagtgtataagttatacaggtgccaaaggttcacaacaagccaattaaaaagaccaacgttgagttcaaaatggagagctaaaagcataccgaagtgtgccctggtctggcgcaccgaacatgtccggtgcaccaccggacactctacagtacctgtccggtgcaccaggggactccgcgctgaactcctcaccttcgggaatttccagaggcactccgctataattcactggacagtgtccggtgctccaaagggacgcggctctggaacttggcagcctcgggaaaacgcagcggctgctccgctatatttcaccggacatgtccggtgtacaccggactgtccggtgcgactgcggagcaacggctacttcgcgccaacggtcacctgaaggcgcattcaatgcgcgccagaagcgcgcagaagtcaggcacgcccatactggcgcaccggacattgaacagtacatgtccggtgtgcaccggacatccaggcgggtccagaagtcagaactccaacggctttggtgacgtagctggtgcaccggacatgtccgg

SEQ ID NO: 9076 - DNA, 3693 bp, Zea Mays
gtgttaacggagatattgtttcatcagttgattcattgagattgatgatggaagaggaagaaaggaaaaaaagaatgttcaggcaattgaactcagaacatagctcgcttagtgggacttttacgtgcttttctgtggatggatctaaatcattgtgcaaagggaacccaagctctgcatctgctaatagcctcttgaaaatacgtaatgtccaaagaggacctcagaaacggatagcctgggacaatgaacttctgtacgtaccaaaggagggtattacagaaatgcttagaagcttcatggatcaatttttatctggagcatacaatatcctgatgcagtcagtctgtggtgatatcatggatgagcaccactccattgagaaatctgacataactacattcttcaaagttgctcggtttgttctagcttttcaacatgaaaaggcttcaaatgatcagctaccgcagttatatcttggcttatttgtgatgaatatcataactatgtctatccagaaatctgctaaagggattcaaccatctggggtttctcctagcaatgaacctgatgataatctgccatttcatggtgatatatgtggacctgttgcggccacgttgaatgaagatatgttcaatatagtcatttccaggtggcgtgagacgtatgaggctcttaaggaaactaacgactacaaaactctttcagcagctgggtctttaatgaagaacatgggctcacattttaaccttgattctctatctagttatttaaaggtttataaaaaaactcgatctgtggggcatcttgcattgcagattgacatgatatatttggtgctaaaagtactccctgaagattcaagggaatctcaaacagctcgtgttttgctctataaactgttttatgatcagacagaacatggtctcactcaatttctgctgaacttgttcagatcgtttgatagtcacaagcaacccaaaagtgatctagtggatttattagaaacaattcatatcatgctacagctcatggaaaagcttcaagcacgtggtgcattaagggttgcaaaaaagacaaaaaaggtcagaagaaagaagtccacaaatgataaaaaggagaattcagaacccaaagtggataatgcagaaccaaacgatgctaatcctacagatggaacgaaatgctcacctgaaacacttccagatttgagaagcgagggtcctgctttagaatcttctccctcagaacctggaaaagtagacactagtggcgcacatgtactggatacacttgtggacactgtagttaacattgagagtaccgcacatgctgaaggtgacccatcttgcacagacagtggcgtaatgaagagaaatctcattgaagaagagggtgagacttcagattcttcagttgatcaccaacctgctacaagtgaagttgattttaatgtttctcggttaatatctagtcttgcaaacaattctgttgtgcaaaatatttgctggctgttgaagcattacaaaagtaactcctaccgtacaaaccattacataatatgcatgctacggagattctgtgaagacctagagctgtcaccgatgctgtatcagctatcacttttaacaactttctatgatatattagcggaacaaaagttgtctagttcaaaggagtacacaaacattgtaaattttctttctaaagttgtgaggaaaatgttgagaacaataaaaaaacagccactgctatttgtcgacatactattttggaagacgcgaaaggagtgtcattgcattgatgctgatgcactactgaatgagcttaagaatgatgttggaagcaaagacagtgaaattggttcaagtaaggggtggagagatcgaataaatatagcagattctcttggtgacgatgaagttgacgtagttataccgcaggcaccttatgatgctgataaggatggagatctatcagctggtgaacatactgatgactttaggaagagtagtactaaatataaacggagcagattgtcactttcagatagtgaggctgatgaaatcgagaggttcttgtatgctcttctgtatttgaacacagctaattagctgaacttcaatcctcactttgatatgaatggatttaattcaggaaccatgtatcaagagattcggtgcccaaagttccaaaacgacgaggtcgttctctttttacggaagagcaagagaggctcataagagacctttatgaaaaatataaggatggtcctaaatgcagtcatataatagctgagtctttagaccccagcgggaagatatcttctgctcaagtttctcgtaagcttacacagttaggtctcaggaatgtcacaaggagaaaaaaggttgcaggtgaatctctttcaactggagatcggactatagaacaacaagacaactcgcttgatgatctgaaccccatgctaggcgaacagaaccatggctccaaggctaaaagctccaggcccagaaggaaaaaattacacacggcaagtgatgaccatgatgacacaagtcagagaaaatcatctgatgaagacacattacaaatcaaaaagtaagaaagttccattggtggatagttcactgagtggatcacagcatcaagaagctcagcatgacccagactctgatgatgcgaccataggatccatgattagaagtagaaaaaagaagaggttatccacgtcagattttgaagggaatgtacgaaaccatcaagaatcttcagacaacaccaaagccaaggactgttcaccgattatatcccaacatgagaaagcattgcaagacatttatcctgatgatgagaccattggatccatcattagaagtgtgaaaaagaagagatcagtgacatcaaatttctcagcgaatatagaagcccaagagtctttgagaaatattaacctacaagatgaaactgttgtttctaatatcatggatgcttctgtaaatcatgggtctgatccagtcaataacagtgacaatactgttgaagatgaacttttggatgattttgaaactgagctagtcaataacggtggcaatactgttgaagctgaacttttggatgattttgaagttgagctagatgatcatgagcatactgaccaaaggatcactgatgatgaaattatgactgaatcagggaaagcaacaaactccgatgctaagggaagggctggtttgaaaagaagacacagaatggttattgacgatgaggatgatgattagtaactgttcaggactgaagaacccgtaactattgaggagtggagtttcaaatgggaaatgggattaaaaaaagaacttttcaggattgtttcccttgcactgctaagctctgagcacgattcaagctgtttcacacctactagtgccagatgttcttccatctgtaatgtttagtggggtcacaatctaatggaattttgcagatgcaaagttcaggctgccctgctgtgtggcctgctgtacagactgataatttcgagtactgttttttttgaaatgaaatactgtagagaagccccccgcagcaatttcgagtactgttggctgtatttgaaactccgaacactgcaactctagcgaatgcgctcagttatactgttttcactttcacctaaagtgctctttagac

SEQ ID NO: 9077 - DNA, 3699 bp, Zea Mays
tttacccctgttgcacttgtttactgaaacatctccaagaccaaggtgattgtattcaccaactgtagtctagtttttttcacatcattcaacccatatttcaatgatatcgtttttgtggatcatagttggatgaccaatgataaatgtgataagttgcaaactttattctcagaagatgactggaagttagttcagttggtgcttactttgttccgcaacgtcttggctattcaagaaatcacattgacgcagaaagcatctggagaagctacccacttactcttcctgtctgataactttttggagctcatgttccaagagaatgtgatggacataatcttagttttgactcagcatattgatgagccctctggttaccttaaggaggaaaaccttcttttaatggagatttaccattatctcttcttaggccgagacccaggactgattgcccgagcttctaataaaggtttaaaggatcgtgttaacggagatattgtttcatcagttgattcattgagattgatgatggaagaggaagaaaggaaaaaaagaatgttcaggcaattgaactcagaacatagctcgcttagtgggacttttacgtgcttttctgtggatggatctaaatcattgtgcaaagggaacccaagctctgcatctgctaatagcctcttgaaaatacgtaatgtccaaagaggacctcagaaacggatagcctgggacaatgaacttctgtacgtaccaaaggagggtattacagaaatgcttagaagcttcatggatcaatttttatctggagcatacaatatcctgatgcagtcagtctgtggtgatatcatggatgagcaccactccattgagaaatctgacataactacattcttcaaagttgctcggtttgttctagcttttcaacatgaaaaggcttcaaatgatcagaaatctgctaaagggattcaaccatctggggtttctcctagcaatgaacctgatgataatctgccatttcatggtgatatatgtggacctgttgcggccacgttgaatgaagatatgttcaatatagtcatttccaggtggcgtgagacgtatgaggctcttaaggaaactaacgactacaaaactctttcagcagctgggtctttaatgaagaacatgattgacatgatatatttggtgctaaaagtactccctgaagattcaagggaatctcaaacagctcgtgttttgctctataaactgttttatgatcagacagaacatggtctcactcaatttctgctgaacttgttcagatcgtttgatagtcacaagcaacccaaaagtgatctagtggatttattagaaacaattcatatcatgctacagctcatggaaaagcttcaagcacgtggtgcattaagggttgcaaaaaagacaaaaaaggtcagaagaaagaagtccacaaatgataaaaaggagaattcagaacccaaagtggataatgcagaaccaaacgatgctaatcctacagatggaacgaaatgctcacctgaaacacttccagatttgagaagcgagggtcctgctttagaatcttctccctcagaacctggaaaagtagacactagtggcgcacatgtactggatacacttgtggacactgtagttaacattgagagtaccgcacatgctgaaggtgacccatcttgcacagacagtggcgtaatgaagagaaatctcattgaagaagagggtgagacttcagattcttcagttgatcaccaacctgctacaagtgaagttgattttaatgtttctcggttaatatctagtcttgcaaacaattctgttgtgcaaaatatttgctggctgttgaagcattacaaaagtaactcctaccgtacaaaccattacataatatgcatgctacggagattctgtgaagacctagagctgtcaccgatgctgtatcagacgcgaaaggagtgtcattgcattgatgctgatgcactactgaatgagcttaagaatgatgttggaagcaaagacagtgaaattggttcaagtaaggggtggagagatcgaataaatatagcagattctcttggtgacgatgaagttgacgtagttataccgcaggcaccttatgatgctgataaggatggagatctatcagctggtgaacatactgatgactttaggaagagtagtactaaatataaacggagcagattgtcactttcagatagtgaggctgatgaaatcgagaggttcttgaaccatgtatcaagagattcggtgcccaaagttccaaaacgacgaggtcgttctctttttacggaagagcaagagaggctcataagagacctttatgaaaaatataaggatggtcctaaatgcagtcatataatagctgagtctttagaccccagcgggaagatatcttctgctcaagtttctcgtaagcttacacagttaggtctcaggaatgtcacaaggagaaaaaaggttgcaggcccagaaggaaaaaattacacacggcaagtgatgaccatgatgacacaagtcagagaaaatcatctgatgaagacacattacaagtacttaaaagcagatcaaaaagtaagaaagttccattggtggatagttcactgagtggatcacagcatcaagaagctcagcatgacccagactctgatgatgcgaccataggatccatgattagaagtagaaaaaagaagaggttatccacgtcagattttgaagggaatgtacgaaaccatcaagaatcttcagacaacaccaaagccaaggactgttcaccgattatatcccaacatgagaaagcattgcaagacatttatcctgatgatgagaccattggatccatcattagaagtgtgaaaaagaagagatcagtgacatcaaatttctcagcgaatatagaagcccaagagtctttgagaaatattaacctacaagatgaaactgttgtttctaatatcatggatgcttctgtaaatcatgggtctgatccagtcaataacagtgacaatactgttgaagatgaacttttggatgattttgaaactgagctagtcaataacggtggcaatactgttgaagctgaacttttggatgattttgaagttgagctagatgatcatgagcatactgaccaaaggatcactgatgatgaaattatgactgaatcagggaaagcaacaaactccgatgctaagggaagggctggtttgaaaagaagacacagaatggttattgacgatgaggatgatgattagtaactgttcaggactgaagaacccgtaactattgaggagtggagtttcaaatgggaaatgggattaaaaaaagaacttttcaggattgtttcccttgcactgctaagctctgagcacgattcaagctgtttcacacctactagtgccagatgttcttccatctgtaatgtttagtggggtcacaatctaatggaattttgcagatgcaaagttcaggctgccctgctgtgtggcctgctgtacagactgataatttcgagtactgttttttttgaaatgaaatactgtagagaagccccccgcagcaatttcgagtactgttggctgtatttgaaactccgaacactgcaactctagcgaatgcgctcagttatactgttttcactttcacctaaagtgctctttagac

SEQ ID NO: 9078 - DNA, 4016 bp, Zea Mays
tttacccctgttgcacttgtttactgaaacatctccaagaccaaggtgattgtattcaccaactgtagtctagtttttttcacatcattcaacccatatttcaatgatatcgtttttgtggatcatagttggatgaccaatgataaatgtgataagttgcaaactttattctcagaagatgactggaagttagttcagttggtgcttactttgttccgcaacgtcttggctattcaagaaatcacattgacgcagaaagcatctggagaagctacccacttactcttcctgtctgataactttttggagctcatgttccaagagaatgtgatggacataatcttagttttgactcagcatattgatgagccctctggttaccttaaggaggaaaaccttcttttaatggagatttaccattatctcttcttaggccgagacccaggactgattgcccgagcttctaataaaggtttaaaggatcgtgttaacggagatattgtttcatcagttgattcattgagattgatgatggaagaggaagaaaggaaaaaaagaatgttcaggcaattgaactcagaacatagctcgcttagtgggacttttacgtgcttttctgtggatggatctaaatcattgtgcaaagggaacccaagctctgcatctgctaatagcctcttgaaaatacgtaatgtccaaagaggacctcagaaacggatagcctgggacaatgaacttctgtacgtaccaaaggagggtattacagaaatgcttagaagcttcatggatcaatttttatctggagcatacaatatcctgatgcagtcagtctgtggtgatatcatggatgagcaccactccattgagaaatctgacataactacattcttcaaagttgctcggtttgttctagcttttcaacatgaaaaggcttcaaatgatcagaaatctgctaaagggattcaaccatctggggtttctcctagcaatgaacctgatgataatctgccatttcatggtgatatatgtggacctgttgcggccacgttgaatgaagatatgttcaatatagtcatttccaggtggcgtgagacgtatgaggctcttaaggaaactaacgactacaaaactctttcagcagctgggtctttaatgaagaacatgattgacatgatatatttggtgctaaaagtactccctgaagattcaagggaatctcaaacagctcgtgttttgctctataaactgttttatgatcagacagaacatggtctcactcaatttctgctgaacttgttcagatcgtttgatagtcacaagcaacccaaaagtgatctagtggatttattagaaacaattcatatcatgctacagctcatggaaaagcttcaagcacgtggtgcattaagggttgcaaaaaagacaaaaaaggtcagaagaaagaagtccacaaatgataaaaaggagaattcagaacccaaagtggataatgcagaaccaaacgatgctaatcctacagatggaacgaaatgctcacctgaaacacttccagatttgagaagcgagggtcctgctttagaatcttctccctcagaacctggaaaagtagacactagtggcgcacatgtactggatacacttgtggacactgtagttaacattgagagtaccgcacatgctgaaggtgacccatcttgcacagacagtggcgtaatgaagagaaatctcattgaagaagagggtgagacttcagattcttcagttgatcaccaacctgctacaagtgaagttgattttaatgtttctcggttaatatctagtcttgcaaacaattctgttgtgcaaaatatttgctggctgttgaagcattacaaaagtaactcctaccgtacaaaccattacataatatgcatgctacggagattctgtgaagacctagagctgtcaccgatgctgtatcagcggaacaaaagttgtctagttcaaaggagtacacaaacattgtaaattttctttctaaagttgtgaggaaaatgttgagaacaataaaaaaacagccactgctatttgtcgacatactattttggaagacgcgaaaggagtgtcattgcattgatgctgatgcactactgaatgagcttaagaatgatgttggaagcaaagacagtgaaattggttcaagtaaggggtggagagatcgaataaatatagcagattctcttggtgacgatgaagttgacgtagttataccgcaggcaccttatgatgctgataaggatggagatctatcagctggtgaacatactgatgactttaggaagagtagtactaaatataaacggagcagattgtcactttcagatagtgaggctgatgaaatcgagaggttcttgtatgctcttctgtatttgaacacagctaattagctgaacttcaatcctcactttgatatgaatggatttaattcaggaaccatgtatcaagagattcggtgcccaaagttccaaaacgacgaggtcgttctctttttacggaagagcaagagaggctcataagagacctttatgaaaaatataaggatggtcctaaatgcagtcatataatagctgagtctttagaccccagcgggaagatatcttctgctcaagtttctcgtaagcttacacagttaggtctcaggaatgtcacaaggagaaaaaaggttgcaggtgaatctctttcaactggagatcggactatagaacaacaagacaactcgcttgatgatctgaaccccatgctaggcgaacagaaccatggctccaaggctaaaagctccaggcccagaaggaaaaaattacacacggcaagtgatgaccatgatgacacaagtcagagaaaatcatctgatgaagacacattacaagtacttaaaagcagatcaaaaagtaagaaagttccattggtggatagttcactgagtggatcacagcatcaagaagctcagcatgacccagactctgatgatgcgaccataggatccatgattagaagtagaaaaaagaagaggttatccacgtcagattttgaagggaatgtacgaaaccatcaagaatcttcagacaacaccaaagccaaggactgttcaccgattatatcccaacatgagaaagcattgcaagacatttatcctgatgatgagaccattggatccatcattagaagtgtgaaaaagaagagatcagtgacatcaaatttctcagcgaatatagaagcccaagagtctttgagaaatattaacctacaagatgaaactgttgtttctaatatcatggatgcttctgtaaatcatgggtctgatccagtcaataacagtgacaatactgttgaagatgaacttttggatgattttgaaactgagctagtcaataacggtggcaatactgttgaagctgaacttttggatgattttgaagttgagctagatgatcatgagcatactgaccaaaggatcactgatgatgaaattatgactgaatcagggaaagcaacaaactccgatgctaagggaagggctggtttgaaaagaagacacagaatggttattgacgatgaggatgatgattagtaactgttcaggactgaagaacccgtaactattgaggagtggagtttcaaatgggaaatgggattaaaaaaagaacttttcaggattgtttcccttgcactgctaagctctgagcacgattcaagctgtttcacacctactagtgccagatgttcttccatctgtaatgtttagtggggtcacaatctaatggaattttgcagatgcaaagttcaggctgccctgctgtgtggcctgctgtacagactgataatttcgagtactgttttttttgaaatgaaatactgtagagaagccccccgcagcaatttcgagtactgttggctgtatttgaaactccgaacactgcaactctagcgaatgcgctcagttatactgttttcactttcacctaaagtgctctttagac

SEQ ID NO: 9079 - DNA, 11802 bp, Zea Mays
tccctgccgcctggagcgatgaaaccgcaccctccgccaccgcaccctcgcgcccaagcccagactcaaaactcagccaaacccctcgcatcttccctcccaccgatgcgctcgcgccgccgctccccatcccccctcgacgcacctccccatcggccgccccacccccgcccgccgcgtcggcatcctcctcgttcgcggttggctcgagcggcaccgatggagcgacggctccgtttcccagaaggcgaaaggccgatgagaccgacggacgattcgtgccgatcgcacaccggcaggcggtggcgagccgggcggacggggcggcggcgggctcgccgtacgcggtgcataggggacatgagggtgctgctgtctaggtcgtgtaggtcggtcgccggtcccgcccgccgtctccacggccaagaccgtggtggcgtcctcctccaacgttcgtccgtgtttgtctccatggcgctctcgaatgcctaagccaaggccgaccgcctcgagctggtgctcgacgaaacgccccgcaggaccgagttctggtagaccatgctcgtcgattcgctggcgagggccggccgacagcacgacgcattctgcctctctgcggagatgcgggcctccagcgtggcctgcgactcccacgtctgcgatgtacaagcaagctgcccttgtgcagacagactcagaggtgtagagaagacatggtgtccgctgaggattgcaagatccattgctgcataggctgatgtatgcggcacaccatcaggagcagactgatcccgcacacataaggtttggtgctgcgaacagagtgttagaaccaaattcttgtcaggctaaaccgatttatatcatagatgcaggtgattttttttcttatgattatgatcttaaatgggatttagttggaccgtgctattctgctataactgtaaagttagggtgccgaatagttgatgcacctgcttcatcatctagaaaaaagaaataaaggagatttttgacgagtttcatttttttatggaaccttcgttggtggctcgagcaacatataaaggcgatcatcacttccgatgagttgagttttattgcttactatttccttccttccgattcttagctgctaggagctttcaagttgttccctcccataatctagagtaattacagatctgtacacgttatataagcaatttcccttatgcaaacctggatgattagttatgtatatagaattttgaagagaaaatatattttttcgaatacagactttgttctgccctcgaatcctccattttaaatagcagcttgatgtactagttctcacgtcatgctgctataaaataattggaaggccatagtttatttgattgccatagcccaaagtttcacttccattgccatggttgagtgatgaatttccatgatgctcctatggcgtaaaacaaactaaaaaaggtcgtcattaatcattgttggagttgtggtaaaacatatatcaaatcatttggttcatgtgaactgatctagaaaccacgttctgtatcagcaactcagcgcacaaggctgactagagagcaactgtaagcttaccacaaacactaaaagccttcttccaactggtatgacagttccacttggcttctccctatgtgtgtttcaaatcaaaatgtgcaagagacacatacccaattgaagacccatccatggtgcctgaaacattaataaaccttatgtagttccaaacctcacggcataatatagcaagctgattgcggttaacttaccactgagagggcattttttgtaacggtcgatggtgcccggcacgatttcaccaattaaggacccactttcatcatttgtttgtggagtcctcaacgattgatgattactacctagccatgtaccagcagttgacactggactcgttaaaaaagatcttgtgacctgtacaatcaactacaaacttataatttcgtaaacctgtatttgactatttgttagcatactgcacagcagtgaaagcagagacattcagtagttagataggtagaaacttaagagcatacttcttgacttatgaggtccacacacaaaaacgaaaaatcgtctaacatttgttcaaacagatgaagcgcatgtcattagagttggttgcccgtactatatctgtggacatgtgagcagatgttaacttggtttttattgtccaccttcccatcattggacatgtgagcacggctatcatggagttcttcaaccaatggcccacaatagtgcttgcccttttgaactcacccgcgttcaaaaacatcacatgctcacaaaatcagtaaggaaagcaataaaagacataacttgtttctaaaacggtggcttttgtttcttcagttcaccatcatattcaactttgtcattgtatgttgctaaaaaaactcggtcggggagggaaagaccgtcctcccggtattatattaagaaaagaccgaaacaatggtctcggtcgagaaaaacttcgaaccctggccctatcactaatgggcctcgtcaacggtccactctgcaacggctcaaccggagataagaataaaaaggggcccaaaggagcacccatatacaaacctcttgttacggcggccaaaaacaagcatacacaaaactatccataaaaacaccgagaaaactactgcagccctccagcactagtactgggagcagccaaaaaggagagaccctttgctccagcagcttgccatttctccctcttctcattgacaaaatccaagagcatggtgaggcttggtgacacaccatcaaataccactccgttcctatgcttccaaatcaaccatgccccaagaatgaccagagagtccaatccttgtcaagccagacacaatggctgaaattcttttccaccacaataggaagtgagtgtcatcatgaagaggagccaaactttcttagaatgttataccagcacacccttcagaaaacacaagataccagcaaatggttggtctctggctcttaatcacaaatggggcatctaggagggtgattcaagcctcttttttccagcctgtcagcagtccagcatctattatgagccaccaacaacaaaaaagaacttgcatttgggggtgcccaagacttctagatcctttgataatgttcaaaggaaacagatccaaaaagaggccattgtatacgaactagcagaatattggatatcgggggcaactgaaaaaatatgtttatccttagtattaggttgcaacaccataccagataaagagttccaaaggtgaagatagtcagtcaaagctcccacagttaatgcccctctaatatcagcaatccaacctctgtttaacaaggcttcttcatttggctagcctctattaatcattgttggacgactgatcgtctagcccgtagaggtttgggccacccccagtgttgcttactttgtgataagcaggaagagacggtgcaacacttgttggtgtcttgtgtttttgcaagggaggtctggttcagaagtttgggcagaatgaggttgcagcactcggcgcccattcctgattctgctgtgttccaggattggtggagagaatctgaggaattggtgcctaagccacaaaagtaaggattcaattccttggtgattttagtggcttggcaaatttggaaacataggaacacttgtgtttttgaagctgcttctccgtatatcagcaagattttgcatgatattcatgatgaagctgttttgtggggtatggctgggggtaggggcctatgaggccagtaaccatccctctccttcctgaggtctagtgtgtttggattggttgtgtgtgtctgatggattgtttcagttttctgtgtttttgccctccgtaaggaaacccatgtatttgcctatttggtcttcttagaccttttcctttcctgttaatataatgaggcacagttatcctgcgttttcgagaaaaacaaggtttcctgtacagttgttctggaagcaattctttttgggataatactgaacaaccttggggcaatatctgagactctctttccattaatccatttgtcagtccaaaaaagggtattacagccattcccaacctcagtgataagaataacagaaaagaatgatctggccttactaggaacttgtatagggagatcaatccatggtttggtagggttagttttttccaaccaaagccatctcattataagtgcccaacaaagctcagggaaactagagatacccacacctcccattgcctgaggtctgcacacttcccccaagcaaccagacaatggccacccttcgcttccctccttcctcttcataagaaacccttcccgatcttatcaaattcattaatgccccatttggggaagtcaatagccattgcagtatagacagacatcccagtaagaacatgctgcaccaaaactcttctgcctgccctgttaagcaaatcagccttccagttgggtaacctatcagcaattttgtccaccaagggccaggattgatgcttagaaagtttttgtaaggataatggaaggcccaaatatttgcaagggaaggaagcaatctcacaaggtaagatgttttgaacagccaggatagtttcctcagaacatcttatgggataaatattagacttttgagcattgttatggagtccagaagcatccccaaaaagttttaggatgtcaagggtggtagagatatcagcctgggtgggatgcaaaaacagggccacatcatcaacatagattgatattctgtgtaattttttcctgctgcataaatgttgtaacaaaccttcctcagctttgaaaaatagaaaactcagaacatccatagaaagaataaacagcattggagacaaatggtctccctgtctgaggcctcttctatgttggataattgtgcctggaccgccattcaaaagcacttgagtggtagatgatccaagaagctcacatatgatgtctctccatatcagaccaaaacccatctgtttcattacttcaatcaagaaaggacaagaaacagaatcaaatgcttttattatatctaacttgaagagcaatctggccttattctgtgaatgcagtaatctggatttctgttggaccaacatgaaattgtcttgaataaatcttcctttgatgacagcactttggtttggggagactatctcattcagtttttttgccagtcggttggcaagcaccttggtgactaatttggcaaaactatgtaccaaactaatgggtctgaaatccttgacctgatcagccccctccactttagggatcatagtaatatatgctgaattgagtctgctcatatttgtgaaatttctgtgccaaacagctcccactgcctttagcacatcttttttgataatattccagcatactttatagaaccttccagtgaaaccatcaggcccaggggccttgttagaaggcaaatttctaatagtgtcccaagtttcctgttctgaaaatgggagatccaattcagagagattatgcacaggtaacccaagagcctcaaggtttatagttctttccctccctgcagccagccctataaggttgtatagaagtgatctacaagagcttctttctcagtatggctagttaaagtattctccccatctctgagtttggtcaccaagttctttctctttctatgtctggcatgcatgtgaaaaaacttggtgtttgcatccccatccttcaaccaactgattcttgatcttaatcttgccatagtccttttgaatgaggtcaacaacaaggattgctttttaagcttatttttaagccacaattcagcaggagtaaggaagatcctgggcaatctcaaacctgtgcaaaagctcctttgccaaagccaactaggaagtcacatggccaacctgcctatcactccaactctgtagtctcctctcctagaattttctttaagcttcctttgcaaggtcagataaggacaaggagaaggtccaacagaagtccaagcagcctgtacagtatcaaggaatccctccatgtttggccaaaatgcttgaaagtgaaatcctttctttccatggaaattatcctttagaccgagaagcaggggtcaatgatcagaatcttgggaggcagagctttgaagcagaacattagggaaatatgatgtcaatgagcagaaaaccctatcaagcttaaccaacacagggttgtcctgctaattagaccaggtgtattttctaccatgtagttgtattgtatctctcttagagcaagatcattgatcacagacctgaatctacccatcatagccctatttaggtttgaattatttttgtcagagtcccatgcaatgacccatgtcccatcacaagcagccctgatgtcctaaatttcttgaaggaaaagaattttctcagcatcagtctgaggcccatacacacaagttaaccaccagggaattccatcatctttgcaaaactggacagaaacacaatgggcatccatcctttgtactcctgtatgtcctacatttcttttcgaagcaactagaattcctccgctagcaccaacagaaggtagaaaaacaaattcagtaaactcaactcccgatgtcaccctgagtaataagttacatttttgtttcctgacagcacactatatccacctgaaaggaatccaccaggtctctaacagtatccatccgaacagaagaattaagacccctaacattccaaacaagaattttagaaggatccatagaaaacaaaatagatcaaccaagggggtgggaccagaacactaatacttcaaattatcaggaagtgcccagccaaatagggcagaaggggcttccacctgatcctaattcagaaagtgattgaacagcctagcatattcttttagagcttcccaatggggatggcaacgggaaattccccgtcggggaatagctccccatccccgtccccgcggcatccacacgaatgcttgtggggaacatttcttctccatccccatttcccacggggataaatccccaacggggatccccatccccgtttaaattataattaagacttacgttctttgttattgatgttaaacattgtcacttatacacattgtcagatgtaagaaatcattatgcatacatcaaaatgaacatgtttgtacaattagtggcctcttaacaaggtaattatttatttttgtcgttaactagtacacgaaaaaaacgtcacatgcaagtttaacgggccccgcggggaacggggaatgggaatgcttccccgtccccatccccgtttacccgtcgggggataaattttccccgtttatatccccgcgggggaagtttcttccccatcccctaatggaggacttctacgcggggaatcggagatcgggtccccattgccatctctacttcccaacacagattctctatatatgtttgatgatgtggttatatttatccaaccaacagttagagatattagtactgtactggacattcttcatatttttggggaggcttccgagttgcgaaccaatatccagaaaagcaatgtatacccaattagatgcggggaacaagacttgaccttgctgcaaaactcgtcgccttgtgagatctcgcaatttccctgcaaatacttgggtctacctcttgccataaaggaacttaccaaggaccaagtacaaccgattattgataaaattgctaaccaactgacagggtggaaagctgatttgatgactaaggctagattaaaggtacatgtgcagtttgtcctcacatggatggtcatatatctcgcaatggctgtggatttaccaccttgggctatcaaagtattgacaagatccgacgaggctttctttgccgagggcgcaaagaagcgagggaaggacactgtcttgttgcttggggaaaagtttgtcggccgcttgagcttggtgggctggggatttccaatctcaatgatcttgcttgggcacttcgtatgcgttggctctggttagcaaaaactgatccaagacggccatgggcatctcttgctatacaagttcccagcaatgctaaagatttcttctcagtggctatgcaaactgaaattcgtaatggggcctctactctgttttggtcttatcgttggttgatgggacacagggtcgtggacattgccccatcattattccagaatattcctaaaagaagggttaataagaagattgtcttggattatctctctaatcatacatggatttcggacatacaaggagctcttactgtatatcttgctctatgggataatcaccttggttcaacttagacctgaagtggatgacactcacttttttcgtctcgtcaccaatgggaagtattcagcaaaggcagcctatggggttttttccttgggtcgacgacttttgaaccgtactacagaatttggaaaacctgggttcctccaaagaccaagttcttcatgtggctggtagctcaacgaaggctttggatagttgacatgatgcaaaagaggcatggatcaccctgtgatcaggagcaggaaacacttgaccatctactgattgggtgcgtgttcgcccgggatttctggtttaaacttatatctcaagttaatctccaaagcatggcctctcagcatgttgatgcatcttttatgggctggtggagatggctgggcaatcaggtccatggagtggctgggtaaactctggtaattttaggagcatggacactgtagaaacaacggaataactttgtcttcgacagaactagacctaatgtggatcttgctgttaggatggctgatcaagagcgagagaagtggaagctggctggagcaagaaagctatccttgctaactagtcacatcccgggtcagtaggctgtgttagagttagtagttttgtgtgttttatacatggatgagtattagtgtgcctgtacttggcccccgtaaggtggctgttttgtattatctttgtatttcttcttaatggaatggtatgcagccctcctgcgtttttcgagaaaaaaacttcttgagctaaaacactatgtgatgctgtttggggggcatttgcaggatgttatactaccatgaatattggatgatgccactctagcaagtttaaacacaatgatacactcaaataatgtttatgttagtgcttctgcggttctgcctctccccagtgttggtatccttaaattgtttcccatttgttacttatgatatatatgcaagcaggtactaggtgcaagcgtgtaatcagactttttagcctgttagatctgtatccaacggtaaatataattgtggtttgttagagtttttttataaagctataccaggtggtggtggaagggttttaagggcctgtttggttcactacctcagttgccacactttgtctaacttttctgcctaaggttagttattcagggcacgtttggtttgtggctaactgtgccccactttgcctaaggttagtcgttcgaattgaataactaaccttaggcagaaaagttaggcaaagtgaggcaagttaggcatcaatccaaacgggccctcaattcgaacgactaaccttaggcaaagtgtggcacatttagccacaaaccaaacaggccctaagtgctaaatatgacataccgttggatctagatctaacggatccaaatgtctccttgcgtgcttgcacctagtacatgcttgcatattagtcgttcccatgatataatgatctgttgcagctataaattggagctgacaattaaatctttttccatcctatcttctgacaggaaaaacattgcttgcgaaaacgttagcacgtattgtaaatgtaccattggttatagctgatgcgacatcattaacgcaagcaagttcattactgacttactaacattgttttctttagaatgtcttggaaaggagtgcagatgttactagacatgtatctggagaaggtgttcaacaagcattgttgaaaatcctagaaggaactgtaagttactaaagttgcctttggttttgtgcctgtggaattaggagtttagaagctatcttcgattcacttttttttataaggatctttgattgactttaaacctcagtaatgattctttgtatgttgcctacttattcctaacgcatgttgttaatattcatgagaaagtatcacacaagaattctcgcaatgatagtatacaggttacataccctatatggtccttaatgaatacgtgcactatatatcatatgggttaaatttggattcaattgaatgaaaaaggatctttaaaatgttcttttttatgtcataaggaccctgtactacattacacataatgagcagaggaagtgttacctcaaaaacatttattgacaaccagataacagcaaacacgctggttgtgttaaaaatgtgcagggcataagtattctactccctccgtcttaaaatataagaaatctagagttcaaaatttgcaccaaaatacaagtattctggagttccctttttctttgtcttttagcatacaatattgagattccttttaaaattagcatcacccaaacagccactcagttgtttgcagtcttattttcaatcttggattcatgcttttctgtttttctgctgaagatatttagttaccaatcttcctttctgtttggctttaaatatgtttttatctatcccaaaaagttgctcaacctatgtgcttttgaaatgctactacattttcagggcatagaataaggtgattgaccacttccatttaaaaattgcttccaacttttcctaaagaacattccacgaagtcataactcacgccctattggtgatgggcaaaaattagcgcattagctaccattcaagtgcttatataggttgtgaatgttttagtttgtgttatttgataatatatcaaacttgttttatttgaatgtaaatgatttggactgatatcttgcttcaagatcatctatgttttgttgtcttggatattgttactttatcttcataatttaccgctatcatttgtccttctcatattgatgttaggtagttccagttgacgatgtgtgaatcaggcaatcgtcgcccttgtgcagctttgctccatggtgcttgtttctttgtgaggagacaccggataggatgggacattgctcgccctccccaagctcggtagttccatggaatgaacaaccaattagttaaagcaatgtcaagtcttattttcacacaaaagtgcaagatgttgattgtacatcatcaacatgtgccatttgcttggaagactacatcagaaacgtcatatattttggaacagaggtagtagtcaataattagcttattcgttttttatatggttgtatatatcctagcaagagaccactctgtagtcatttccttagtttcttgagagctgggaccacacttatagtgaagaaaactatgttcaactaacagaattaacttggatgcacctttgcacaatcatatctgtacaagttttggcggcatatgcttatttcaaattaggcttgtggtgttagattaatatattcattggatatggtgtgaatttctgagggataccggatgatgtgtacacctgtttgtctttgtcaaaatgttatcatgcattctttttgtctttgtcaaaatgttatc

SEQ ID NO: 9080 - DNA, 3290 bp, Zea Mays
gtctgcgcacacccaaaccaccccgccacacaaagagcaaaaccctctttctctgcccctcagtcaccgccgcgaacttgcgtcttgcgatcgagggaggaacccaccaaatggctcgcgtggagaggcagccgcggaaccctagtaggctcgcccccacctcccacccggcgccggcgcttccgacgacgccggctgctcgccgccccggcacgccacggaacgctgcccagggcacagtttgtgcaacatgtgtttgcggttcaggaaataatgcccgctgtcactgcaagcaagacgcaagacataaccaaacacaccacggtaatgatggaacagccacagccgggggaattgcaaaaccagactctcaagataagctcaagatggctagattttctggtggtacatattcaaaacctgatgcaagagtgaagctgattcctgcagaagatattacctatttacagcgtcggaaaccatgtggtagaactgttgggtcagttgggtcacagaaaagacattgcagaagaagtgtcacaccacctccaagttcacgaagagtgtctctcctaggatctagatcgcttgctgaaaatcctatcccatcagtgtcatcccatgactcgtgtttaccccataagaggcttgagacagctgaaaatagggacccatgtgctggggggcacataagtagctctgtgactccctgcacttctttgaaaaaccttgcatcaccgagttgcaaatcctcacaacctttgagtactaatttgaatactgatgctactccaagaaatttagacagaatggtaggcatacaaacacaagcactcgccaggagctccagttcgagtattttgcattctcaaggccagaacagtgaaaaagtgtctgctagtttgccaaaagaggcagtgacaaatcctgcgtctcctagtcccaagcaaattggtgctcaacatccaagtgacaatcctcttgttacgaaggcaggaccttctaagagtgtgtgcacacatgagagtgaaaagttgtgcagcagagacatcaatttaactgcaacaagtactacagttcctgtcttgcaagctcctgttgtggagcctgcattgctaagctcaacatctgtgttcactgaaaggccctttgaggtttatcctgacacaagaactgctgctcctggcatgcaggaacttagtgtgaagcatgtgttgctgaccccaatacctgtgcgtcatgaaccttctacggagtgcctaaaggttcctccaaaacacagcctgcattccattgcatctgcgcaacatggtgcattgtcgcaagaaagaaactcaggggcatcaattagccatggcagatcttcagcttcagaatttcatcgtaacatggatattgtggacacaggtgcactatcaatcttacatatgaagctggccaagaagcattatcaatcacaagcctgctggaagggcaactttcatgttactggaggactgatacatacttgtgatggacttgaagcccatttccctttagaaatttctgtaagagtttatgaagcttcaaaccaaatgcctgaaattttaaatctagaggctgtacctatttcccagctgtggccaaaaaaattcaagatggtacctcccgacattgaggatattggactatggtttctgagcagtcgccaaaggccacactggagttttgatcaccttcttgaaaaagtttgttcacatactggtctgttcacaaaaattggtgatattgagttggcagtgttttcatcgaagttgcttacaccacaagatcagaggaaagatggcaaattatatttctggggtgtttttgggaagcatatgaggaagaagtcatgccaaccaaacagtcatataaaaaatgtggagataagcaatcccagtcaaccaaatggcaaatctgaggaagtaggcatgaaattggatatgagaaaaggcaaagaaaaagagagtgctaaatctgacgaggtattggattcaacaggaggcaatgataccgatagggtcaatggctgcgtggcagtgcttgaggctcctgattcagaccctgcatccagttgctcggttccggctgcctcttctcttggcggatattgccatcatgactctgcaaaaaatagctcttctatcttagattcttcatgccagcctgctgacggatcttctgttagcccagacctcatgctggacataccccctggaatttctgcgcatatacctcctggcttcacaaaagcccactgtcagcttcagatgggaactgctgctctgtcttttgctgataggcatcgcagtctgatttcggacattcctccaggctttactgaagttcatcgtggactccctcctgcaattccacctgctggaccagcttgtgtgtcgacccctgggactgaaaagaagcccttcgttaggttctcgcttaatgtcccaaggcctgttggaatgggagctccacctggatttactccactgcatgcagtgaagaaagagcctgggctgcctgatgtccatgagaccgcagataagcacacactacattctttggcagctgcggcagctgcagtggttaagcctgggaaaggaggtgaaatgaaaatcgcagacaatgaggtaaagactgaacaagatgaaaactcagaggaacgagattttccaaagatcaggaggctttcagacctgtactgtaggccttcggaggacagcactgaattttcccagcgtatgcctgcacgcttgcccgacaagtttcaggagcagagacccgagaaacgtcttgtgcatccacgggaggaggtcgggcggcgatgatgcctgcaaaggggccgatggcagcatcgccaggtggtcgtctggatagcgagtgcgttgtatgtggtgaagagttccccgcagagtgatttctaggattacctcgacaaagggtactagactgctttgtgttagtgattatcctgttcagcggcaatgatgtacatgcctggacaattagcatgctgagcttgtgcgtacaggccagcacttatcgtgaagtccgtgctacatcatcgaaacggttaacgatattgggtagttttggtgaaacccatgcatcaaatgtgatggtcgagcagcattactgtttttatagtgggaccaacctatcaaatgtgacgaaaagggtgaaattctattctagatccccaaatattgactattgaagagcatataaactaccagaaaatggaacttacatgtcaccgtgtaatcatc

SEQ ID NO: 9081 - DNA, 3701 bp, Zea Mays
gggaaccgtacgagcatgagatacgttgccaaatccaaaacccaggctcccacgctgccatttcgcacaaaaactccggaggttcattctcccgccagttcccgcatctctttgaggcttccacctcaccgtcatcggcgcgcccgcatcccgctgccctccgatgacgccatcctacaactctggccccgcaggccccgccgggggtcgtagggcggcgaccttcgccggcgcttgtgtgtttctgtcgcggaatctggttgcccccgaggtgttcgacgccgtgcacgacgcgctccgcctcaacggtgccgaggtcctcctttgcgccgaccctagccgcacgggacccctcgacttccacgtcatctcatcctcctcccacgagagattcgccgatatgcggtccaaaggcttgaatttgctaggaccacagtgcattctttcctgtgctaaagaacgtcgctttctacctaaacaaagttatacgtgttgtcttgcaatggatggggttaaaacactttgttcaggctttgaaaagtctgagaaggttaggattgaagaactagtaacagccatgggaggtcatttgctaactaaacactctatggacgtgaattttgtaatcgtgaaggatgtcttggctgccaaatataaatgggctctgaatactttgaagaagcccattgtcaccatgaagtggttagagcaatgctggattgagcatcgtgttgtgcctcatgaaccttacaggattcttccctttactgggttgaatatctgtgtcactaaactggatccagctttctaaaagacaacacaccttgattactatattgatttcttaacatattattacaaacctggaggtgacaaatatgtcatggcccaaaaatggggtaatatttacattgtgaatccaaaatgggttgaccaatctgttgctcgaagagcttgtcaagatgaaaatagctacctcgtttgtcagacttcatctgcctttagtggttcaaagagttcccataaggagcaacaaaatccggagatcagtagtgcaagtgcaagctttcaacctgttccagcaacatcagttgatgattcagtatcaatgtcacaacatttgcctgcttcatttggtgatgcttcacggatcagcagcactgatattgttggtgcacctagtgtccaagagacagatgacatgcaggttgatagtcatattgctgaggactcagagccagaaaacgatgatctatatttatcaaattgtcgaatttctctggtgggttttgaagagaaagagttgttaaggcttgtcatgctgatacgtaatggaggtggatcccggcatattttgctaagtgagaagcttactcatattgttattggtacaccttcagatgaggaaaaaaaggaggtaagacgtctggctgcatggggtgtaataaatatagtgaaagtaacatggttagaagactgcaataaagcaaaaaaagaagtgaaagtatcctcaatgcatatagctactgagctcctcttgaagggattttctcaagtaagcatggaaaattctgctgatacacgtgaaactaaggtagccaaaagctcaggtgggatttttcatgttccaactgtcaatgacttgcatgaaaaacaccatgaaaaaggtgtgtcatctgaaaggaaaccaaaaagaggcaaacatgaaaacagtataagtaaaacccgatcagcagccaggactgaaaaatcaagtcaacagaatggattggccaatgttagcgagtaccagctccaatataaagtaacatcgataatgaattctggaagtagcagatcaaatatattcaaagggagaacattcagtttctcaaattcattttctcatgacaagagacctgaggttgttgattgggtcagagatggtggaggcgttatggtggatgacatacactcaactgctgcagatttcataattgagtgccacggacaaaacagcttgccttgtgacttctctcattcacttgtttcaactcaatggatacgatcatgtttggaggagaactgcttacaagatgttgggagtcatcctatcttctctcctttgcgctgtcgcatcccattcccaggatttgaaagctttcgtttctgtatttcactttcacaatatggagagaaagaaagacatctgctgaagaacttgtgctttctactgggagctaagtttacagacaaagcatataagggagtaacccatctcatctgcaaatttgcaagtggtcttaaatatgaggtttactccaaaagaggaactcccaccattacttctgagtggctctatgagtgtgtaaaacaggataaacttctccctgttgatcactttcagccaaaaccacttacatcacaggataaagatgcttatccgtgcactgccagccaatattccacacaggctaccagatttgattcctctgagctgcttagtggttgtcaagtaacaaaaaacaatgcaacacacaattctggtaactctggtatttttgcagtcaatgaagaaacaactatgcctgctgttagtagaaagagaagaatatctgttcctggtaaggttaacggtatttgtggaaacatcgaaaaaactgagaaacaactcgacaatagctctgtccctgatgtcgcagatgccatagaggttctatcatccaagattcaggatgtgcaatctccgaggagtatatttcaacctgacaattctgttgttcaagagcagaaagatacacactcctttgacatttcaaggagctggctgaacatgcaacagaagcaagatagcacctctgtcacaaaggttcaaaacttaaactctgtaccagtcccctccccagctcctactacttactaccctttcagtgagacgcagacagaatctcaggtcgttggatacgaagaagatttaacaggcaggcagaagatcatagacagggttcggtctcagagcattaatgtgactccgtcgagtgagattctttagttgtggaggcgaaccataacttctcccagatctgactgtcaaattgcgatagggaagatgtgttatgaaatctgcttgttgtgccatgtcggcttcaaattaagcagcatgaatggagtctacgaatgtggagtcgtattcctagccagatgacccgcgcagcataaatcaagaagatttccattgcatggcattcgatgaacggaacctcgcgctattacatcgtgatcttgtggatgtaaccacccttgtttgtagaactgacagacactaaacgcctgtgatccgtttggtcctgtacattaacaatcttgtacactatacaagagcaggtaaaggagttatatatatatatatatatatatatatatatgggtatgaacagatgtaacagttcatttttgatttaatgctcaattagtcgaggtagctggtgtagcactatgaaaatcattaaataaaataatgaatttagttaataatgatattaatagtaatgaattttcttttaagcgtgtgtcatttatttgcctttggaatgattttttggatgctcatgattgattttggtcatttaatagcatttcgttttaaataaaaatcctagtaaataatatatataataatattagtccaagaattaatatcttatttataaataattttagtt

SEQ ID NO: 9082 - DNA, 3324 bp, Zea Mays
cccacccccactcgccgccccatcttcgctccgatccatccacgccgccgcgaccggccccagagcagcaccttctcgccgccgatacccaagcctctgcccgcgtggttgcgcctccgcggcggcgccggcgccgtctgggagcgcggctcgggcgttcgaaaggcgccctcgcgcgcgctgtttcgtctagatccgatccagcaatatttgttgagccgaaggcaaggacagttttgatgggcccatcaaagggttctcgaactattaacaagatcatagtaaaaggatctgaatatcaacagcagcatgatgatccatctagttcaagcaaagctaaacagaaaaggaggaaactctcagactttgatcccaaatggagcaaggatgaacttacaaatttttatgaagcctaccgtcaatatgggatggactggagaaagcatagcgataggcactaagtcatcggacatggtgcagtctcttttcactttacatcggactttcttatctcttccagaacatcaagccactgccatgggatttattgcgctggtgactggtcatcacaatgcttcggagaaaaccacgactcatagaggatatgatcacgtagtcagagcatctggaaaggcaaggaaacatggtgaaaaaccgaaatcaattgatggacctgacctgcccaactgtcaagaagcgaaaatttctggattttcagatttattccagagtcgatactatggcgaattggtcaggtacatccgaaatcatgctgttcggaggcgtactcctcgtataccagctatagtttctgcagacaggagtaccattgatgaggccacaccaggaattgaaaatgtcatcagttctaccaagagaaaatatgaagcagccaataacgactctgctattgtcccaacaaataagtactctcctgacagagtttctggcttcgctgaagcacacaaggctggtcaagatcattgtttgttggagaccataggaactgggcatgtagcgacatgtcaacaacattcaaagaaaacaagaattcagcaaactatggaggaaggtcagactggtgtagttgatcatgagacaacgatggcatctaaagaagggaataagccagttgatttattaaacaacaatcagttatttatcgacaatatttctgaagatgatatgttggtcttggatgtattgtgtagcctgatgaatgcaccctctaaaatgccaaaactagagattaatattccttcaggttcggttggaaaaactgactctacgctatctcagagaagggaggaaggccaccctaccattgatttatctaaacaagggaagccagttggtaaatccagtgcttccaagactaggaagaaaaaatataagatattagacgcagaggtgcctgctgtagcacaaaacgtttgtggtaatagtttagccctgccggaaacactgagggttgttatcactgatgattcttccttgtgtactgactctggaagagtggggataccggaagcatctgaagatattcctgctgaagttcccagtgcacaaacagaaaccaagcctgaagtgagaatgtctggaaggaccagacggaaatctcaaatgcattgcaaaacaaagcatatgtcatgcaatgaaggttcagataatttacaggcaaaaaaattgctgcactgtttgtcatccgaaccacttcgtagatggtgcacatatgagtggttctacagcgcagttgattatccatggttttcaagtaatgagtttgtgcactacttagatcatgcaaaattgagtcatctttcaaggttgactataccagaatggggtacaattcgaagctcccttggtattccacgtcgattttcaaattattttctggccgtggaaaaagaaaatcttgaggattatcgggagaaagttagaaaaatctatgctcaactcagtgatggttcaagggattttctacctgcagacctagctagaccattttcaattggtcagcaagttattgttcgtcatccaaattctagggaactttgtgatggcaaagtggtgatgatgggtccggattgttacaaggttcattttgatgatcctgacattggtgttgatattgtaaaggacactgattgtatgccagtcaactggctgtataaccgtcctgacaacatgaggagctgcctttcaaatgatgcgtacagcatactggagatggatcacattcctgaccttacagcaagtgagaatgaggatcatgctgtaaacggatctactgtacttgaggggctcaaaagtctgcgcttaacatcagatagacaacctaaggcagaatctattgtaaacagtgaaagaccaccatataggagtacatctgacagccctgcaaaatctagagattgcccagacaataatagtgctggccactacgatgagctagagtcatatatagccgcatttgcagaaagatcactatcacaagccaggcagatggttgacaaagccatgcaggcgaaccctggaggtaatgaggatgaaaaggtatgcacgtcaaatcaagtggcaggttgtgcaggcccaggttttgaacctgcccgtggcgcccaacttccttctgacctgatatcgaacggcatcgccacggttctttcaatcaagagccttagcgactcgcgacatccgtttgctaacgtagcaggcgtcttggatcacgcttgctccatgctgcgtccaagctgtccgcagaacctcgctttgtacgatcaaataaagagagacatcggtatcataaagacccagatatttgcacttatgccaacagcattgggcaattgcagccctcctgtcccgcccatgtaactgggccctgagcaagatacttccgctgccttcatgcaggccctgcagtagtacacgcttcttcctttgctgtgagtacaaaacgcagcgaacttgatgttatggaggaagtcctatgtatatacctcgatggcttaatagtttataggtatacacatattcaggatagttgacatatgattttggagtgaataaagttatgtctgtagtcatttaggatgtagtgaataaagatgtatgcctgcagtaagtggcggacccagaaattggccaaggcctgggtcgaagcgaccaaaaactctaatagtagtatataaaaaaaattgtacggcgaaacaacgttgtcatggatattaaagatgacatacaagttatgatgtagctacttctaaatgtatcatatcaacatcagtgctttttgcttcagaaccttgaaggaaatcatat

SEQ ID NO: 9083 - DNA, 3425 bp, Zea Mays
ttccccttcccttttctctctacttgtatgtatcccccccgcccgccaagccgcggccgcagcgcagcagaaacgcaaaccggccaccccacccccactcgccgccccatcttcgctccgatccatccacgccgccgcgaccggccccagagcagcaccttctcgccgccgatacccaagcctctgcccgcgtggttgcgcctccgcggcggcgccggcgccgtctgggagcgcggctcgggcgttcgaaaggcgccctcgcgcgcgctgtttcgtctagatccgatccagcaatatttgttgagccgaaggcaaggacagttttgatgggcccatcaaagggttctcgaactattaacaagatcatagtaaaaggatctgaatatcaacagcagcatgatgatccatctagttcaagcaaagctaaacagaaaaggaggaaactctcagactttgatcccaaatggagcaaggatgaacttacaaatttttatgaagcctaccgtcaatatgggatggactggagaaagatcagcatagcgataggcactaagtcatcggacatggtgcagtctcttttcactttacatcggactttcttatctcttccagaacatcaagccactgccatgggatttattgcgctggtgactggtcatcacaatgcttcggagaaaaccacgactcatagaggatatgatcacgtagtcagagcatctggaaaggcaaggaaacatggtgaaaaaccgaaatcaattgatggacctgacctgcccaactgtcaagaagcgaaaatttctggattttcagatttattccagagtcgatactatggcgtttcttcagaattggtcaggtacatccgaaatcatgctgttcggaggcgtactcctcgtataccagctatagtttctgcagacaggagtaccattgatgaggccacaccaggaattgaaaatgtcatcagttctaccaagagaaaatatgaagcagccaataacgactctgctattgtcccaacaaataagtactctcctgacagagtttctggcttcgctgaagcacacaaggctggtcaagatcattgtttgttggagaccataggaactgggcatgtagcgacatgtcaacaacattcaaagaaaacaagaattcagcaaactatggaggaaggtcagactggtgtagttgatcatgagacaacgatggcatctaaagaagggaataagccagttgatttattaaacaacaatcagttatttatcgacaatatttctgaagatgatatgttggtcttggatgtattgtgtagcctgatgaatgcaccctctaaaatgccaaaactagagattaatattccttcaggttcggttggaaaaactgactctacgctatctcagagaagggaggaaggccaccctaccattgatttatctaaacaagggaagccagttggtaaatccagtgcttccaagactaggaagaaaaaatataagatattagacgcagaggtgcctgctgtagcacaaaacgtttgtggtaatagtttagccctgccggaaacactgagggttgttatcactgatgattcttccttgtgtactgactctggaagagtggggataccggaagcatctgaagatattcctgctgaagttcccagtgcacaaacagaaaccaagcctgaagtgagaatgtctggaaggaccagacggaaatctcaaatgcattgcaaaacaaagcatatgtcatgcaatgaaggttcagataatttacaggcaaaaaaattgctgcactgtttgtcatccgaaccacttcgtagatggtgcacatatgagtggttctacagcgcagttgattatccatggttttcaagtaatgagtttgtgcactacttagatcatgcaaaattgagtcatctttcaaggttgactataccagaatggggtacaattcgaagctcccttggtattccacgtcgattttcaaattattttctggccgtggaaaaagaaaatcttgaggattatcgggagaaagttagaaaaatctatgctcaactcagtgatggttcaagggattttctacctgcagacctagctagaccattttcaattggtcagcaagttattgttcgtcatccaaattctagggaactttgtgatggcaaagtggtgatgatgggtccggattgttacaaggttcattttgatgatcctgacattggtgttgatattgtaaaggacactgattgtatgccagtcaactggctgtataaccgtcctgacaacatgaggagctgcctttcaaatgatgcgtacagcatactggagatggatcacattcctgaccttacagcaagtgagaatgaggatcatgctgtaaacggatctactgtacttgaggggctcaaaagtctgcgcttaacatcagatagacaacctaaggcagaatctattgtaaacagtgaaagaccaccatataggagtacatctgacagccctgcaaaatctagagattgcccagacaataatagtgctggccactacgatgagctagagtcatatatagccgcatttgcagaaagatcactatcacaagccaggcagatggttgacaaagccatgcaggcgaaccctggaggtaatgaggatgaaaaggtatgcacgtcaaatcaagtggcaggttgtgcaggcccaggttttgaacctgcccgtggcgcccaacttccttctgacctgatatcgaacggcatcgccacggttctttcaatcaagagccttagcgactcgcgacatccgtttgctaacgtagcaggcgtcttggatcacgcttgctccatgctgcgtccaagctgtccgcagaacctcgctttgtacgatcaaataaagagagacatcggtatcataaagacccagatatttgcacttatgccaacagcattgggcaattgcagccctcctgtcccgcccatgtaactgggccctgagcaagatacttccgctgccttcatgcaggccctgcagtagtacacgcttcttcctttgctgtgagtacaaaacgcagcgaacttgatgttatggaggaagtcctatgtatatacctcgatggcttaatagtttataggtatacacatattcaggatagttgacatatgattttggagtgaataaagttatgtctgtagtcatttaggatgtagtgaataaagatgtatgcctgcagtaagtggcggacccagaaattggccaaggcctgggtcgaagcgaccaaaaactctaatagtagtatataaaaaaaattgtacggcgaaacaacgttgtcatggatattaaagatgacatacaagttatgatgtagctacttctaaatgtatcatatcaacatcagtgctttttgcttcagaaccttgaaggaaatcatat

SEQ ID NO: 9084 - DNA, 3146 bp, Zea Mays
atacagtgaagatgctcaggctgtgactccgggtgactcttgtttctacccacttatctttgcagtcgccactgcacgccactgcttggctcgcgtgattcgtgaaccttcttgccatggcgacgatgtctgcagcgtctcatcgctgctgtgcttcttccttgagagctttaaccgtgttgtttgtgttggcagctcttgtttcagatgtaggcggccgacatcatcatcatgtttgtcgtccttatttctcctgcggtggttttagcaatatatcgtatccattccgtcggcaaggtgatccatctgggtgtggtgtccaatcgtatgagctggtttgcacggatacagacgccacaattcgcatcggcagtggaacatacaccgtgcttagcatcaactccacgtattcttacttctgggttgtcgatgccaacctggacatccagagcagttgcccccttccctggtgggattaccatggtgagaccagtactgccaactcatatcgtaggaggactgagttcaggccttatttcctttatccgaattcgatgtcgattatctttgtgaattgctcgaagccaatagagaacaatgatatatatgagccggtgccttgcttgagcaattcttctttcatctacttgctaactcactactcgtatggctatgctcttgctgagattctggagccctcatgcggttacctagccatgatttatttgggtggtccaggcataccggtgcccaagaatacaagctatccagatgttgttaagttaatgaggaatggatttggccttagatttccttcttcgattggtgaccgcggcatcagagaatgtttcgcagagtctgtgcgtaatttccttaaagagccaagaaagtatcagattgtggacattctaatggtcgaggaattatggtcttgttttctcgatcaacatggatcaactaataatgttgtcacttctgttatcatcgacattatcaaaacaataccaatatgtatgtggcttctgaaatctacacatgttttttgcaggcttgtattgatgccgctagcagtatttgtcttcctagcccataaatactggaaagcaaggattacaatagatgcagtcgagaagttcctgcggatgcagcagatgctcgttccgatgagatatgcatacacaaacatcattgctatcaccggtcatttcagagaaaagctcggacaaggaggctacggttctgtatacaagggggtgctacagccaggtgaagtacatgttgctgtcaagatgttaggcaactccaactgtaatggagaagagttcatcagtgaggttgccaccattggcaagatccaccatttcaatgttgtgcgcctcattgggttttgctccgaggaaaatagcagggcacttatctacgagttcatgccccatggatctctcgataagtacatcttctcgtcggagaagagtttctcatgggacaaactcaatgagatcgctctgggcattgctagaggtctcaactacctacatcacgggtgcgatatgcaaattgtacacttcgacatcaagccacacaacatccttcttgacagcaactttgttccaaaagttgctgattttgggcttgccaaactgttcccaagagacgacagtttcgtgccactgagcgctatgcggggaacgataggctatatagctccagagatggtatctcgaagctttggtgtcatctctagcaaatctgatgtgtatagctttggaatgctactgttggagatgacgggcgggcgaaggaacgcagatcctcatgcaggaagctctagtcaagcatactacccatccttggtgtacaaccagctaagccaaggagatgtgggcgagatcagtgaaggtgttgatatgcacgagttaaagaagaaactatgtatcattggactttggtgcatccagatgaagccgcaagatcgaccaacgatgagcgaggtcatagagatgcttgaagctggtgtcgatggcatccaaatgccttcaagaccattcttttgtgatgacgaggttatttgcaggttcgtattgatgccgctgatagtatttatcttcctagcctataaatactggaaaacaaggataacaatagatgcaatcgagaagttcctgcgaatgcagcagatgctcgttccaatgagatatgcatacacgaacaacatcgctatcactgcccatttcaaagacaagctcggacaaggaggctacgatactatatacaagggggtgttacagtcaggtgaagttcaagtttctatcaagatgttgggcaactccaactataacagtgaagagttcatcagtgaggtcgccaccattggcaagctccatgatgtcaatggtgtgcgcctcatcgggttttgctccgaggaaaataggagagcactcatatatgagttcatgccccgtggatccctcgataggtacatcttctcgtcggagaagagtttctcatgggacaaactcaatgaaatcgctctgggcattgctagaggtctcaactacttgcgtcacgggtgtgacatgcagattgtacacttcgacatcaagccacacaacatccttcttgacaacaactttgttccaaaagttgctgattttgggctcgccaaccaaactattccaaagatatgacagttttgtgccattaagcgctatgcggggaacgataggctatatagctctagagatggtatatcggagcttcggtgtcatctctagcaaatccaatgtgtatagatttgggatgctactattggagatggtaggagatcgaagaaacgtagatcctcaagcaggaagctccatccaagcatactacccatccttcagctgagccaaggagacgttgatgggatcagtgaaggtgttgatatgcatgagttagagaagaagttatgtatcattgggctttggtgaatctagatgaacccgcaggatcgaccgacgatgagcgaggtcataaagatgttttgtgataatttgatgtcatctaaaatacctccatgaaccccttttttatcaaaaactcctcaagaacaatttgtttgcctacaaacagaggatcacggtcctagacgttgtattcttgaa

SEQ ID NO: 9085 - DNA, 1926 bp, Zea Mays
agggaaagcctcaaaaggcgacgcgcaagggccgaggagagaaaggaacctgaggaaggcacaccagtttcaagcaatccctaggccgtggcgacgtgctgggaaggattcaaatcaggggcgaagcctaggtgacggcgctgttagtcgcctctagtagctgcgcgacgcgggctggcttgtccgatcggtttgcctcggccatgtcgactaagaaagttctttgcaagttcttcatgcatggagcttgcttgaaaggagagtactgtgaattctcccacgactggagtgatcaagcaaataatgtttgcacattctaccaaaaaggtgcatgctcgtatggtagccgttgcagatatgaccatgtcaaagtttctcgtaaccccacagtgccaccaccacgcccaacgtcaagtacttcaagacgtgcatctacttctcttcaactttcaagttacaatcatccacctcatatggtgcaccaaacagattcaagcaaccaaagacatcagatatctgtggatgtgttggcacattctgccagtaagcctgcatggagaaatgattttcagcatgatattgtttcagatgatggaattgactggtcttctaatcaaaatttgataaaccagacatcattgaaacctgtggatctccctatttgttcttttgctgctgctggtaattgtccttatggggaagggtgccctcaaatgcatggagatctgtgtgcaacctgtggaaaactgtgcttgcatccttatcgtcctgatgagagggaggagcatatcaagttatgtgagaaaaatcacaaacgccttgtagctctgaaacgcagccaagaaatagaatgcagtgtatgtttggatcgtgtgctttcaaagcctactgctgctgaaaggaagtttggactcttatccgaatgtgatcatcctttctgtattgaatgcattagaaattggcgtagcaattctcctgcatctggtatggatgtgaactcagcattgagggcttgtccaatatgtcggaaactttcatactatgtcattccaagtgttctttggtacttctcaaaggaagagaaagaggagatcactgaaagctacaaatccaagctcaacatgcctacagagatggccgcttggaagaggtaatactgcggcatcttgatgctgatgatggaagtacagtaattgcaaaaagtatcaggttatcagacttccttggtaggatggatctttagggaccagcagctgtattgatatcaaatgcattctgggatatcgttatccaccaattatttacaatattctgaagatcagtttagcttgaggcatcttcggaaagtacagctttgtctccatttagtgaaagtttgaagatctccatggtcctgtagatgctgggattaccttttcagagcactgttgacctgagggcgacggaaacaagtctgacaacaattgtgcttgaatatcaaaacagaagtaatactcgtatttatagacttcactaagtgtggctctatgtatcaattgctggtcttctaggccaccagataatagctgaacatttcctggccgacaagtgaaaggggcagccgtataaatttgcttccattccacctgaatgttctcttcatattgtggaagggtactgcaccaataggtccaataaggccatttgtttgctttacttaatatacaaaaaaagtatagcagatgaaatgcaatgacaactgtaatgcagcattgttgaatgtgagcgtgagcggtggttttttatcgatgacctgctgaggaaggtcctcttagtaggcaggtaaactgagaacatttttttgttatatatatacagcataattgtacgagaaaaatagcaaatgaaccgagaatgatcattaaatgcagtcgtcggttgtatggt

SEQ ID NO: 9086 - DNA, 1956 bp, Zea Mays
agggaaagcctcaaaaggcgacgcgcaagggccgaggagagaaaggaacctgaggaaggcacaccagtttcaagcaatccctaggccgtggcgacgtgctgggaaggattcaaatcaggggcgaagcctaggtgacggcgctgttagtcgcctctagtagctgcgcgacgcgggctggcttgtccgatcggtttgcctcggccatgtcgactaagaaagttctttgcaagttcttcatgcatggagcttgcttgaaaggagagtactgtgaattctcccacgactggagtgatcaagcaaataatgtttgcacattctaccaaaaaggtgcatgctcgtatggtagccgttgcagatatgaccatgtcaaagtttctcgtaaccccacagtgccaccaccacgcccaacgtcaagtacttcaagacgtgcatctacttctcttcaactttcaagttacaatcatccacctcatatggtgcaccaaacagattcaagcaaccaaagacatcagatatctgtggatgtgttggcacattctgccagtaagcctgcatggagaaatgattttcagcatgatattgtttcagatgatggaattgactggtcttctaatcaaaatttgataaaccagacatcattgaaacctgtggatctccctatttgttcttttgctgctgctggtaattgtccttatggggaagggtgccctcaaatgcatggagatctgtgtgcaacctgtggaaaactgtgcttgcatccttatcgtcctgatgagagggaggagcatatcaagttatgtgagaaaaatcacaaacgccttgtagctctgaaacgcagccaagaaatagaatgcagtgtatgtttggatcgtgtgctttcaaagcctactgctgctgaaaggaagtttggactcttatccgaatgtgatcatcctttctgtattgaatgcattagaaattggcgtagcaattctcctgcatctggtatggatgtgaactcagcattgagggcttgtccaatatgtcggaaactttcatactatgtcattccaagtgttctttggtacttctcaaaggaagagaaagaggagatcactgaaagctacaaatccaagctcaacatgcctacagagatggccgcttggaagaggtaatactgcggcatcttgatgctgatgatggaagtacagtaattgcaaaaagtatcaggttatcagacttccttggtaggatggatctttagggaccagcagctgtattgatatcaaatgcattctgggatatcgttatccaccaattatttacaatattctgaagatcagtttagcttgaggcatcttcggaaagtacagctttgtctccatttagtggttggttgctttgtcgccagttgaaacaagaaagtttgaagatctccatggtcctgtagatgctgggattaccttttcagagcactgttgacctgagggcgacggaaacaagtctgacaacaattgtgcttgaatatcaaaacagaagtaatactcgtatttatagacttcactaagtgtggctctatgtatcaattgctggtcttctaggccaccagataatagctgaacatttcctggccgacaagtgaaaggggcagccgtataaatttgcttccattccacctgaatgttctcttcatattgtggaagggtactgcaccaataggtccaataaggccatttgtttgctttacttaatatacaaaaaaagtatagcagatgaaatgcaatgacaactgtaatgcagcattgttgaatgtgagcgtgagcggtggttttttatcgatgacctgctgaggaaggtcctcttagtaggcaggtaaactgagaacatttttttgttatatatatacagcataattgtacgagaaaaatagcaaatgaaccgagaatgatcattaaatgcagtcgtcggttgtatggt

SEQ ID NO: 9087 - DNA, 2020 bp, Zea Mays
tgataccccgcgggtcacgtttccgcaaagggaaagcctcaaaaggcgacgcgcaagggccgaggagagaaaggaacctgaggaaggcacaccagtttcaagcaatccctaggccgtggcgacgtgctgggaaggattcaaatcaggggcgaagcctaggtgacggcgctgttagtcgcctctagtagctgcgcgacgcgggctggcttgtccgatcggtttgcctcggccatgtcgactaagaaagttctttgcaagttcttcatgcatggagcttgcttgaaaggagagtactgtgaattctcccacgactggagtgatcaagcaaataatgtttgcacattctaccaaaaaggtgcatgctcgtatggtagccgttgcagatatgaccatgtcaaagtttctcgtaaccccacagtgccaccaccacgcccaacgtcaagtacttcaagacgtgcatctacttctcttcaactttcaagttacaatcatccacctcatatggtgcaccaaacagattcaagcaaccaaagacatcagatatctgtggatgtgttggcacattctgccagtaagcctgcatggagaaatgattttcagcatgatattgtttcagatgatggaattgactggtcttctaatcaaaatttgataaaccagacatcattgaaacctgtggatctccctatttgttcttttgctgctgctggtaattgtccttatggggaagggtgccctcaaatgcatggagatctgtgtgcaacctgtggaaaactgtgcttgcatccttatcgtcctgatgagagggaggagcatatcaagttatgtgagaaaaatcacaaacgccttgtagctctgaaacgcagccaagaaatagaatgcagtgtatgtttggatcgtgtgctttcaaagcctactgctgctgaaaggaagtttggactcttatccgaatgtgatcatcctttctgtattgaatgcattagaaattggcgtagcaattctcctgcatctggtatggatgtgaactcagcattgagggcttgtccaatatgtcggaaactttcatactatgtcattccaagtgttctttggtacttctcaaaggaagagaaagaggagatcactgaaagctacaaatccaagctcaagtctattgattgcaagtacttcgactttgggactggctcatgccccttcggaacaagttgtttctataagcatgcctacagagatggccgcttggaagaggtaatactgcggcatcttgatgctgatgatggaagtacagtaattgcaaaaagtatcaggttatcagacttccttggtaggatggatctttagggaccagcagctgtattgatatcaaatgcattctgggatatcgttatccaccaattatttacaatattctgaagatcagtttagcttgaggcatcttcggaaagtacagctttgtctccatttagtgtttgaagatctccatggtcctgtagatgctgggattaccttttcagagcactgttgacctgagggcgacggaaacaagtctgacaacaattgtgcttgaatatcaaaacagaagtaatactcgtatttatagacttcactaagtgtggctctatgtatcaattgctggtcttctaggccaccagataatagctgaacatttcctggccgacaagtgaaaggggcagccgtataaatttgcttccattccacctgaatgttctcttcatattgtggaagggtactgcaccaataggtccaataaggccatttgtttgctttacttaatatacaaaaaaagtatagcagatgaaatgcaatgacaactgtaatgcagcattgttgaatgtgagcgtgagcggtggttttttatcgatgacctgctgaggaaggtcctcttagtaggcaggtaaactgagaacatttttttgttatatatatacagcataattgtacgagaaaaatagcaaatgaaccgagaatgatcattaaatgcagtcgtcggttgtatggt

SEQ ID NO: 9088 - DNA, 7914 bp, Zea Mays
  misc_feature (7913)..(7914): n is a, c, g, or t
atggcgcccatcaacagcggcaacatggagcagcactcgcagcggctcctcgagcccgacctccctgtgcaagtccgactgcagcttgccatggaagttcgggacagcctggagatgacgcacactccagactacctcaactttcttcgctgctatttcagagccttctcagcaattctcaccgcttacaccaagccacaggccacagagaatgctgagcacaagctacggaatgttgtgatcgagatactcaaccgccttccacacagcgaggtgctcagaccatttgtgcaggatctgctcaagctttctctccgtgtgttgacacaggacaacgaggacaatgctctccttgccatccgaattgtgtttgacctcctccgtaacttccgccctactgtcgaggcggaggtgcagccatttcttgactttgtggttaacatataccataaatttcccacaaccgttagctacttcttcgataatcccaacacaagtgccagtatggctgcctccatgcccatgcagcatttggaccccactgccgatgcctcagtcatgatgcaagtgcctggtggtggtcaactcaacccaagcgcacgttccttcaagatagtcacagagagccctcttgttgtgatgtttctcttccagttgtatgcaaagcttgtgcagacaaatatcccgcacttgttgccactcatggtggcggccatctctatcaagggtcccgacaaggtgccgccacaccttaagacacccttcaacgatttaaagggtgcacaggtcaagaccttgtcatttctgacgtacctcctgaagagcaatgcagattacataaagtcatatgaggaaagcatatgcaagagcattgtgaacttgcttgttacgtgtcctcctgattctgtctccatcagaaaggagctattggttggtctgaaacaagttctcaacaccgagtacaagcgagggctgttccccttgattgacacacttcttgatgaaagggttctgattggcacaggtcgagtttgcatcgaaactttaagacctcttgcttacacccttcttgctgaattggtgcattatgttcgagaagatatttctcttccacaggttgagcccatatatcaaaaaggtgttgaccagcaaagcatggacgaagcacgagttttattggggcgcatattggatgcattcgttgggaagtttaggaccctgaagcgaacaatccctcagttgcttgaagaaggtgaggaagggaaggaacaaccgaatctgagaatgaagcttgaagtcccattacagactgtgctgaatttgcagcaacctttggagtatactaaggaaatcaacgattacaaaagtctgataaagactcttgctgtcggaatgaagacaataatatggagcataacccatgctcactggccacgcccccagcaacaaaatcaacagtcttccaatttgtcacttcaacacttcagggggctgagggaggatgaggtgcggaagacatctggtgttctgaagtctggcgttcactgtctggctctttttaaggaaaaagacgatgatagggaaattctgcaatcattttcgcagatgctggctataatggaagctcgtgatattatggatatgttctccttttgcatgtctgacctctttgattctatgataaccaacaaccagctattgcacatattttcaacccttttgcaagctcccaaggttctgcggcctttcacagatgtattaattaatttccttgttagctcaaagcttgaagccctgaagcagccagattcacctgctgcaaagcttgttttgcaacttttccggttcttgttcattgctgcagctaaagctccagaaagctgtgaacgcacacttcagccacacgtgccggttataatggaagtctgcatgaggagtgccactgaagttgagaaacccctaggttacatgcaccttcttcgaaacatgtttcgtgcattgaacagtgctaaatttgattcattgatgcgtgatcttataccatctctgcaaccctgcctcaatatgttactctccatgcttgatggtccgataagtgaagatatgcgggacttgattttggagctttgcctgattttacctgcccgcttgagttctttattgccccacatacctcgtctaatgaaacctcttgttcttgctctaaaaggtagtgatgaccttgtgagcttagctctacgtacacttgagttctggattgatagtctgaatcctgactttttggaacctagcatggcaaatttaatgtcagaagtcattcttgctttatggtctcatttaaggcctcctccatacacatggggcacaaagtctttggaacttttagggaagctggggggacgaaataggcgatttttgcgggagcctcttgcacttgaatccaaggaaaatccggagcatggattacgtttagttctgacttttgagcctgcgacaccttttttggttcctctggacagatgcatacaccaagctgttggtgcagttatgcaaggcaatggcttggaagcattctacaggaagaaggctcttcaattcattcgggtgtgcctcgattctttgttaaatctgagggaaaatgtacctggcgagggtgtgagccctggtgttctcggtacattgctaatctctaacctggatccctcaagacgtcggaatgatgcttcagatatgaagggagatttaggtgtgaagacaaaaacacaactactggctgaaaaatctgttttcaagactcttcttgtagctatcattgcagctaatgctgacaccagtcttcatgatgagaaggatgattatgttgtcgatatatgccggcattttgctatgcttttccatgttgactcaccatcctccagccaatctggatttatgcatcctattggttcttcactcccatctatcatcatgggatcaagatcaagatgcaacacttcatctaatctccgggagctggaccctttaatatttttggatgctttagttgaagtgctatccagcgaaaatcgtcaacatgcaaaagctgccctatctgctttgaatatttttgccgagacattaatctttcttgcacggatgaaacacactggtatgctaaggggaggtcctagcacccccatgctagtctctagtccatctttaaatccagtatattcacctcccccaagtgtgcgggttgctgtatttgaggaattgttacctcggttattgcattgttgctacagtagcacatggcaagctcagatgggtggtgtaatgggtctcggggcattggtcggtaaagtgtctgtggataccctatgcatttttcaggtcagagtcgtgcgtggtcttctttttgttcttaagaggttaccagtgcatgcaaacaaagagcaggaggagacaaatcatgtcctaacacaagtacttagagtagtaaacaacgcagatgaagcaaacagtgaacctcgacggcaaagttttcagggagttgttgaattccttgcacaggagttgtttaacccaaacgcttcaatggttgtgagaaagaacgtgcaggcttgcttatcactgcttgcaagcagaactggcagtgaggtttctgaattgcttgagcctctctatttgccattgcttcagcctctgatttcacgacctcttcgttcgaagaatattgagcaacagcactacaaattgccgaggctgatgaaactatatgggtcactaggatgatgaatgcgaaagtagttctcacatggaacaaactcagaaccgcatgcattgaactactctgtactgcaatggcatggggagatctaaaagctcaaaatcatactgaattgcgagcaaagattatttcaatgtttttcaaatctctaacatgcagaacaacagagattgtcaatgttgctaaggagggacttcgtcaggtggttcaacagcaaaggatgccaaaggatcttctacagagcagcttaaggcccattctagtaaacttagcaaacacaaagagccttagcatgccattgctacaaggattggctcgcctgcttgaattactgtcaaattggtttaatgtcactttgggtgccaagctattggatcacttgaaaaaatggctggagccagaaaagcttgtccagactcaaaaatcttggaaggctggagatgaaccaaaaatagcagcagctatgatcgagctgtttcaccttcttcccccggcagcaagcaaattcttggatgaccttgttaccttggtaattgatctggaaagggcacttcctgaagatcagttttacagtgagatcaacagtccataccgtgctccactggcaaaatttttgaatcgttatgttctggaggctgttgactattttcttgctcgattaagccatccaaagtatttcaggaggtttatgtacataatctgctcggatactggggacctaagggatgcacttgcaaggtcacctcagaaaatacttgcaagtgccttttctcagttttactctcaaagtgaagcatctgctgctcaattatcttctgtaaaggatgaagcccttactggggctgtatctgagagtattactgtacaatcttcatcaaacatggttactacttctgagagttactttaatggattagagcttgtctcagcccttgtgaaattgatgccagagtggctccgtaacaaccgggttgtctttgacaccttgctacttgcttggaaatcacctgcaagacttgcgaggttgcagaacgagcaggatttgagtttaccccaggtgatggaaagcaagaggctgatcaaatgcttcctgaattacttaagacacgatcgaactgaagttggtgcactctttgatatgttatcagtattcttgtaccgcagtcgtatagattatagctttcttaaggaattttatgtcatagaggttgctgaaggatactccccgaatttgaagaaaactatccttaatcattttctgaacattttccagtcaaaacaatatggacaagatcatttagttgttaccatgcagattcttatacttccaatgctagctcattcatttcaaaatggacaaagttgggaagttgttgatcctactataattaaaactattgttgagaagcttcttgatcctccagaagaggtcagcgctgaatacgacgaaccattgaggatagaacttcttcagctagctacattacttttgaagtatctacagactgatcttgttcaccatcgaaaggaactcataaagtttggttggaatcatctcaagcgtgaagataactcgagcaaacagtgggcctttgtgaatgtttgtcatttcttagaggcctatcaagctcctgaaaagattattttacaggtcttcattgctctgctacggacatgccaaccagaaaacaagctgttggtgaagcaagctctcgatatcctcatgcctgccctacctaggagacttcctcctgaaaaaaatgatagccgcatgccgatatggatcagatacaccaagaaagttctcgtagaggaagggcattcaattccaaatatgattcacatattccagcttattgttcgccatgcggacctcttctatagttgcagagcccactttgttcctcagatggtcaactctcttagtcgccttggattaccatacaacacaacagcggaaaatagaaggcttgcaattgaacttgctgggttggtagtggcatgggaaagacagagacaaagtgagatgaaagtggcgcaggaaagtgagagccagaatcaattaggtatcacttgtgattgagcctaaggataaggaatctagctcaatgtacaagcaagctcttgatctactgactcaagctctggaagtctggccaaatgccaatgttaaattcaattatctggagaaattacttgggaatctgtcacccactcctcagtccaaggaccctgcatcagccctcgcacaaggacttgatgttatgaacaaagtcttggagaaacaaccccgtctcttcatccgaaataacatcaatcatatttctcaaatactggaaccttgctttggcaacaaaatgctggatgctggaaagtcactttgttccttgctcaagatggtgttcagtgcttttcctcttgaagcagcaacaacgccacaagatataaagttgttgcatcaaagggttcaagaactcattcacaagaatcttgctgctgttacaactcagcagatagcacttgagctcaacaatgctcactcaatcattagcttttcattgtttgtcctcaatgcacttgcagaagtacagaagaatttcattgacccgttcattggcttgcttttccgtgttctgcaacgtcttgcacgtgacatggggtcttctgctggcagccatatccgacaaggacagaggcctgaactggattcatcagttaactcacggtctaccatagattctactgtcatatctaacatgaagactgtcttaaaacttataagtgagagggtgatgtcctcttctgaccacagaaaatctatgggccaaatacttcaagctcttctttcagagaaaggcactgattccagcattcttctgtgcatgctagacatgataaaaacttggattgaggaagattgtaggcttgcttcatcaactggttctgttagttcacttaacccaaaggaaataataacttatcttcataagttatcattagttgacagaaaaagctttcctccagctgcacaagaagaatgggatgcaaaatacttgcagcttctttattcactgtgtgcagattcaaccaagtatccgttgtcttttcggcaagaatttttccataagattgagagacagtatatgcttggacttagagctaaagatccagaaatgaggaagcgattcttcaagctttaccatgatacagtgggaaaaacattattttctagattgcaatttataatacagttacaggactgggaagctgtgagtgatgttttctggttgaagcaaggtcttgatctcgttttggcaatattagtagaaaatgaaccaattacacttgcagcaaattctgctcgagtaccaacgcttatgatagctgggcctgttccagatcgcatcaccatgccacagcaggttcctgatgctcaggaaagcatggatggtacaacactatcgtttgactctcttgctgcaaggcatgctcagttcttaaatgacgcgaacaagcttgtggtggcagatatcatggctccattgaaggaacttgcatttgctgatcccaatgttgcatatcatttgtgggtgcttgttttcccaattgtttgggtcaccttacataaagaggaacaagttgccctagctaagccaataatcgcgcttctatcgaaagattaccacaagaggcagcagggctgcagacctaacgttgctcaggcacttcttgagggtcttcatttgagccatccccaaccacgcatgcctagtgagcttatcaaatatattggaaaaacttgcaatgtgtggtatattgcaattgcattactcgagagtcatatagtgcatatgaatgaggccaagtgctccgagtcattggctgagttatacagacttcttaatgaagacgacatgaggtgtggattatggaagagaaaatcaatcactgcagaaacaagggctggtctttcacttgcccagcatggttactggcaacaagcacaaaatctattttaccaggctatgattaaagctactcagggaacatacaataataccgtcccaaaggctgaaatgtgcctttgggaggaacagtggttgtcctgtgcgtctcatttaggtcagtgggaagtcttagctgnn

SEQ ID NO: 9089 - DNA, 8022 bp, Zea Mays
  misc_feature (8021)..(8022): n is a, c, g, or t
atggcgcccatcaacagcggcaacatggagcagcactcgcagcggctcctcgagcccgacctccctgtgcaagtccgactgcagcttgccatggaagttcgggacagcctggagatgacgcacactccagactacctcaactttcttcgctgctatttcagagccttctcagcaattctcaccgcttacaccaagccacaggccacagagaatgctgagcacaagctacggaatgttgtgatcgagatactcaaccgccttccacacagcgaggtgctcagaccatttgtgcaggatctgctcaagctttctctccgtgtgttgacacaggacaacgaggacaatgctctccttgccatccgaattgtgtttgacctcctccgtaacttccgccctactgtcgaggcggaggtgcagccatttcttgactttgtggttaacatataccataaatttcccacaaccgttagctacttcttcgataatcccaacacaagtgccagtatggctgcctccatgcccatgcagcatttggaccccactgccgatgcctcagtcatgatgcaagtgcctggtggtggtcaactcaacccaagcgcacgttccttcaagatagtcacagagagccctcttgttgtgatgtttctcttccagttgtatgcaaagcttgtgcagacaaatatcccgcacttgttgccactcatggtggcggccatctctatcaagggtcccgacaaggtgccgccacaccttaagacacccttcaacgatttaaagggtgcacaggtcaagagcaatgcagattacataaagtcatatgaggaaagcatatgcaagagcattgtgaacttgcttgttacgtgtcctcctgattctgtctccatcagaaaggagctattggttggtctgaaacaagttctcaacaccgagtacaagcgagggctgttccccttgattgacacacttcttgatgaaagggttctgattggcacaggtcgagtttgcatcgaaactttaagacctcttgcttacacccttcttgctgaattggtgcattatgttcgagaagatatttctcttccacagttgtcacggatcatctatttgttctctcggaatatgcatgattcttctttgacccttataattcatacaacatctgcccgcttgatgctgaacctggttgagcccatatatcaaaaaggtgttgaccagcaaagcatggacgaagcacgagttttattggggcgcatattggatgcattcgttgggaagtttaggaccctgaagcgaacaatccctcagttgcttgaagaaggtgaggaagggaaggaacaaccgaatctgagaatgaagcttgaagtcccattacagactgtgctgaatttgcagcaacctttggagtatactaaggaaatcaacgattacaaaagtctgataaagactcttgctgtcggaatgaagacaataatatggagcataacccatgctcactggccacgcccccagcaacaaaatcaacagtcttccaatttgtcacttcaacacttcagggggctgagggaggatgaggtgcggaagacatctggtgttctgaagtctggcgttcactgtctggctctttttaaggaaaaagacgatgatagggaaattctgcaatcattttcgcagatgctggctataatggaagctcgtgatattatggatatgttctccttttgcatgtctgacctctttgattctatgataaccaacaaccagctattgcacatattttcaacccttttgcaagctcccaaggttctgcggcctttcacagatgtattaattaatttccttgttagctcaaagcttgaagccctgaagcagccagattcacctgctgcaaagcttgttttgcaacttttccggttcttgttcattgctgcagctaaagctccagaaagctgtgaacgcacacttcagccacacgtgccggttataatggaagtctgcatgaggagtgccactgaagttgagaaacccctaggttacatgcaccttcttcgaaacatgtttcgtgcattgaacagtgctaaatttgattcattgatgcgtgatcttataccatctctgcaaccctgcctcaatatgttactctccatgcttgatggtccgataagtgaagatatgcgggacttgattttggagctttgcctgattttacctgcccgcttgagttctttattgccccacatacctcgtctaatgaaacctcttgttcttgctctaaaaggtagtgatgaccttgtgagcttagctctacgtacacttgagttctggattgatagtctgaatcctgactttttggaacctagcatggcaaatttaatgtcagaagtcattcttgctttatggtctcatttaaggcctcctccatacacatggggcacaaagtctttggaacttttagggaagctggggggacgaaataggcgatttttgcgggagcctcttgcacttgaatccaaggaaaatccggagcatggattacgtttagttctgacttttgagcctgcgacaccttttttggttcctctggacagatgcatacaccaagctgttggtgcagttatgcaaggcaatggcttggaagcattctacaggaagaaggctcttcaattcattcgggtgtgcctcgattctttgttaaatctgagggaaaatgtacctggcgagggtgtgagccctggtgttctcggtacattgctaatctctaacctggatccctcaagacgtcggaatgatgcttcagatatgaagggagatttaggtgtgaagacaaaaacacaactactggctgaaaaatctgttttcaagactcttcttgtagctatcattgcagctaatgctgacaccagtcttcatgatgagaaggatgattatgttgtcgatatatgccggcattttgctatgcttttccatgttgactcaccatcctccagccaatctggatttatgcatcctattggttcttcactcccatctatcatcatgggatcaagatcaagatgcaacacttcatctaatctccgggagctggaccctttaatatttttggatgctttagttgaagtgctatccagcgaaaatcgtcaacatgcaaaagctgccctatctgctttgaatatttttgccgagacattaatctttcttgcacggatgaaacacactggtatgctaaggggaggtcctagcacccccatgctagtctctagtccatctttaaatccagtatattcacctcccccaagtgtgcgggttgctgtatttgaggaattgttacctcggttattgcattgttgctacagtagcacatggcaagctcagatgggtggtgtaatgggtctcggggcattggtcggtaaagtgtctgtggataccctatgcatttttcaggtcagagtcgtgcgtggtcttctttttgttcttaagaggttaccagtgcatgcaaacaaagagcaggaggagacaaatcatgtcctaacacaagtacttagagtagtaaacaacgcagatgaagcaaacagtgaacctcgacggcaaagttttcagggagttgttgaattccttgcacaggagttgtttaacccaaacgcttcaatggttgtgagaaagaacgtgcaggcttgcttatcactgcttgcaagcagaactggcagtgaggtttctgaattgcttgagcctctctatttgccattgcttcagcctctgatttcacgacctcttcgttcgaagaatattgagcaacaggtgggcaccgttactgctttgaacttctgtcttgcactcagaccaccccttctaaaactatctcctgaacttgtcaattttttgcaagaagcactacaaattgccgaggctgatgaaactatatgggtcactaggatgatgaatgcgaaagtagttctcacatggaacaaactcagaaccgcatgcattgaactactctgtactgcaatggcatggggagatctaaaagctcaaaatcatactgaattgcgagcaaagattatttcaatgtttttcaaatctctaacatgcagaacaacagagattgtcaatgttgctaaggagggacttcgtcaggtggttcaacagcaaaggatgccaaaggatcttctacagagcagcttaaggcccattctagtaaacttagcaaacacaaagagccttagcatgccattgctacaaggattggctcgcctgcttgaattactgtcaaattggtttaatgtcactttgggtgccaagctattggatcacttgaaaaaatggctggagccagaaaagcttgtccagactcaaaaatcttggaaggctggagatgaaccaaaaatagcagcagctatgatcgagctgtttcaccttcttcccccggcagcaagcaaattcttggatgaccttgttaccttggtaattgatctggaaagggcacttcctgaagatcagttttacagtgagatcaacagtccataccgtgctccactggcaaaatttttgaatcgttatgttctggaggctgttgactattttcttgctcgattaagccatccaaagtatttcaggaggtttatgtacataatctgctcggatactggggacctaagggatgcacttgcaaggtcacctcagaaaatacttgcaagtgccttttctcagttttactctcaaagtgaagcatctgctgctcaattatcttctgtaaaggatgaagcccttactggggctgtatctgagagtattactgtacaatcttcatcaaacatggttactacttctgagagttactttaatggattagagcttgtctcagcccttgtgaaattgatgccagagtggctccgtaacaaccgggttgtctttgacaccttgctacttgcttggaaatcacctgcaagacttgcgaggttgcagaacgagcaggatttgagtttaccccaggtgatggaaagcaagaggctgatcaaatgcttcctgaattacttaagacacgatcgaactgaagttggtgcactctttgatatgttatcagtattcttgtaccgcagtcgtatagattatagctttcttaaggaattttatgtcatagaggttgctgaaggatactccccgaatttgaagaaaactatccttaatcattttctgaacattttccagtcaaaacaatatggacaagatcatttagttgttaccatgcagattcttatacttccaatgctagctcattcatttcaaaatggacaaagttgggaagttgttgatcctactataattaaaactattgttgagaagcttcttgatcctccagaagaggtcagcgctgaatacgacgaaccattgaggatagaacttcttcagctagctacattacttttgaagtatctacagactgatcttgttcaccatcgaaaggaactcataaagtttggttggaatcatctcaagcgtgaagataactcgagcaaacagtgggcctttgtgaatgtttgtcatttcttagaggcctatcaagctcctgaaaagattattttacagctgaagcttattgttcgccatgcggacctcttctatagttgcagagcccactttgttcctcagatggtcaactctcttagtcgccttggattaccatacaacacaacagcggaaaatagaaggcttgcaattgaacttgctgggttggtagtggcatgggaaagacagagacaaagtgagatgaaagtggcgcaggaaagtgagagccagaatcaattaggtgacatgcttaatccttctgttattggtggtgatccaaaacgctcctctgatgttccgtcgtttgctgatgatttgagtctacctgatgaggagtataaacctaatgcagcaatggaggagatgatcattaccttcctaattagggtatcacttgtgattgagcctaaggataaggaatctagctcaatgtacaagcaagctcttgatctactgactcaagctctggaagtctggccaaatgccaatgttaaattcaattatctggagaaattacttgggaatctgtcacccactcctcagtccaaggaccctgcatcagccctcgcacaaggacttgatgttatgaacaaagtcttggagaaacaaccccgtctcttcatccgaaataacatcaatcatatttctcaaatactggaaccttgctttggcaacaaaatgctggatgctggaaagtcactttgttccttgctcaagatggtgttcagtgcttttcctcttgaagcagcaacaacgccacaagatataaagttgttgcatcaaagggttcaagaactcattcacaagaatcttgctgctgttacaactcagcagatagcacttgagctcaacaatgctcactcaatcattagcttttcattgtttgtcctcaatgcacttgcagaagtacagaagaatttcattgacccgttcattggcttgcttttccgtgttctgcaacgtcttgcacgtgacatggggtcttctgctggcagccatatccgacaaggacagaggcctgaactggattcatcagttaactcacggtctaccatagattctactgtcatatctaacatgaagactgtcttaaaacttataagtgagagggtgatgtcctcttctgaccacagaaaatctatgggccaaatacttcaagctcttctttcagagaaaggcactgattccagcattcttctgtgcatgctagacatgataaaaacttggattgaggaagattgtaggcttgcttcatcaactggttctgttagttcacttaacccaaaggaaataataacttatcttcataagttatcattagttgacagaaaaagctttcctccagctgcacaagaagaatgggatgcaaaatacttgcagcttctttattcactgtgtgcagattcaaccaagtatccgttgtcttttcggcaagaatttttccataagattgagagacagtatatgcttggacttagagctaaagatccagaaatgaggaagcgattcttcaagctttaccatgatacagtgggaaaaacattattttctagattgcaatttataatacagttacaggactgggaagctgtgagtgatgttttctggttgaagcaaggtcttgatctcgttttggcaatattagtagaaaatgaaccaattacacttgcagcaaattctgctcgagtaccaacgcttatgatagctgggcctgttccagatcgcatcaccatgccacagcaggttcctgatgctcaggaaagcatggatggtacaacactatcgtttgactctcttgctgcaaggcatgctcagttcttaaatgacgcgaacaagcttgtggtggcagatatcatggctccattgaaggaacttgcatttgctgatcccaatgttgcatatcatttgtgggtgcttgttttcccaattgtttgggtcaccttacataaagaggaacaagttgccctagctaagccaataatcgcgcttctatcgaaagattaccacaagaggcagcagggctgcagacctaacgttgctcaggcacttcttgagggtcttcatttgagccatccccaaccacgcatgcctagtgagcttatcaaatatattggaaaaacttgcaatgtgtggtatattgcaattgcattactcgagagtcatatagtgcatatgaatgaggccaagtgctccgagtcattggctgagttatacagacttcttaatgaagacgacatgaggtgtggattatggaagagaaaatcaatcactgcagaaacaagggctggtctttcacttgcccagcatggttactggcaacaagcacaaaatctattttaccaggctatgattaaagctactcagggaacatacaataataccgtcccaaaggctgaaatgtgcctttgggaggaacagtggttgtcctgtgcgtctcatttaggtcagtgggaagtcttagctgnn

SEQ ID NO: 9090 - DNA, 8151 bp, Zea Mays
  misc_feature (8150)..(8151): n is a, c, g, or t
atggcgcccatcaacagcggcaacatggagcagcactcgcagcggctcctcgagcccgacctccctgtgcaagtccgactgcagcttgccatggaagttcgggacagcctggagatgacgcacactccagactacctcaactttcttcgctgctatttcagagccttctcagcaattctcaccgcttacaccaagccacaggccacagagaatgctgagcacaagctacggaatgttgtgatcgagatactcaaccgccttccacacagcgaggtgctcagaccatttgtgcaggatctgctcaagctttctctccgtgtgttgacacaggacaacgaggacaatgctctccttgccatccgaattgtgtttgacctcctccgtaacttccgccctactgtcgaggcggaggtgcagccatttcttgactttgtggttaacatataccataaatttcccacaaccgttagctacttcttcgataatcccaacacaagtgccagtatggctgcctccatgcccatgcagcatttggaccccactgccgatgcctcagtcatgatgcaagtgcctggtggtggtcaactcaacccaagcgcacgttccttcaagatagtcacagagagccctcttgttgtgatgtttctcttccagttgtatgcaaagcttgtgcagacaaatatcccgcacttgttgccactcatggtggcggccatctctatcaagggtcccgacaaggtgccgccacaccttaagacacccttcaacgatttaaagggtgcacaggtcaagaccttgtcatttctgacgtacctcctgaagagcaatgcagattacataaagtcatatgaggaaagcatatgcaagagcattgtgaacttgcttgttacgtgtcctcctgattctgtctccatcagaaaggagctattggttggtctgaaacaagttctcaacaccgagtacaagcgagggctgttccccttgattgacacacttcttgatgaaagggttctgattggcacaggtcgagtttgcatcgaaactttaagacctcttgcttacacccttcttgctgaattggtgcattatgttcgagaagatatttctcttccacaggttgagcccatatatcaaaaaggtgttgaccagcaaagcatggacgaagcacgagttttattggggcgcatattggatgcattcgttgggaagtttaggaccctgaagcgaacaatccctcagttgcttgaagaaggtgaggaagggaaggaacaaccgaatctgagaatgaagcttgaagtcccattacagactgtgctgaatttgcagcaacctttggagtatactaaggaaatcaacgattacaaaagtctgataaagactcttgctgtcggaatgaagacaataatatggagcataacccatgctcactggccacgcccccagcaacaaaatcaacagtcttccaatttgtcacttcaacacttcagggggctgagggaggatgaggtgcggaagacatctggtgttctgaagtctggcgttcactgtctggctctttttaaggaaaaagacgatgatagggaaattctgcaatcattttcgcagatgctggctataatggaagctcgtgatattatggatatgttctccttttgcatgtctgacctctttgattctatgataaccaacaaccagctattgcacatattttcaacccttttgcaagctcccaaggttctgcggcctttcacagatgtattaattaatttccttgttagctcaaagcttgaagccctgaagcagccagattcacctgctgcaaagcttgttttgcaacttttccggttcttgttcattgctgcagctaaagctccagaaagctgtgaacgcacacttcagccacacgtgccggttataatggaagtctgcatgaggagtgccactgaagttgagaaacccctaggttacatgcaccttcttcgaaacatgtttcgtgcattgaacagtgctaaatttgattcattgatgcgtgatcttataccatctctgcaaccctgcctcaatatgttactctccatgcttgatggtccgataagtgaagatatgcgggacttgattttggagctttgcctgattttacctgcccgcttgagttctttattgccccacatacctcgtctaatgaaacctcttgttcttgctctaaaaggtagtgatgaccttgtgagcttagctctacgtacacttgagttctggattgatagtctgaatcctgactttttggaacctagcatggcaaatttaatgtcagaagtcattcttgctttatggtctcatttaaggcctcctccatacacatggggcacaaagtctttggaacttttagggaagctggggggacgaaataggcgatttttgcgggagcctcttgcacttgaatccaaggaaaatccggagcatggattacgtttagttctgacttttgagcctgcgacaccttttttggttcctctggacagatgcatacaccaagctgttggtgcagttatgcaaggcaatggcttggaagcattctacaggaagaaggctcttcaattcattcgggtgtgcctcgattctttgttaaatctgagggaaaatgtacctggcgagggtgtgagccctggtgttctcggtacattgctaatctctaacctggatccctcaagacgtcggaatgatgcttcagatatgaagggagatttaggtgtgaagacaaaaacacaactactggctgaaaaatctgttttcaagactcttcttgtagctatcattgcagctaatgctgacaccagtcttcatgatgagaaggatgattatgttgtcgatatatgccggcattttgctatgcttttccatgttgactcaccatcctccagccaatctggatttatgcatcctattggttcttcactcccatctatcatcatgggatcaagatcaagatgcaacacttcatctaatctccgggagctggaccctttaatatttttggatgctttagttgaagtgctatccagcgaaaatcgtcaacatgcaaaagctgccctatctgctttgaatatttttgccgagacattaatctttcttgcacggatgaaacacactggtatgctaaggggaggtcctagcacccccatgctagtctctagtccatctttaaatccagtatattcacctcccccaagtgtgcgggttgctgtatttgaggaattgttacctcggttattgcattgttgctacagtagcacatggcaagctcagatgggtggtgtaatgggtctcggggcattggtcggtaaagtgtctgtggataccctatgcatttttcaggtcagagtcgtgcgtggtcttctttttgttcttaagaggttaccagtgcatgcaaacaaagagcaggaggagacaaatcatgtcctaacacaagtacttagagtagtaaacaacgcagatgaagcaaacagtgaacctcgacggcaaagttttcagggagttgttgaattccttgcacaggagttgtttaacccaaacgcttcaatggttgtgagaaagaacgtgcaggcttgcttatcactgcttgcaagcagaactggcagtgaggtttctgaattgcttgagcctctctatttgccattgcttcagcctctgatttcacgacctcttcgttcgaagaatattgagcaacaggtgggcaccgttactgctttgaacttctgtcttgcactcagaccaccccttctaaaactatctcctgaacttgtcaattttttgcaagaagcactacaaattgccgaggctgatgaaactatatgggtcactaggatgatgaatgcgaaagtagttctcacatggaacaaactcagaaccgcatgcattgaactactctgtactgcaatggcatggggagatctaaaagctcaaaatcatactgaattgcgagcaaagattatttcaatgtttttcaaatctctaacatgcagaacaacagagattgtcaatgttgctaaggagggacttcgtcaggtggttcaacagcaaaggatgccaaaggatcttctacagagcagcttaaggcccattctagtaaacttagcaaacacaaagagccttagcatgccattgctacaaggattggctcgcctgcttgaattactgtcaaattggtttaatgtcactttgggtgccaagctattggatcacttgaaaaaatggctggagccagaaaagcttgtccagactcaaaaatcttggaaggctggagatgaaccaaaaatagcagcagctatgatcgagctgtttcaccttcttcccccggcagcaagcaaattcttggatgaccttgttaccttggtaattgatctggaaagggcacttcctgaagatcagttttacagtgagatcaacagtccataccgtgctccactggcaaaatttttgaatcgttatgttctggaggctgttgactattttcttgctcgattaagccatccaaagtatttcaggaggtttatgtacataatctgctcggatactggggacctaagggatgcacttgcaaggtcacctcagaaaatacttgcaagtgccttttctcagttttactctcaaagtgaagcatctgctgctcaattatcttctgtaaaggatgaagcccttactggggctgtatctgagagtattactgtacaatcttcatcaaacatggttactacttctgagagttactttaatggattagagcttgtctcagcccttgtgaaattgatgccagagtggctccgtaacaaccgggttgtctttgacaccttgctacttgcttggaaatcacctgcaagacttgcgaggttgcagaacgagcaggatttgagtttaccccaggtgatggaaagcaagaggctgatcaaatgcttcctgaattacttaagacacgatcgaactgaagttggtgcactctttgatatgttatcagtattcttgtaccgcagtcgtatagattatagctttcttaaggaattttatgtcatagaggttgctgaaggatactccccgaatttgaagaaaactatccttaatcattttctgaacattttccagtcaaaacaatatggacaagatcatttagttgttaccatgcagattcttatacttccaatgctagctcattcatttcaaaatggacaaagttgggaagttgttgatcctactataattaaaactattgttgagaagcttcttgatcctccagaagaggtcagcgctgaatacgacgaaccattgaggatagaacttcttcagctagctacattacttttgaagtatctacagactgatcttgttcaccatcgaaaggaactcataaagtttggttggaatcatctcaagcgtgaagataactcgagcaaacagtgggcctttgtgaatgtttgtcatttcttagaggcctatcaagctcctgaaaagattattttacaggtcttcattgctctgctacggacatgccaaccagaaaacaagctgttggtgaagcaagctctcgatatcctcatgcctgccctacctaggagacttcctcctgaaaaaaatgatagccgcatgccgatatggatcagatacaccaagaaagttctcgtagaggaagggcattcaattccaaatatgattcacatattccagcttattgttcgccatgcggacctcttctatagttgcagagcccactttgttcctcagatggtcaactctcttagtcgccttggattaccatacaacacaacagcggaaaatagaaggcttgcaattgaacttgctgggttggtagtggcatgggaaagacagagacaaagtgagatgaaagtggcgcaggaaagtgagagccagaatcaattaggtgacatgcttaatccttctgttattggtggtgatccaaaacgctcctctgatgttccgtcgtttgctgatgatttgagtctacctgatgaggagtataaacctaatgcagcaatggaggagatgatcattaccttcctaattagggtatcacttgtgattgagcctaaggataaggaatctagctcaatgtacaagcaagctcttgatctactgactcaagctctggaagtctggccaaatgccaatgttaaattcaattatctggagaaattacttgggaatctgtcacccactcctcagtccaaggaccctgcatcagccctcgcacaaggacttgatgttatgaacaaagtcttggagaaacaaccccgtctcttcatccgaaataacatcaatcatatttctcaaatactggaaccttgctttggcaacaaaatgctggatgctggaaagtcactttgttccttgctcaagatggtgttcagtgcttttcctcttgaagcagcaacaacgccacaagatataaagttgttgcatcaaagggttcaagaactcattcacaagaatcttgctgctgttacaactcagcagatagcacttgagctcaacaatgctcactcaatcattagcttttcattgtttgtcctcaatgcacttgcagaagtacagaagaatttcattgacccgttcattggcttgcttttccgtgttctgcaacgtcttgcacgtgacatggggtcttctgctggcagccatatccgacaaggacagaggcctgaactggattcatcagttaactcacggtctaccatagattctactgtcatatctaacatgaagactgtcttaaaacttataagtgagagggtgatgtcctcttctgaccacagaaaatctatgggccaaatacttcaagctcttctttcagagaaaggcactgattccagcattcttctgtgcatgctagacatgataaaaacttggattgaggaagattgtaggcttgcttcatcaactggttctgttagttcacttaacccaaaggaaataataacttatcttcataagttatcattagttgacagaaaaagctttcctccagctgcacaagaagaatgggatgcaaaatacttgcagcttctttattcactgtgtgcagattcaaccaagtatccgttgtcttttcggcaagaatttttccataagattgagagacagtatatgcttggacttagagctaaagatccagaaatgaggaagcgattcttcaagctttaccatgatacagtgggaaaaacattattttctagattgcaatttataatacagttacaggactgggaagctgtgagtgatgttttctggttgaagcaaggtcttgatctcgttttggcaatattagtagaaaatgaaccaattacacttgcagcaaattctgctcgagtaccaacgcttatgatagctgggcctgttccagatcgcatcaccatgccacagcaggttcctgatgctcaggaaagcatggatggtacaacactatcgtttgactctcttgctgcaaggcatgctcagttcttaaatgacgcgaacaagcttgtggtggcagatatcatggctccattgaaggaacttgcatttgctgatcccaatgttgcatatcatttgtgggtgcttgttttcccaattgtttgggtcaccttacataaagaggaacaagttgccctagctaagccaataatcgcgcttctatcgaaagattaccacaagaggcagcagggctgcagacctaacgttgctcaggcacttcttgagggtcttcatttgagccatccccaaccacgcatgcctagtgagcttatcaaatatattggaaaaacttgcaatgtgtggtatattgcaattgcattactcgagagtcatatagtgcatatgaatgaggccaagtgctccgagtcattggctgagttatacagacttcttaatgaagacgacatgaggtgtggattatggaagagaaaatcaatcactgcagaaacaagggctggtctttcacttgcccagcatggttactggcaacaagcacaaaatctattttaccaggctatgattaaagctactcagggaacatacaataataccgtcccaaaggctgaaatgtgcctttgggaggaacagtggttgtcctgtgcgtctcatttaggtcagtgggaagtcttagctgnn

SEQ ID NO: 9091 - DNA, 8353 bp, Zea Mays
  misc_feature (8352)..(8353): n is a, c, g, or t
gttcgagaccggtccttgtataaccagaggcccatcgccctcgtcttcctccaagtccgtccccgtctctacccccaccccaaaccctcggctcgcgagcgcgagggagaccccttcctccgagtccataacacggggttgccattcgcgtcgggggaaacgagcccgcgcctcctgcccctgcactcttacggtcctacctccagccatccgctcctccgcccagctcgcggagtcttcccagcgccgatcttcaaaaccctaagctctggcgcggtaaggttggagccggacgcgcacgggcggggcgcccgccatggcgcccatcaacagcggcaacatggagcagcactcgcagcggctcctcgagcccgacctccctgtgcaagtccgactgcagcttgccatggaagttcgggacagcctggagatgacgcacactccagactacctcaactttcttcgctgctatttcagagccttctcagcaattctcaccgcttacaccaagccacaggccacagagaatgctgagcacaagctacggaatgttgtgatcgagatactcaaccgccttccacacagcgaggtgctcagaccatttgtgcaggatctgctcaagctttctctccgtgtgttgacacaggacaacgaggacaatgctctccttgccatccgaattgtgtttgacctcctccgtaacttccgccctactgtcgaggcggaggtgcagccatttcttgactttgtggttaacatataccataaatttcccacaaccgttagctacttcttcgataatcccaacacaagtgccagtatggctgcctccatgcccatgcagcatttggaccccactgccgatgcctcagtcatgatgcaagtgcctggtggtggtcaactcaacccaagcgcacgttccttcaagatagtcacagagagccctcttgttgtgatgtttctcttccagttgtatgcaaagcttgtgcagacaaatatcccgcacttgttgccactcatggtggcggccatctctatcaagggtcccgacaaggtgccgccacaccttaagacacccttcaacgatttaaagggtgcacaggtcaagaccttgtcatttctgacgtacctcctgaagagcaatgcagattacataaagtcatatgaggaaagcatatgcaagagcattgtgaacttgcttgttacgtgtcctcctgattctgtctccatcagaaaggcaagatacgacctggagctattggttggtctgaaacaagttctcaacaccgagtacaagcgagggctgttccccttgattgacacacttcttgatgaaagggttctgattggcacaggtcgagtttgcatcgaaactttaagacctcttgcttacacccttcttgctgaattggtgcattatgttcgagaagatatttctcttccacaggttgagcccatatatcaaaaaggtgttgaccagcaaagcatggacgaagcacgagttttattggggcgcatattggatgcattcgttgggaagtttaggaccctgaagcgaacaatccctcagttgcttgaagaaggtgaggaagggaaggaacaaccgaatctgagaatgaagcttgaagtcccattacagactgtgctgaatttgcagcaacctttggagtatactaaggaaatcaacgattacaaaagtctgataaagactcttgctgtcggaatgaagacaataatatggagcataacccatgctcactggccacgcccccagcaacaaaatcaacagtcttccaatttgtcacttcaacacttcagggggctgagggaggatgaggtgcggaagacatctggtgttctgaagtctggcgttcactgtctggctctttttaaggaaaaagacgatgatagggaaattctgcaatcattttcgcagatgctggctataatggaagctcgtgatattatggatatgttctccttttgcatgtctgacctctttgattctatgataaccaacaaccagctattgcacatattttcaacccttttgcaagctcccaaggttctgcggcctttcacagatgtattaattaatttccttgttagctcaaagcttgaagccctgaagcagccagattcacctgctgcaaagcttgttttgcaacttttccggttcttgttcattgctgcagctaaagctccagaaagctgtgaacgcacacttcagccacacgtgccggttataatggaagtctgcatgaggagtgccactgaagttgagaaacccctaggttacatgcaccttcttcgaaacatgtttcgtgcattgaacagtgctaaatttgattcattgatgcgtgatcttataccatctctgcaaccctgcctcaatatgttactctccatgcttgatgaagtcattcttgctttatggtctcatttaaggcctcctccatacacatggggcacaaagtctttggaacttttagggaagctggggggacgaaataggcgatttttgcgggagcctcttgcacttgaatccaaggaaaatccggagcatggattacgtttagttctgacttttgagcctgcgacaccttttttggttcctctggacagatgcatacaccaagctgttggtgcagttatgcaaggcaatggcttggaagcattctacaggaagaaggctcttcaattcattcgggtgtgcctcgattctttgttaaatctgagggaaaatgtacctggcgagggtgtgagccctggtgttctcggtacattgctaatctctaacctggatccctcaagacgtcggaatgatgcttcagatatgaagggagatttaggtgtgaagacaaaaacacaactactggctgaaaaatctgttttcaagactcttcttgtagctatcattgcagctaatgctgacaccagtcttcatgatgagaaggatgattatgttgtcgatatatgccggcattttgctatgcttttccatgttgactcaccatcctccagccaatctggatttatgcatcctattggttcttcactcccatctatcatcatgggatcaagatcaagatgcaacacttcatctaatctccgggagctggaccctttaatatttttggatgctttagttgaagtgctatccagcgaaaatcgtcaacatgcaaaagctgccctatctgctttgaatatttttgccgagacattaatctttcttgcacggatgaaacacactggtatgctaaggggaggtcctagcacccccatgctagtctctagtccatctttaaatccagtatattcacctcccccaagtgtgcgggttgctgtatttgaggaattgttacctcggttattgcattgttgctacagtagcacatggcaagctcagatgggtggtgtaatgggtctcggggcattggtcggtaaagtgtctgtggataccctatgcatttttcaggtcagagtcgtgcgtggtcttctttttgttcttaagaggttaccagtgcatgcaaacaaagagcaggaggagacaaatcatgtcctaacacaagtacttagagtagtaaacaacgcagatgaagcaaacagtgaacctcgacggcaaagttttcagggagttgttgaattccttgcacaggagttgtttaacccaaacgcttcaatggttgtgagaaagaacgtgcaggcttgcttatcactgcttgcaagcagaactggcagtgaggtttctgaattgcttgagcctctctatttgccattgcttcagcctctgatttcacgacctcttcgttcgaagaatattgagcaacaggtgggcaccgttactgctttgaacttctgtcttgcactcagaccaccccttctaaaactatctcctgaacttgtcaattttttgcaagaagcactacaaattgccgaggctgatgaaactatatgggtcactaggatgatgaatgcgaaagtagttctcacatggaacaaactcagaaccgcatgcattgaactactctgtactgcaatggcatggggagatctaaaagctcaaaatcatactgaattgcgagcaaagattatttcaatgtttttcaaatctctaacatgcagaacaacagagattgtcaatgttgctaaggagggacttcgtcaggtggttcaacagcaaaggatgccaaaggatcttctacagagcagcttaaggcccattctagtaaacttagcaaacacaaagagccttagcatgccattgctacaaggattggctcgcctgcttgaattactgtcaaattggtttaatgtcactttgggtgccaagctattggatcacttgaaaaaatggctggagccagaaaagcttgtccagactcaaaaatcttggaaggctggagatgaaccaaaaatagcagcagctatgatcgagctgtttcaccttcttcccccggcagcaagcaaattcttggatgaccttgttaccttggtaattgatctggaaagggcacttcctgaagatcagttttacagtgagatcaacagtccataccgtgctccactggcaaaatttttgaatcgttatgttctggaggctgttgactattttcttgctcgattaagccatccaaagtatttcaggaggtttatgtacataatctgctcggatactggggacctaagggatgcacttgcaaggtcacctcagaaaatacttgcaagtgccttttctcagttttactctcaaagtgaagcatctgctgctcaattatcttctgtaaaggatgaagcccttactggggctgtatctgagagtattactgtacaatcttcatcaaacatggttactacttctgagagttactttaatggattagagcttgtctcagcccttgtgaaattgatgccagagtggctccgtaacaaccgggttgtctttgacaccttgctacttgcttggaaatcacctgcaagacttgcgaggttgcagaacgagcaggatttgagtttaccccaggtgatggaaagcaagaggctgatcaaatgcttcctgaattacttaagacacgatcgaactgaagttggtgcactctttgatatgttatcagtattcttgtaccgcagtcgtatagattatagctttcttaaggaattttatgtcatagaggttgctgaaggatactccccgaatttgaagaaaactatccttaatcattttctgaacattttccagtcaaaacaatatggacaagatcatttagttgttaccatgcagattcttatacttccaatgctagctcattcatttcaaaatggacaaagttgggaagttgttgatcctactataattaaaactattgttgagaagcttcttgatcctccagaagaggtcagcgctgaatacgacgaaccattgaggatagaacttcttcagctagctacattacttttgaagtatctacagactgatcttgttcaccatcgaaaggaactcataaagtttggttggaatcatctcaagcgtgaagataactcgagcaaacagtgggcctttgtgaatgtttgtcatttcttagaggcctatcaagctcctgaaaagattattttacaggtcttcattgctctgctacggacatgccaaccagaaaacaagctgttggtgaagcaagctctcgatatcctcatgcctgccctacctaggagacttcctcctgaaaaaaatgatagccgcatgccgatatggatcagatacaccaagaaagttctcgtagaggaagggcattcaattccaaatatgattcacatattccagcttattgttcgccatgcggacctcttctatagttgcagagcccactttgttcctcagatggtcaactctcttagtcgccttggattaccatacaacacaacagcggaaaatagaaggcttgcaattgaacttgctgggttggtagtggcatgggaaagacagagacaaagtgagatgaaagtggcgcaggaaagtgagagccagaatcaattaggtgacatgcttaatccttctgttattggtggtgatccaaaacgctcctctgatgttccgtcgtttgctgatgatttgagtaagagagtgaaagttgagcctggtttgcaacctctttgtgtaatgtcgccgggtggggcatctatacctaatattgaaacacctggatcttcaggtctacctgatgaggagtataaacctaatgcagcaatggaggagatgatcattaccttcctaattagggtatcacttgtgattgagcctaaggataaggaatctagctcaatgtacaagcaagctcttgatctactgactcaagctctggaagtctggccaaatgccaatgttaaattcaattatctggagaaattacttgggaatctgtcacccactcctcagtccaaggaccctgcatcagccctcgcacaaggacttgatgttatgaacaaagtcttggagaaacaaccccgtctcttcatccgaaataacatcaatcatatttctcaaatactggaaccttgctttggcaacaaaatgctggatgctggaaagtcactttgttccttgctcaagatggtgttcagtgcttttcctcttgaagcagcaacaacgccacaagatataaagttgttgcatcaaagggttcaagaactcattcacaagaatcttgctgctgttacaactcagcagatagcacttgagctcaacaatgctcactcaatcattagcttttcattgtttgtcctcaatgcacttgcagaagtacagaagaatttcattgacccgttcattggcttgcttttccgtgttctgcaacgtcttgcacgtgacatggggtcttctgctggcagccatatccgacaaggacagaggcctgaactggattcatcagttaactcacggtctaccatagattctactgtcatatctaacatgaagactgtcttaaaacttataagtgagagggtgatgtcctcttctgaccacagaaaatctatgggccaaatacttcaagctcttctttcagagaaaggcactgattccagcattcttctgtgcatgctagacatgataaaaacttggattgaggaagattgtaggcttgcttcatcaactggttctgttagttcacttaacccaaaggaaataataacttatcttcataagttatcattagttgacagaaaaagctttcctccagctgcacaagaagaatgggatgcaaaatacttgcagcttctttattcactgtgtgcagattcaaccaagtatccgttgtcttttcggcaagaatttttccataagattgagagacagtatatgcttggacttagagctaaagatccagaaatgaggaagcgattcttcaagctttaccatgatacagtgggaaaaacattattttctagattgcaatttataatacagttacaggactgggaagctgtgagtgatgttttctggttgaagcaaggtcttgatctcgttttggcaatattagtagaaaatgaaccaattacacttgcagcaaattctgctcgagtaccaacgcttatgatagctgggcctgttccagatcgcatcaccatgccacagcaggttcctgatgctcaggaaagcatggatggtacaacactatcgtttgactctcttgctgcaaggcatgctcagttcttaaatgacgcgaacaagcttgtggtggcagatatcatggctccattgaaggaacttgcatttgctgatcccaatgttgcatatcatttgtgggtgcttgttttcccaattgtttgggtcaccttacataaagaggaacaagttgccctagctaagccaataatcgcgcttctatcgaaagattaccacaagaggcagcagggctgcagacctaacgttgctcaggcacttcttgagggtcttcatttgagccatccccaaccacgcatgcctagtgagcttatcaaatatattggaaaaacttgcaatgtgtggtatattgcaattgcattactcgagagtcatatagtgcatatgaatgaggccaagtgctccgagtcattggctgagttatacagacttcttaatgaagacgacatgaggtgtggattatggaagagaaaatcaatcactgcagaaacaagggctggtctttcacttgcccagcatggttactggcaacaagcacaaaatctattttaccaggctatgattaaagctactcagggaacatacaataataccgtcccaaaggctgaaatgtgcctttgggaggaacagtggttgtcctgtgcgtctcatttaggtcagtgggaagtcttagctgnn

SEQ ID NO: 9092 - DNA, 3223 bp, Zea Mays
actactatagcctagctagagccagctgcttgcctcgccctcccctttgcgcgtcgtcgcgctcctcgccgtccccctctctcggaatcggaaggcgatcgatcgcacaaggctgcgtctgcgtgctcggccgccgcccgacccgaccggacaaggaggggagggggcaaaaaaaatatatagttagtcacacgcacgcagcacaggagggaggagagggattgagggataaagaaatttcgggagacaaggagagagagacagagatggagaggagcggctggactcggaggcaggcctttcactactcccgcacccagataacgatgtggtagctagttcctcttaggctaaggtaagcagcagcgccgggagctagctcctcctcactatcctgcatgcttcgttccttcgttcagctttggttgcccggtcgatcgatcggttcttttttgtttcttcgtatacatgcaaagctagctagttggagagttcctttatttttcgatttctttgctttgggagagtgcaattcggttcatcgtcttcttaatttggattctatattcgttttccccgcctggccggtgcttattacgatggtgctgctgctgctcatgagcttcgcaggaaggaggtcgtggccgggatcccgccgatgatgatgacagtggcgccgccggcatgggcgtagcggcgccaccgtacgagaccaccacgtacgtgagccaacgcaccaagatcaacatcgcagcgatctccgccgccgccgccaccagggcggctaccgcggcttctatgtcccactcgcagggattccaccagggcagcgccggcgtctacggctactcctcggatggcttcgaccgcccggacgactccggccaccaggaccatcatcagcagcagcagcacgtggcgcagcagagccgccgcgacaagctgagggtgcaggggttcgacccggccgccggcggcggccacggcctgctccccatcgagggcgacgagcatggcgggcccgggtccatgtacgagcacgcggcggccgcagctggggcctccaacatgctctccgagatgttcaacttccccgcgccgccgtcggggccctccgccaccgagctgctggccagccagatgggcgccaactaccgcttcggggggctacggcagcagcagcagcaggggcccggaggggtggtggctggcttgtccggcgacggcggttggttcgtcggggccggcgcggcgggtcgtgctgctggcttggtcctcggtggtggggccaacatggggtcgttaggtgaaacgtcgtccccgaagcagcagggcagcatggctgggctggccaccgacccggccgccgcgatgcagctcttcctgatgaacccgcagcagcagcagcagtccagatcgtcgccgccgtcgccgtcggacgtccaggtccagcaccacgaggcggcgttccaggcgttcggaaacgccggggccccgtttggcggcggcgccgggaccggcgtcgtggaaggccaggggctgtccctgtcgctgtcgccgtcgctgcagcagctggagatggcgaagcaggccgaggagctgagggtccgggacggcgtgctctacttcaaccgccagcagcagcagcagcagcagcagctgccgatggcattgcacggccagcagcgcaagaaggccaagctcatctccatgctcgacgaggtggaccggcggtacaaccactactgcgaccagatgcagatggtggtgaacttcttcgactcggtgatggggttcggcgcggcgacgccgtacacggcgctggcgcagaaggcaatgtcgcggcacttccggtgcctcaaggacgccatcgcggcgcagctgcgggccacgtgcgagctgctgggcgagaaggacgccggcaccagctcgggcctcaccaagggcgagacgccgcggctgcgcgccatcgaccagagcctccgccagcagcgcgccttccaccacatggggatgatggagcaggaggcatggcggccccagcgcggcctccccgagcgctccgtcaacatcctccgctcatggctcttcgagcacttcctccacccgtacccgagcgacgccgataaacacctgttggcgaggcagaccgggctgtccaggaaccaggtctccaactggttcatcaacgcccgtgtccggctatggaagcccatgatcgaagagatgtatcagcaggagtgcagggagctcgacggctcctcggccggcggcgggggccccgagtccgtcaacgacccctccggcgccgacgactcgcactccccgaccaccaccggcgcagcgcagctcccgcaacagcaacatcacctcggcacggtgcctggggtgatgccccacaagcccgacccgggcgccgccggtccctcggctgcggacgcggcgttcgtcgggatcgaccctgtggagctccttggcggtggcgcggacgacttgtacgggcggttcgagcccggggtgagggtgcgctacgggcccgctgcggcaggcgctgctgccggcgacgtgtcgctgacgctgggcctgcagcacgccggcgccggcaacgccgccgggcccgacagcaccgggcggttctccttgagagactacagcggttgttgatgcttacacatcgcttacatcacctttattcatggctcatgcatgcgcccatcatgcatttggaagagcaaggatcgacgaaagaaagagagagagagaaaagagtaaccagagaagagatagagggcgctagacaaagagagatgagcatctagaaagagaaaaaatgcatggtgcctggaggtgatgaatgggatgggatatatgaatatgagattatcacaaccaccttcgtcgtcttcttcccagatgattcttaatttacttagctagaagattaattccttttgctaggcattgttgttggggggttaaggataattaatttgtatacagcaaaggaagataggaagtgtataattgtttagtcacacttttttggttctttgttttgcatttgcccgtttttgttctggtgtaccaattttccttgtactcatttttcttccctctgtaaactaaacataagagacacatacatgcatacgtaaatacatatattggtaaatatggtcatacgtatagcatatatatgtaaggcctaaaaattgaacgtacg

SEQ ID NO: 9093 - DNA, 2834 bp, Zea Mays
tgtgtttacaccaatcttgagtcggtgtaaagttgataaaagtcacatgctttttaacatgatctattacgaaaagggtgtgacatccattgatgtactacttatgaactttggacaagtggagtttatgtatgaagtatgaactacttatgaacttatatggacttgattcgtcatgtatgacgagtcactaaaagccagatcaaccctggtagcatctggctaggtaaatatggttgttttatagtttgttccttcttggtttttcaaatcgttttcttttatgtaccttcccattctgtgccttggtatgaaagacaacactggctacctggtgattcttaaaaaaacactttctttctggaacttcacagcatgggagcatccatccttagatggcctgactacctttatgcatgtgtccatctagtggattttctgtttacttagtgctatgggattggggatcgcttatgctattatttttcaggaggaaatgatgcgagggaaggcaggatatgaacacctgaatgaacccctccatatattggttgaggcagagctacctgttgaaatcattgatgtgtgtttgatgcaagcccgcgagatccttgaaggtctgctaaagcctgtggatgaattccaggactacttcaagaagcagcagctacgggagcttgcgatgcttaatggcacccttcgtgaggaagggatgcagagatccggttcagcgtcccctttccacaacagccttgggatgaagagagccaagacaagagggtaatgaacaaagctgcaagcatcatgaaggaagaaccaaatgaatctattttgagactgatcctgtgtgcacatggggttgccttccttggctactgtactggcccagtacggcctcgagccaccagcatcggggcagccgtacccagacgagcaaatgcagcaacaagtgagcatgaagctgcaaagagaaaacacgccaatgctggcaagcaaggaacctcagtagcctcctaccctgatggtgatggatgcaaatcggtgttctcagaagttgcaggagctgagtagcaagaaagccaatgtgaaaaagaaacaaaagatgtagaatggtaagaaaatcagcacaaaaggtgtttgcaacatataaaatgaggtcaataaaattgagatgaagcaaagcagcagttcagttgatccaagaatagatgtcttggagttggttagcagaagggttgattctgaagaaaaggagaggcagaagagcagtaaacaggttgggttgaaagaaaagctgaagtcatggcctgtacctgaagtgtgcatagtatacacgaggagaaaccgcaagcaacacaagaaggaactgggagatgaagtaactggtgctactccgggaacagagtaccatatgcctgccagatatggctgtttgaaccaagtatgtcctgatgcaggctctgacaaaattcctgatcctgatgtagatttctacagtgttcctgatgcagatttttccagttttggtgatcattctgaaagttcatttcaaaatgatcaagtctgggccatgtatgatgaggaagatggtatgcctccctattatgctttgatcagaaaagtcatttccactcgcccttttaaaggtagactggtccacctcaaagcaaacgactctaatgggttcggagtctccagttggctctcgtgtggatactccaagacctgtggtgagttcaagtttgatgtgttcaagtttgatgcctcgctaaatggtgagctgtcggaagaattgagaaatcgactgatgaattaagcagaaaagatcaaggtgagctgtcggaacattttggttcaattccttgtgttttggtcactgctacacattttcatgtaattttaaataacaaaaaacatttgttactaatgaactgctaaccactgaagagagcaacaaaaattactcatctcagctaaatggtttcatgaagtggttagaaagagaactgttgcagttcggcatgcattctgagagtgccaatgattatttactggatcacatattcttttgcatatatttctattcaatcttgttaacgctttcttcgccataacttttagattaaagtacttcttttatggcggtgatgctgcttaaactatgagcattgtggatttattattggaatctgttgagctgtcttacaggcttggttagtattgatgaactttgccactcgtgttgggcatcttgtagcagtttcctgtgaagccgaactccttctcatgcaaaaggaatggggcacaacagaagctgaactacttctgccgagattttatttggagacgagcagcaaaataaggccttcgactctacagagataacgtctaatgcctccccacgcacaattttatctaaaaattagcatcaaccgatatataccggaagaatgcatataaactttataccccaataaaaacccccaatacacacaagctcattgtattatacttaacatatgtcatatatataaaagttatattaggggaagcattgaaaagaagtcagttcattttatgtttgagcgacaaattcactaacatatcacaggctactaaagaacagttgcagcaacaaattcgtttcaaagcttaccttggcctgagaagatgcggaagccgtcgctgcgttgcagcgaatccccgacggtgtcctgtcgtccggtccgggtcaaccaagcaccttatcccttccttcttgcgcaccggtcgctagccgaaacaacaaactactacaatgaaacccccatacccaatttcagtaaacactctat

SEQ ID NO: 9094 - DNA, 1853 bp, Zea Mays
cttaaatgaatagatatcgtcgcacgcacggacacttagccagtatcatctaaagtttgagaacttcattttcgcaagtaaattttatttctcttgggaaaatgatttttttaaaataaggttgtcaaactcgtcctaatatgttgcgtttccgtttttcctttcttgtatttggaagtgaagtggaatgaggcagcacagcctgctcctacagccgatgagatgaggtgattgaggtccgtccaggacaaaaaagcgaaacgactccttcagttccgtcccgttcgtgacgacctccggtcccgggagggggagggggagggggagggagaggcgaggtcatggcctccggcaccggctccggccagccgcaacccgcagcagctgatgctgacccgggagccggcgacaacaagctcgtcttcgagacgccgctgcagccgcagcccgtgagggaggactacgtcgagaacgccgtcaagttcctctcccacccaaaggtcaggggctcccccgtcgtctacagacgatccttcctcgagaagaagggcctcaccacacaggagatcgacgaggccctacgaagagtccctgatcctgaacccatcactacggctaccgcttctccacagcagcaggttggcagccagaatcaatcagctggggcgcaaacttatgcgccagcgcgatctatgcacccagcaaccgctggccctgtcgtccgaccccggttcagctggtaccaagcattcctcgctgcagggctcttgcttggttttggtgctagcacggctgtctttatcaagaaactgttccttcctaggctcaagtcttggatccgcaacgtcgtagcacaaggtgatggcgctgaaggcaaccaacttaagcacaggattgatgaggaaacggctgaggctgtaaaggcttctgcttcagctgtttctgctattgccaaaacaaaccagcagctgcttgcttcaaaggatgaagaaaagaagatactcgtgacattaacacaagctctagattcccaagccaaggagttaaaatccttgaccgagtcaatcaatcgtaccagggaacccataaacattaccagagacgataggttttctcagcaccgcccactggaagaccatgtccctcctgttacgaggaatggggcaattaacagttcatggagatcttctcagcaaactaacatgtatggtgtgtcacatggtgactttggttccgcagcaaggtctgcttcattcgtgccagcacctgctgaacctacagctggatcattttcaagatcttgtgccgagtgtggccattggaagaacaggaactcttatagcgtgctacggttgctcgtcacctctatcagctaccctggaggctttcctgttcttgctcttggtcgtgttgctagtgtcttgcatagtgtataatcttagtgaggtgtgttgttggtgtgtgtgtgttgtgtgtgcatggtttgagtgcgtgcttatgcagctgccttttatctctttaatgaaaaaatgacaagctctccaagaaaaaacttgaccattaactaataagattacaataactgaactttaaaagatactgacattcctttcaaactgtctatatagaggctcatattattgacaaaggtagtccttttagtgtgtgtgagcgcgtgtgcgtgtgttggttattacatcttatcagtatacatgttgctcaatctccaaatacatgcatttgtggtatgtgcatatggttaccatattttgttctatagtgttctttattgatcagttgaaagttattcaacttgatcacgctgcaaccgatttctttaatcttgtggaact

SEQ ID NO: 9095 - DNA, 2286 bp, Zea Mays
ccagtatcatctaaagtttgagaacttcattttcgcaagtaaattttatttctcttgggaaaatgatttttttaaaataaggttgtcaaactcgtcctaatatgttgcgtttccgtttttcctttcttgtatttggaagtgaagtggaatgaggcagcacagcctgctcctacagccgatgagatgaggtgattgaggtccgtccaggacaaaaaagcgaaacgactccttcagttccgtcccgttcgtgacgacctccggtcccgggagggggagggggagggggagggagaggcgaggtcatggcctccggcaccggctccggccagccgcaacccgcagcagctgatgctgacccgggagccggcgacaacaagctcgtcttcgagacgccgctgcagccgcagcccgtgagggaggactacgtcgagaacgccgtcaagttcctctcccacccaaaggtcaggggctcccccgtcgtctacagacgatccttcctcgagaagaagggcctcaccacacaggagatcgacgaggccctacgaagagtccctgatcctgaacccatcactacggctaccgcttctccacagcagcaggttggcagccagaatcaatcagctggggcgcaaacttatgcgccagcgcgatctatgcacccagcaaccgctggccctgtcgtccgaccccggttcagctggctcaagtcttggatccgcaacgtcgtagcacaaggtgatggcgctgaaggcaaccaacttaagcacaggattgatgaggaaacggctgaggctgtaaaggcttctgcttcagctgtttctgctattgccaaaacaaaccagcagctgcttgcttcaaaggatgaagaaaagaagatactcgtgacattaacacaagctctagattcccaagccaaggagttaaaatccttgaccgagtcaatcaatcgtaccagggaacccataaacattaccagagacgataggttttctcagcaccgcccactggaagaccatgtccctcctgttacgaggaatggggcaattaacagttcatggagatcttctcagcaaactaacatgtatggtgtgtcacatggtgactttggttccggttcgtaccttttgtgaatatctttttccctgtttgccatacaagtctgctgttttcacgttgctttacctacttttggctctgtttagcagcaaggtctgcttcattcgtgccagcacctgctgaacctacagctggatcattttcaagatcttgtgccgaggtaaggggcttggctggtttatattggcatgccctgcaaatcacaagaccttcttagtttggtacccagtgggcacagaccagatggggaaaataaaacaacatagttaaaaggaggggaactaactgacgtcaatatacatttgtcaagttagttggattcacttggtgctgtctgagattgcagtgttgcacattcatgttaagtaacttttgagacagctagtatttgctggcagccagccttttcatgcttatgaacagttcacatctgagttgatcagctatggaaaatatcaaatttctcaaattagctagacacggttgtgtaccaaatggaattgtttgcaaatccactacaacaatacaacatttttgtatgtttttatgcatacattatttaccggatctgcaaacactggaatgattgtgtttataatagtgtcactccctgtgtgagtgctgtagtgtggccattggaagaacaggaactcttatagcgtgctacggttgctcgtcacctctatcagctaccctggaggctttcctgttcttgctcttggtcgtgttgctagtgtcttgcatagtgtataatcttagtgaggtgtgttgttggtgtgtgtgtgttgtgtgtgcatggtttgagtgcgtgcttatgcagctgccttttatctctttaatgaaaaaatgacaagctctccaagaaaaaacttgaccattaactaataagattacaataactgaactttaaaagatactgacattcctttcaaactgtctatatagaggctcatattattgacaaaggtagtccttttagtgtgtgtgagcgcgtgtgcgtgtgttggttattacatcttatcagtatacatgttgctcaatctccaaatacatgcatttgtggtatgtgcatatggttaccatattttgttctatagtgttctttattgatcagttgaaagttattcaacttgatcacgctgcaaccgatttctttaatcttgtggaact

SEQ ID NO: 9096 - DNA, 1903 bp, Zea Mays
ttatcacccagccagaccaggcctgcaagagatccattgttgcaagggaagcccaacctaaggcctaacccgcacagggcatagtacccatcaattctttgctggcggcctaagaagaaggatgtgctccgccatactctcgatccaacaaccaggtcgttcagccgcagattagcaggccgcctgcgctcccaagctcctcctttcccctcagcctcccctcctctccggtgtacgtctccgtcgagatggccgccccgctccggcggagcctcccctcccttggccgcgcgcttctcacgccggcgccggcgcggatgctctccgcggaggcctctgatgccctcgttgagatcaagcccggggagatcgggatggtctccggcatccctgaggagcatctccgccgtaaggttctaatttattcaccagctaggactgcatcccagcaaggttcaggcaaagtcgggaggtggaaaattaattttttgtcaacccaaaagtgggagaacccgttgatgggatggacatctactggggatccatatgctaatgtcggtgaagcaggacttacgtttgacagtgcagagtcagcaaaggcgtttgccgaaaaacatggatggaattatgtggttcggaaacgccatgcacctcttctgagggtatcctaaggcctacgctgagaacttcaagtggagaggccctccaaaagcggagcaagcatgagctcgagacatctgtgatgctgacattggcacgatgtcgttttcctcctggctcgattttattttgctttcaaccgtgcccattgttaaagtacgaactagagaatgcatctatcaaacttgtaataagcatgatgtgcaatcaaacaaaatggtgtacttgtacttccaaaacgttaattcgtggatgacattgcttttgcaaccttgtgtgctttcttggctggtatctgaaaagatacatcatgccatttctgagttgaatgatgacgcctacttgcttttggccctatcacacattcacaaatgagctgccagtcgctacgcacgaccactcttgcatgtccgtgtgttcatgggcaacccacgcagttatgaaatgagagtcgggtaggtcagtttcctgaaagggcaggttatacttcctttgcattctccagtcaacatcttatatttactcaggatttcagaactgggtctacatcctattggacttcgcgaaagaggaagctgctcagttttaacatgcagctagcggcttagtctatgcacttggtttcattggatgcagctcaagcttccctaactctcactaatctcctcggagctgtgtccaacggatgcgtcggcgtcggcggcggcggtgcggaacctccaggcgaagaggtaatccctggactcgcactgcagccggctgacgtcgcagggtgcagcgatggaggtgaccttcccgtcgtcctcccactcgatctttgccgtgcatgtgaacgccccgtacgagtccggcagagaggaccggtccgctaccaccagcgccacctccccgctgatcctcctcgacgtggcagccacggcgtcgagccacgggcactcgggctgccccaccatctccttgtacgcgtcgttcacgagccggacgcggttgcctgagtcggagaccaccgccgggagcgcgtcgacctccagctccgcctccacctgaaccgccgtcttcgagacggcggcgtcggtgcaggccgcgtcgtcggtgcggtggatgcacccgacgtggatggcagaccacaccgggcgcaccgcccgcggcgatatgaccctgggctccagcagcttccgcagcaggtcgcgctccacggggacgtccctcccctcctctgtcgccgccgccgccgccgccttcg

SEQ ID NO: 9097 - DNA, 2046 bp, Zea Mays
ccccccctccgctctctatcgcttgctctagccgatctatgtgcatggggctcaacgactggaacaaatcctcgtcgatgctcagggatggttttagggtagatggagcatcccctacatgtgtcttccatgggatggcccaactgcagatctgttcctgggatactacacaatgactacattgcatactcggagctgctcgacaggagcgtcgtcggcggtgctgtaaacatctcctagagtcctcgggcacaagaaggtcaggcggtgatgccaatgcagatcatccaatcagatccagaatgcctgccactgtatacttggagctgctcgacaggagcgccgttggcggcattgcaaacatctcctatagtcctcgggcacaacaaggtcagccaatgacgccaacgcagatcatcccatcggatccggtattcttgacgaaaatccctgaagatgggaaacccacgctgctggtgcaaacaccgccggtgatgccagtgtaggccccattgcccttggacgggatgtcactgactacaatggactcctgacatgcagttgtagcttggctcgaggcgggcatcagcgacgacaaacatcctgctcaatttgttgtatgataaatactgcgaaacaatgctggtgtttcataagatgaccgtgcagctcatgaaaatccagagggtggagtcgagcgagacgacgtggccggcgcggcgccaggtcgtggcgtgcgccgctgtttgctggtcgtggcgtgaggtcaccaaggaggtggtgaagacgctcaaggagtgcggcaggatcaccttccccatgtcccttaagcaggttggcactctctgccttttctctactttgatgatcaatcacatgtcttcacctttgcagaggcttatgattttgaagatctagaatctatggttgaagaaatagccaaagcattcaagacaaagataatgtttatatatgttgacactgctgaagaaaaccttgcaaaaaccattcctcactctttatggcattgaatcagaaaaggcctactggtccagttcttgaaagggtgggaatgtgtccaagaagacaaaggcatcgacccgccaattcttcgctacaaattaaaacagcactagggtgagatcagtgggcttgagagtagcatcatccttcaaacatgatgatgggtttctagctgatggtgtctctatagctcactggtatccttcaaaaagaaacttcctggaaaaaatgtcttttgaagctaatcttgctccatacagctaatcttcacatctttcaaagcatttgctagggccccttcggtgagcaatagaatacgacttgcgctaccaaagcgtccataggttgaggacctccatgacacctatgttggtgtgggttgtgccgccccatcgtgaccgtcatcgattgggcctccgagtccaggagaagacctccgatgaagaaagagacatgctgcacatgcacgagggtacttgcagatagatgtcggctctatggacgaacactcgaccaagtcagatgaggagtatgagggcctagccatgcgagacatgatggctaccggtccaacaatgagcagcaagctgtgagttaaagatgaactcacctgtcctggagagcaacatccataggagtgaggcaaaatggcgggtaccaccacaacatggacccgttcctgaagatgtccaaggaggtggtagccgacaccataatgtcttgcgcgtcattgtgtcaccggccggcaacacgctgcgctggtaccggcgggtgttatgtttcttaggcgtatgtttctgtgctttgagctgtgctatagactggttgtgccaactactgattttaaaagaaaaaggtgagctgaaaatcattgttgaaaacaaacatgtaacggttcgttctcatcagttgtgccaactaccaatcatttcattgatcagaatctgtcgttgctcatgagaaccaaaagtaagacacttcttaataacattggatgcaaatttctgctagcttatcttcact

SEQ ID NO: 9098 - DNA, 2075 bp, Zea Mays
cccccccctccgctctctatcgcttgctctagccgatctatgtgcatggggctcaacgactggaacaaatcctcgtcgatgctcagggatggttttagggtagatggagcatcccctacatgtgtcttccatgggatggcccaactgcagatctgttcctgggatactacacaatgactacattgcatactcggagctgctcgacaggagcgtcgtcggcggtgctgtaaacatctcctagagtcctcgggcacaagaaggtcaggcggtgatgccaatgcagatcatccaatcagatccagaatgcctgccactgtatacttggagctgctcgacaggagcgccgttggcggcattgcaaacatctcctatagtcctcgggcacaacaaggtcagccaatgacgccaacgcagatcatcccatcggatccggtattcttgacgaaaatccctgaagatgggaaacccacgctgctggtgcaaacaccgccggtgatgccagtgtaggccccattgcccttggacgggatgtcactgactacaatggactcctgacatgcagttgtagcttggctcgaggcgggcatcagcgacgacaaacatcctgctcaatttgttgtatgataaatactgcgaaacaatgctggtgtttcataagatgaccgtgcagctcatgaaaatccagagggtggagtcgagcgagacgacgtggccggcgcggcgccaggtcgtggcgtgcgccgctgtttgctggtcgtggcgtgaggtcaccaaggaggtggtgaagacgctcaaggagtgcggcaggatcaccttccccatgtcccttaagcaggttggcactctctgccttttctctactttgatgatcaatcacatgtcttcacctttgcagaggcttatgattttgaagatctagaatctatggttgaagaaatagccaaagcattcaagacaaagataatgtttatatatgttgacactgctgaagaaaaccttgcaaaaaccattcctcactctttatggcattgaatcagaaaaggcctactggtccagttcttgaaagggtgggaatgtgtccaagaagacaaaggcatcgacccgccaattcttcgctacaaattaaaacagcactagggtgagatcagtgggcttgagagtagcatcatccttcaaacatgatgatgggtttctagctgatggtgtctctatagctcactggtatccttcaaaaagaaacttcctggaaaaaatgtcttttgaagctaatcttgctccatacagctaatcttcacatctttcaaagcatttgctagggccccttcggtgagcaatagaatacgacttgcgctaccaaagcgtccatagctgaatgcaaaccattgagatggtccaggttgaggacctccatgacacctatgttggtgtgggttgtgccgccccatcgtgaccgtcatcgattgggcctccgagtccaggagaagacctccgatgaagaaagagacatgctgcacatgcacgagggtacttgcagatagatgtcggctctatggacgaacactcgaccaagtcagatgaggagtatgagggcctagccatgcgagacatgatggctaccggtccaacaatgagcagcaagctgtgagttaaagatgaactcacctgtcctggagagcaacatccataggagtgaggcaaaatggcgggtaccaccacaacatggacccgttcctgaagatgtccaaggaggtggtagccgacaccataatgtcttgcgcgtcattgtgtcaccggccggcaacacgctgcgctggtaccggcgggtgttatgtttcttaggcgtatgtttctgtgctttgagctgtgctatagactggttgtgccaactactgattttaaaagaaaaaggtgagctgaaaatcattgttgaaaacaaacatgtaacggttcgttctcatcagttgtgccaactaccaatcatttcattgatcagaatctgtcgttgctcatgagaaccaaaagtaagacacttcttaataacattggatgcaaatttctgctagcttatcttcact

SEQ ID NO: 9099 - DNA, 2334 bp, Zea Mays
cttcctttcccaactcggtcgacgcgttcgccacggctgcgcagtcctcctcctcgcctccgatcccctcccttcgacgatgcgagcacacccgctcatcctcttcgtacctgcaccgccacctcatcctcttcctcgccgcgccgacacccaccgcgctctctccctcccgcggcgacgcccttcgccaacgagaaccgcacgccgtcgtctcccacgggcactgtcgcacgctgggccacgctgcagtcggtggcgccgccacaccttcttcctccatgtgccgtcgccgccctattcttcttcgagatgcagccgctagcgctgccctcctcccagctccccttcatggccgcgtgcaggtggaccgctccccaccccgtcgccttcctcctcgtactgcccccaagaacgccctagggactatgtgccagtgttagtttttggtaccagtctacaggtctttcatttctacattcaaaggtgagaatcaatcatgttcggctccctttaaaaaagtaatgtttcccaatccttcatagtaaaactaaacacacattgtaaagacatttgtcgtacgagatcttttatagaggtgtgttttaacccaaaggcaggctgtggagatcaattccagatattgccttcttgttgtgtctcagttgattttttttagcattgaacgtaacttacagtttgacataacaagcggtgaatgtaacactacagtttaactcaacaagccattggctgtagctcacaatcagcttggctgaactgccaaaaaaaatacaagcagtccattacagttcaacttaacaagagcagttctgttggtaaagccgatgcaaataagtaccaattgttagttaggaagggaaaagtgtcagcagtcaatggctgattaaaaaactaaatgtctttgaatttgttgggccgtgtgcctagtgcctggcctattaactggcttgttcgctgcggctttaatccgactgcgactgcggcttctacagtattttgtctctaggaattgcagctgcaatagtattttgcagctgcaacagtgctcccgcatgggcagccgaacaagctaaacatgtacatatatacttattataccagtgaggtgtgtgtagagtagtgtactctgtactcttccagaaaactttacatggtaccggaaccgggaccagcggcgacggtgtagtggtgaggaggcagaggagtgccttcggcctcgacggaagaaggccgccgatggagaagaagaccagctgggagcgtggcgcggcgtcgcggtcgtgcacgaggaggaggagcctgcacttgccggagggagaagaagcatgtagcacggtgcggtgctgcagtcgtgcgtgagtaggttcttattattgttttctatcctgctggatatgtagtcatgacagttaaattatgtacaactatgattacaaacgggaatacaagctaggagttgagaccacaatccttatgaaaagttacactgtagaggacaacattaaggatgatcatagactaccaacattcttcttcagattaaatgttaaattcagtaatttaatttgtttcagatggcggaggttctaataagtaaccttatgattggaaattgcagtgatcggttgtgtgtacgtgtctcccgtctgtgaaaaatttatgatcccgaggatgagtataagcttttccatgctcatatggtcctcatcgacgaggaggctggcagtgctcatgctcaaatataccctccactcactgacgttttcaaacctctgataaaggagggcaatgtctacaatgtctcctacattcagatcaagaaagctaataggatgtacaagcatgttgacaacgatatcatgatcggtttcacaaaatggatcctatgctgcctcaacaaacccgcggtttgaacacgtgacagatgacggcttagcttctgtggatggacatcttggtcgcttttgtagatggaatgtttggttggcttttgtagacagaattaggctgcacttgtgattgtgtaacgcttatgagcatggttgtgtggactgtgtcggccaaagtatacctcccaatgccttgtatatatcacatgcttagctgtctatccccaactaggtcgcctgataatagacttcgatcatgtcatgctattctataacaattttcgctgtaacttgcctaatcgtcatactatggtacacgcttaaatttggtgctgcaactttattgtggattataaaagagagaaaaatacagcataaagttataatgtcaaattgccacagctcactgttaagacttatttga

SEQ ID NO: 9100 - DNA, 2393 bp, Zea Mays
cgtccggtcttcctttcccaactcggtcgacgcgttcgccacggctgcgcagtcctcctcctcgcctccgatcccctcccttcgacgatgcgagcacacccgctcatcctcttcgtacctgcaccgccacctcatcctcttcctcgccgcgccgacacccaccgcgctctctccctcccgcggcgacgcccttcgccaacgagaaccgcacgccgtcgtctcccacgggcactgtcgcacgctgggccacgctgcagtcggtggcgccgccacaccttcttcctccatgtgccgtcgccgccctattcttcttcgagatgcagccgctagcgctgccctcctcccagctccccttcatggccgcgtgcagggactatgtgccagtgttagtttttggtaccagtctacaggtctttcatttctacattcaaagagtagtgtactctgtactcttccagaaaactttacatggtaccggaaccgggaccagcggcgacggtgtagtggtgaggaggcagaggagtgccttcggcctcgacggaagaaggccgccgatggagaagaagaccagctgggagcgtggcgcggcgtcgcggtcgtgcacgaggaggaggagcctgcacttgccggagggagaagaagcatgtagcacggtgcggtgctgcagtcgtgcgtgagtaggttcttattattgttttctatcctgctggatatgtagtcatgacagttaaattatgtacaactatgattacaaacgggaatacaagctaggagttgagaccacaatccttatgaaaagttacactgtaagtatgtcgtcctgcttgcatttcttccatgttccttttctcactgtaagcttagtttttgtgatcagcttccagatagaagagttattaaagtagacactaaacgattccaacctcctgaatctctttttactcctgtaacacttccatttatatttatacataatggtattgtcaacagtacacatagtttccatcagtttgttaatagtgcacctttagattgaatgagcttcttgcagagcaccaaggattaggcattgaaatgtgtggataaaaatattagaggaccacacatcattattatgcaacattgtctatgcacatgaacataattgtatcggtagtaagccgccagcatgtttgaaagttaaaaatgtgaattaagaacgaattatcgtatcctgctatacttatgcaacctaccaagaattagggcattgtagaaaccatataaagtattgagatcaatttgaatttgtctgcctcatgattttttgatacctgacctttatgaaggtagaggacaacattaaggatgatcatagactaccaacattcttcttcagattaaatgttaaattcagtaatttaatttgtttcaggtgagccttcttcacatattgagcaacaataatcatcttcgtggtcatggtggtgatgaccatgatgcgcctagaaatgcatgtgtgaaatattcaatatatgtcaccatttctattttcagtaatacaagattagaccatccctgcacatctgcctatctgcctggcaaaatattatcgtcgcttccaagattgagaatatggctgcgtttggaaagccttagattctagcattggcagatggcggaggttctaataagtaaccttatgattggaaattgcagtgatcggttgtgtgtacgtgtctcccgtctgtgaaaaatttatgatcccgaggatgagtataagcttttccatgctcatatggtcctcatcgacgaggaggctggcagtgctcatgctcaaatataccctccactcactgacgttttcaaacctctgataaaggagggcaatgtctacaatgtctcctacattcagatcaagaaagctaataggatgtacaagcatgttgacaacgatatcatgatcggtttcacaaaatggatcctatgctgcctcaacaaacccgcggtttgaacacgtgacagatgacggcttagcttctgtggatggacatcttggtcgcttttgtagatggaatgtttggttggcttttgtagacagaattaggctgcacttgtgattgtgtaacgcttatgagcatggttgtgtggactgtgtcggccaaagtatacctcccaatgccttgtatatatcacatgcttagctgtctatccccaactaggtcgcctgataatagacttcgatcatgtcatgctattctataacaattttcgctgtaacttgcctaatcgtcatactatggtacacgcttaaatttggtgctgcaactttattgtggattataaaagagagaaaaatacagcataaagttataatgtcaaattgccacagctcactgttaagacttatttga

SEQ ID NO: 9101 - DNA, 2401 bp, Zea Mays
gtccggtcttcctttcccaactcggtcgacgcgttcgccacggctgcgcagtcctcctcctcgcctccgatcccctcccttcgacgatgcgagcacacccgctcatcctcttcgtacctgcaccgccacctcatcctcttcctcgccgcgccgacacccaccgcgctctctccctcccgcggcgacgcccttcgccaacgagaaccgcacgccgtcgtctcccacgggcactgtcgcacgctgggccacgctgcagtcggtggcgccgccacaccttcttcctccatgtgccgtcgccgccctattcttcttcgagatgcagccgctagcgctgccctcctcccagctccccttcatggccgcgtgcagggactatgtgccagtgttagtttttggtaccagtctacaggtctttcatttctacattcaaaggtgagaatcaatcatgttcggctccctttaaaaaagtaatgtttcccaatccttcatagtaaaactaaacacacattgtaaagacatttgtcgtacgagatcttttatagaggtgtgttttaacccaaaggcaggctgtggagatcaattccagatattgccttcttgttgtgtctcagttgattttttttagcattgaacgtaacttacagtttgacataacaagcggtgaatgtaacactacagtttaactcaacaagccattggctgtagctcacaatcagcttggctgaactgccaaaaaaaatacaagcagtccattacagttcaacttaacaagagcagttctgttggtaaagccgatgcaaataagtaccaattgttagttaggaagggaaaagtgtcagcagtcaatggctgattaaaaaactaaatgtctttgaatttgttgggccgtgtgcctagtgcctggcctattaactggcttgttcgctgcggctttaatccgactgcgactgcggcttctacagtattttgtctctaggaattgcagctgcaatagtattttgcagctgcaacagtgctcccgcatgggcagccgaacaagctaaacatgtacatatatacttattataccagtgaggtgtgtgtagagtagtgtactctgtactcttccagaaaactttacatggtaccggaaccgggaccagcggcgacggtgtagtggtgaggaggcagaggagtgccttcggcctcgacggaagaaggccgccgatggagaagaagaccagctgggagcgtggcgcggcgtcgcggtcgtgcacgaggaggaggagcctgcacttgccggagggagaagaagcatgtagcacggtgcggtgctgcagtcgtgcgtgagtaggttcttattattgttttctatcctgctggatatgtagtcatgacagttaaattatgtacaactatgattacaaacgggaatacaagctaggagttgagaccacaatccttatgaaaagttacactgtagaggacaacattaaggatgatcatagactaccaacattcttcttcagattaaatgttaaattcagtaatttaatttgtttcagtaatacaagattagaccatccctgcacatctgcctatctgcctggcaaaatattatcgtcgcttccaagattgagaatatggctgcgtttggaaagccttagattctagcattggcagatggcggaggttctaataagtaaccttatgattggaaattgcagtgatcggttgtgtgtacgtgtctcccgtctgtgaaaaatttatgatcccgaggatgagtataagcttttccatgctcatatggtcctcatcgacgaggaggctggcagtgctcatgctcaaatataccctccactcactgacgttttcaaacctctgataaaggagggcaatgtctacaatgtctcctacattcagatcaagaaagctaataggatgtacaagcatgttgacaacgatatcatgatcggtttcacaaaatggatcctatgctgcctcaacaaacccgcggtttgaacacgtgacagatgacggcttagcttctgtggatggacatcttggtcgcttttgtagatggaatgtttggttggcttttgtagacagaattaggctgcacttgtgattgtgtaacgcttatgagcatggttgtgtggactgtgtcggccaaagtatacctcccaatgccttgtatatatcacatgcttagctgtctatccccaactaggtcgcctgataatagacttcgatcatgtcatgctattctataacaattttcgctgtaacttgcctaatcgtcatactatggtacacgcttaaatttggtgctgcaactttattgtggattataaaagagagaaaaatacagcataaagttataatgtcaaattgccacagctcactgttaagacttatttga

SEQ ID NO: 9102 - DNA, 2538 bp, Zea Mays
cttcctttcccaactcggtcgacgcgttcgccacggctgcgcagtcctcctcctcgcctccgatcccctcccttcgacgatgcgagcacacccgctcatcctcttcgtacctgcaccgccacctcatcctcttcctcgccgcgccgacacccaccgcgctctctccctcccgcggcgacgcccttcgccaacgagaaccgcacgccgtcgtctcccacgggcactgtcgcacgctgggccacgctgcagtcggtggcgccgccacaccttcttcctccatgtgccgtcgccgccctattcttcttcgagatgcagccgctagcgctgccctcctcccagctccccttcatggccgcgtgcaggtggaccgctccccaccccgtcgccttcctcctcgtactgcccccaagaacgccctaggttactttttcttagatttgccttttggtttcaagtatgtttctctgatgccctagctgtctggtggattaaatttaattattgagctgcaactttcaccaattggtttggagaaagacaatagaggcttgggttcttttagttaagaaaaattgcgtccgtgttcagttataacataagattgtttattgttctctgtaatctcacatttctttttctatatatgaatagggactatgtgccagtgttagtttttggtaccagtctacaggtctttcatttctacattcaaaggtgagaatcaatcatgttcggctccctttaaaaaagtaatgtttcccaatccttcatagtaaaactaaacacacattgtaaagacatttgtcgtacgagatcttttatagaggtgtgttttaacccaaaggcaggctgtggagatcaattccagatattgccttcttgttgtgtctcagttgattttttttagcattgaacgtaacttacagtttgacataacaagcggtgaatgtaacactacagtttaactcaacaagccattggctgtagctcacaatcagcttggctgaactgccaaaaaaaatacaagcagtccattacagttcaacttaacaagagcagttctgttggtaaagccgatgcaaataagtaccaattgttagttaggaagggaaaagtgtcagcagtcaatggctgattaaaaaactaaatgtctttgaatttgttgggccgtgtgcctagtgcctggcctattaactggcttgttcgctgcggctttaatccgactgcgactgcggcttctacagtattttgtctctaggaattgcagctgcaatagtattttgcagctgcaacagtgctcccgcatgggcagccgaacaagctaaacatgtacatatatacttattataccagtgaggtgtgtgtagagtagtgtactctgtactcttccagaaaactttacatggtaccggaaccgggaccagcggcgacggtgtagtggtgaggaggcagaggagtgccttcggcctcgacggaagaaggccgccgatggagaagaagaccagctgggagcgtggcgcggcgtcgcggtcgtgcacgaggaggaggagcctgcacttgccggagggagaagaagcatgtagcacggtgcggtgctgcagtcgtgcgagttgagaccacaatccttatgaaaagttacactgtagaggacaacattaaggatgatcatagactaccaacattcttcttcagattaaatgttaaattcagtaatttaatttgtttcagtaatacaagattagaccatccctgcacatctgcctatctgcctggcaaaatattatcgtcgcttccaagattgagaatatggctgcgtttggaaagccttagattctagcattggtgatcggttgtgtgtacgtgtctcccgtctgtgaaaaatttatgatcccgaggatgagtataagcttttccatgctcatatggtcctcatcgacgaggaggctggcagtgctcatgctcaaatataccctccactcactgacgttttcaaacctctgataaaggagggcaatgtctacaatgtctcctacattcagatcaagaaagctaataggatgtacaagcatgttgacaacgatatcatgatcggtttcacaaaatggatcctatgctgcctcaacaaacccgcggtttgaacacgtgacagatgacggcttagcttctgtggatggacatcttggtcgcttttgtagatggaatgtttggttggcttttgtagacagaattaggctgcacttgtgattgtgtaacgcttatgagcatggttgtgtggactgtgtcggccaaagtatacctcccaatgccttgtatatatcacatgcttagctgtctatccccaactaggtcgcctgataatagacttcgatcatgtcatgctattctataacaattttcgctgtaacttgcctaatcgtcatactatggtacacgcttaaatttggtgctgcaactttattgtggattataaaagagagaaaaatacagcataaagttataatgtcaaattgccacagctcactgttaagacttatttga

SEQ ID NO: 9103 - DNA, 2550 bp, Zea Mays
cttcctttcccaactcggtcgacgcgttcgccacggctgcgcagtcctcctcctcgcctccgatcccctcccttcgacgatgcgagcacacccgctcatcctcttcgtacctgcaccgccacctcatcctcttcctcgccgcgccgacacccaccgcgctctctccctcccgcggcgacgcccttcgccaacgagaaccgcacgccgtcgtctcccacgggcactgtcgcacgctgggccacgctgcagtcggtggcgccgccacaccttcttcctccatgtgccgtcgccgccctattcttcttcgagatgcagccgctagcgctgccctcctcccagctccccttcatggccgcgtgcaggtggaccgctccccaccccgtcgccttcctcctcgtactgcccccaagaacgccctaggttactttttcttagatttgccttttggtttcaagtatgtttctctgatgccctagctgtctggtggattaaatttaattattgagctgcaactttcaccaattggtttggagaaagacaatagaggcttgggttcttttagttaagaaaaattgcgtccgtgttcagttataacataagattgtttattgttctctgtaatctcacatttctttttctatatatgaatagggactatgtgccagtgttagtttttggtaccagtctacaggtctttcatttctacattcaaaggtgagaatcaatcatgttcggctccctttaaaaaagtaatgtttcccaatccttcatagtaaaactaaacacacattgtaaagacatttgtcgtacgagatcttttatagaggtgtgttttaacccaaaggcaggctgtggagatcaattccagatattgccttcttgttgtgtctcagttgattttttttagcattgaacgtaacttacagtttgacataacaagcggtgaatgtaacactacagtttaactcaacaagccattggctgtagctcacaatcagcttggctgaactgccaaaaaaaatacaagcagtccattacagttcaacttaacaagagcagttctgttggtaaagccgatgcaaataagtaccaattgttagttaggaagggaaaagtgtcagcagtcaatggctgattaaaaaactaaatgtctttgaatttgttgggccgtgtgcctagtgcctggcctattaactggcttgttcgctgcggctttaatccgactgcgactgcggcttctacagtattttgtctctaggaattgcagctgcaatagtattttgcagctgcaacagtgctcccgcatgggcagccgaacaagctaaacatgtacatatatacttattataccagtgaggtgtgtgtagagtagtgtactctgtactcttccagaaaactttacatggtaccggaaccgggaccagcggcgacggtgtagtggtgaggaggcagaggagtgccttcggcctcgacggaagaaggccgccgatggagaagaagaccagctgggagcgtggcgcggcgtcgcggtcgtgcacgaggaggaggagcctgcacttgccggagggagaagaagcatgtagcacggtgcggtgctgcagtcgtgcgtgagtaggttcttattattgttttctatcctgctggatatgtagtcatgacagttaaattatgtacaactatgattacaaacgggaatacaagctaggagttgagaccacaatccttatgaaaagttacacttaatacaagattagaccatccctgcacatctgcctatctgcctggcaaaatattatcgtcgcttccaagattgagaatatggctgcgtttggaaagccttagattctagcattggtgatcggttgtgtgtacgtgtctcccgtctgtgaaaaatttatgatcccgaggatgagtataagcttttccatgctcatatggtcctcatcgacgaggaggctggcagtgctcatgctcaaatataccctccactcactgacgttttcaaacctctgataaaggagggcaatgtctacaatgtctcctacattcagatcaagaaagctaataggatgtacaagcatgttgacaacgatatcatgatcggtttcacaaaatggatcctatgctgcctcaacaaacccgcggtttgaacacgtgacagatgacggcttagcttctgtggatggacatcttggtcgcttttgtagatggaatgtttggttggcttttgtagacagaattaggctgcacttgtgattgtgtaacgcttatgagcatggttgtgtggactgtgtcggccaaagtatacctcccaatgccttgtatatatcacatgcttagctgtctatccccaactaggtcgcctgataatagacttcgatcatgtcatgctattctataacaattttcgctgtaacttgcctaatcgtcatactatggtacacgcttaaatttggtgctgcaactttattgtggattataaaagagagaaaaatacagcataaagttataatgtcaaattgccacagctcactgttaagacttatttga

SEQ ID NO: 9104 - DNA, 3254 bp, Zea Mays
ctgccgcggccgtaccccgccccgcatgctgcccggaatcagcgcctccgccgccgcagcccttccagaaatctccatcccgaatcctccgcgcccccgcctgcccccgcgcatcccgcagcccccgcccccgcgcatcccgcagccttggcgtcgtggccgccgcctctgctccctcctccatcccgcgcaacaacgacgaccgtcggggcctcgcctggcagatcaagcggggaatccacccgccaggcgtctccctgacagtggtagacggtggcggcgatgggggccgagagcgaggatgccccttccccatcctctaccctcccttgcgattccagcattggtgcccgcatccccgccgtccgaagcatggcgctcttcgtctcctccctcgccgccgccctctcccacctctccctcccatcgacctccaaccccaagcctcacccagcctcgctcctgcgcctgcgctccacctaccgccgcgctgttagcctcgcggtggccggagcaagaacggcaataggatgaagctgctgctgtccaacccctacggcttcagcagcccccgacatcgtgtgtcgggatctgggactccagcggcaaggcgaccactatgccgcacgggcgcggtgcaggagctcctccagcggcgccgcaactgcctctgagccctcatggtccagctcgagtgctcgacgcacccgctccgcacccgcccttgtcccccaggtgtcggcgtgcgggattcggtaacggtgttggagctcatccagtggcgccgcaaccgcctccgatccctcaaggtttggctcaaggctgatggccaggtcgaccgtctcctccatgcgcaggggaagaggaaggagctggagcagacggtgaatagcttctctgatttctccctctccggtcctgttgcaaagagccacaaactggaaccgggcggtgtacgtgctggcgcagtgcacgctggacatgccgccggaccactgccgggcctcctcgatggagccatggcagagagcggcgacggaaggtcagcggcgacaagatggacgtggcggtcttcggggcgcggtgcaccctgcggtatgagatggacctgcagttcttcaatgtcactggcaacagcaagatgctgtccctatatttttacagatatttttaataatgacctcagtggaccctatgcatttcttgagccaccttttgttcaaagatcccttctatataagatacaggcaaggagaaaaaatagattaatcggtctcgaagcttctgatacactcagttctcacatgtcgcatgaaatggacctcactagaaaccaaacacccttgaatcgcagtcacccacgtcgccaacaggagtgacttcctcaccctgctccacgccctgccgccgcagagcgggagcggcggctgcgacggccgcggtgctggggaggaggatgcctccgcgctcgccaactccctcgacgcgctttgcaaggcctgcaagcctgagtttcatcgccacccccatgtgagcaatccgggacaccgcggagatgcctcgtgaggaaagcggtacggcgaggcagagcagcgtcggtggtcgtggaaggatggagcaacaaccccacatgttttgttctaatgacacagtggcgccaaggttccagactgtggcgggactgggctctgcagccgctgcaaaggagagtgcttcgtcttcaagcaactctcgaaggagacggccaccaggtcacacaaggccgccaagaacatggccaccggatacacttcggggctgtccaccaatggacctactgcaacaagtactcctccacccgcgtgcctgcataaaatggcaggggttctaccaacaatcaacacacatgtgaagcgaagctgggacgtgcatgtatgtggatccacgacacgtgcatctgtaggaaccctgattttggtatggtttctacactcaaattcatcagtatgatataaggcaatctgctggctggtatttaagagtggccctctcttcatatcatcgaaaggtaaaactattagtggcacacgttggttttttcctttgtttccaacatgtaacattatattaggggtatgtgcagtttagggtaagtaatatactcctttgtgctcagtaagtaattgatagaaggtagaagaaggtagaaacatatgtgcagtttagagtttacctctttatgatttctgggtagccacaatattttcacattgcaattcaagtccttagtaccctggtaatcaaactaacatgtcagagcatcaggcaaattcattgtgcacctgcctattgtatgctaaagaaatcagtttttttgcatgtgttagttgtctcctaacctgctgcattttcaatttttgtgttctgtgttttgtaatttgggagcaccttcaccattgtgttattagagctaggcaccttcaccattgtgttattgatgatctttcttggtctgaatggagtttttgcacctattcacatgccagagagtttatgcattgtcctccttttttggatacactttctgttaaaaaatgctacacagttgcattctacttaccttgtgattttgatggagctctgttgttgtgcttctttgacatttgtcggtcctttgagcattaggtctgcatcatgcattatgttgttatctattgatctatatatcccatattgtggagatcactaaaatcttagtaatttaagttctgttcaaactttcaattccatcgtccgtgaaaaattgataagtatgaatgtgttgacttgactccattttatcttctccttatttgagcttgtattcttattttttaatacattgctgccctgcactgagatttctattgtaaataaacaaagtgctatttaaattttgatttattccttacgaatgtctgttggtttcaggaaagtgctgagagaggtggcatctagaggatgtcatgtcgaacgtgtgaagtttttttagaaatatgtatatttgtgtgaagctttttagaaacttggctccattttattttctatgttcctctcggctttgtttcctatcctttccaatgacttgctatgcatttgcactgtatttggcatgtctaaaactgctacacaaaacttgatatatattttgtctaaaaatactatatccttgttatgcttgattgatctttattttgtctgctcttctattcttgtgtgggtctatcaagaatgag

SEQ ID NO: 9105 - DNA, 3612 bp, Zea Mays
actgccgcggccgtaccccgccccgcatgctgcccggaatcagcgcctccgccgccgcagcccttccagaaatctccatcccgaatcctccgcgcccccgcctgcccccgcgcatcccgcagcccccgcccccgcgcatcccgcagccttggcgtcgtggccgccgcctctgctccctcctccatcccgcgcaacaacgacgaccgtcggggcctcgcctggcagatcaagcggggaatccacccgccaggcgtctccctgacagtggtagacggtggcggcgatgggggccgagagcgaggatgccccttccccatcctctaccctcccttgcgattccagcattggtgcccgcatccccgccgtccgaagcatggcgctcttcgtctcctccctcgccgccgccctctcccacctctccctcccatcgacctccaaccccaagcctcacccagcctcgctcctgcgcctgcgctccacctaccgccgcgctgttagcctcgcggtggccggagcaagaacggcaataggatgaagctgctgctgtccaacccctacggcttcagcagcccccgacatcgtgtgtcgggatctgggactccagcggcaaggcgaccactatgccgcacgggcgcggtgcaggagctcctccagcggcgccgcaactgcctctgagccctcatggtccagctcgagtgctcgacgcacccgctccgcacccgcccttgtcccccaggtgtcggcgtgcgggattcggtaacggtgttggagctcatccagtggcgccgcaaccgcctccgatccctcaaggtttggctcaaggctgatggccaggtcgaccgtctcctccatgcgcaggggaagaggaaggagctggagcagacggtgaatagcttctctgatttctccctctccggtcctgttgcaaagagccacaaactggttaggatgtcttggatcatcagacagatcagcatgacttgcaagcagctagctactgtttacagatgtcctctacttgccaaaaaataacaaaggggttctcgttcttgaaagctgcatagatagcacctcaacttggccactaaaacaactaagtttttttatggacatgtctgatgtttttctcaataattgtgcaaattttcctttcataattttcgtcgtcggggggcaggaaccgggcggtgtacgtgctggcgcagtgcacgctggacatgccgccggaccactgccgggcctcctcgatggagccatggcagagagcggcgacggaaggtcagcggcgacaagatggacgtggcggtcttcggggcgcggtgcaccctgcggtatgagatggacctgcagttcttcaatgtcactggcaacagcaagatgctgtccctattcaaagcaaggtggcaccccagtgttgatattggtaaatcatgcgtaaatgggtgtgctgaaatgatggagaacaatagggaacatagaattgctcttgttgctgctggattagctgctagaatcacttcagatatttttaataatgacctcagtggaccctatgcatttcttgagccaccttttgttcaaagatcccttctatataagatacaggcaaggagaaaaaatagattaatcggtctcgaagcttctgatacactcagttctcacatgtcgcatgaaatggacctcactagaaaccaaacacccttgaatcgcagtcacccacgtcgccaacaggagtgacttcctcaccctgctccacgccctgccgccgcagagcgggagcggcggctgcgacggccgcggtgctggggaggaggatgcctccgcgctcgccaactccctcgacgcgctttgcaaggcctgcaagcctgagtttcatcgccacccccatgtgagcaatccgggacaccgcggagatgcctcgtgaggaaagcggtacggcgaggcagagcagcgtcggtggtcgtggaaggatggagcaacaaccccacatgttttgttctaatgacacagtggcgccaaggttccagactgtggcgggactgggctctgcagccgctgcaaaggagagtgcttcgtcttcaagcaactctcgaaggagacggccaccaggtcacacaaggccgccaagaacatggccaccggatacacttcggggctgtccaccaatggacctactgcaacaagtactcctccacccgcgtgcctgcataaaatggcaggggttctaccaacaatcaacacacatgtgaagcgaagctgggacgtgcatgtatgtggatccacgacacgtgcatctgtaggaaccctgattttggtatggtttctacactcaaattcatcagtatgatataaggcaatctgctggctggtatttaagagtggccctctcttcatatcatcgaaaggtaaaactattagtggcacacgttggttttttcctttgtttccaacatgtaacattatattaggggtatgtgcagtttagggtaagtaatatactcctttgtgctcagtaagtaattgatagaaggtagaagaaggtagaaacatatgtgcagtttagagtttacctctttatgatttctgggtagccacaatattttcacattgcaattcaagtccttagtaccctggtaatcaaactaacatgtcagagcatcaggcaaattcattgtgcacctgcctattgtatgctaaagaaatcagtttttttgcatgtgttagttgtctcctaacctgctgcattttcaatttttgtgttctgtgttttgtaatttgggagcaccttcaccattgtgttattagagctaggcaccttcaccattgtgttattgatgatctttcttggtctgaatggagtttttgcacctattcacatgccagagagtttatgcattgtcctccttttttggatacactttctgttaaaaaatgctacacagttgcattctacttaccttgtgattttgatggagctctgttgttgtgcttctttgacatttgtcggtcctttgagcattaggtctgcatcatgcattatgttgttatctattgatctatatatcccatattgtggagatcactaaaatcttagtaatttaagttctgttcaaactttcaattccatcgtccgtgaaaaattgataagtatgaatgtgttgacttgactccattttatcttctccttatttgagcttgtattcttattttttaatacattgctgccctgcactgagatttctattgtaaataaacaaagtgctatttaaattttgatttattccttacgaatgtctgttggtttcaggaaagtgctgagagaggtggcatctagaggatgtcatgtcgaacgtgtgaagtttttttagaaatatgtatatttgtgtgaagctttttagaaacttggctccattttattttctatgttcctctcggctttgtttcctatcctttccaatgacttgctatgcatttgcactgtatttggcatgtctaaaactgctacacaaaacttgatatatattttgtctaaaaatactatatccttgttatgcttgattgatctttattttgtctgctcttctattcttgtgtgggtctatcaagaatgag

SEQ ID NO: 9106 - DNA, 3704 bp, Zea Mays
tgtaggcgtgcacaccctattgttctgccactgccgcggccgtaccccgccccgcatgctgcccggaatcagcgcctccgccgccgcagcccttccagaaatctccatcccgaatcctccgcgcccccgcctgcccccgcgcatcccgcagcccccgcccccgcgcatcccgcagccttggcgtcgtggccgccgcctctgctccctcctccatcccgcgcaacaacgacgaccgtcggggcctcgcctggcagatcaagcggggaatccacccgccaggcgtctccctgacagtggtagacggtggcggcgatgggggccgagagcgaggatgccccttccccatcctctaccctcccttgcgattccagcattggtgcccgcatccccgccgtccgaagcatggcgctcttcgtctcctccctcgccgccgccctctcccacctctccctcccatcgacctccaaccccaagcctcacccagcctcgctcctgcgcctgcgctccacctaccgccgcgctgttagcctcgcggtggccggagcaagaacggcaataggatgaagctgctgctgtccaacccctacggcttcagcagcccccgacatcgtgtgtcgggatctgggactccagcggcaaggcgaccactatgccgcacgggcgcggtgcaggagctcctccagcggcgccgcaactgcctctgagccctcatggtccagctcgagtgctcgacgcacccgctccgcacccgcccttgtcccccaggtgtcggcgtgcgggattcggtaacggtgttggagctcatccagtggcgccgcaaccgcctccgatccctcaaggtttggctcaaggctgatggccaggtcgaccgtctcctccatgcgcaggggaagaggaaggagctggagcagacggtgaatagcttctctgatttctccctctccggtcctgttgcaaagagccacaaactggaaccgggcggtgtacgtgctggcgcagtgcacgctggacatgccgccggaccactgccgggcctcctcgatggagccatggcagagagcggcgacggaaggtcagcggcgacaagatggacgtggcggtcttcggggcgcggtgcaccctgcggtatgagatggacctgcagttcttcaatgtcactggcaacagcaagatgctgtccctatatttttacagatatttttaataatgacctcagtggaccctatgcatttcttgagccaccttttgttcaaagatcccttctatataagatacaggcaaggagaaaaaatagattaatcggtctcgaagcttctgatacactcagttctcacatgtcgcatgaaatggacctcactagaaaccaaacacccttgaatcgcagtcacccacgtcgccaacaggagtgacttcctcaccctgctccacgccctgccgccgcagagcgggagcggcggctgcgacggccgcggtgctggggaggaggatgcctccgcgctcgccaactccctcgacgcgctttgcaaggcctgcaagcctgagtttcatcgccacccccatgtgagcaatccgggacaccgcggagatgcctcgtgaggaaagcggtacggcgaggcagagcagcgtcggtggtcgtggaaggatggagcaacaaccccacatgttttgttctaatggtccataagtttgcaccacacaaccatttggttttatctgttgtcatttgaccttgatggaaaggagtgagatgaactatggaggaattctgatattatggatttccatttaacttcatcgtacttgcaagccatgcaatatgctattgttgttattgccctttataatctgtgattggactatactgtgtatttaaagcggtatgccacttcttctaaatactatccaaccacagattgttattgccctttatatcaaatgatttttatattgataattagtacttcattggttcttcatttaattggaattcaaacaaggatttcggtaaatatgagtgtcaacttttgctttgcattcttctgtatagtacaacacacattgtttcttgcatttggaagttgttggtctcatgtaggacacagtggcgccaaggttccagactgtggcgggactgggctctgcagccgctgcaaaggagagtgcttcgtcttcaagcaactctcgaaggagacggccaccaggtcacacaaggccgccaagaacatggccaccggatacacttcggggctgtccaccaatggacctactgcaacaagtactcctccacccgcgtgcctgcataaaatggcaggggttctaccaacaatcaacacacatgtgaagcgaagctgggacgtgcatgtatgtggatccacgacacgtgcatctgtaggaaccctgattttggtatggtttctacactcaaattcatcagtatgatataaggcaatctgctggctggtatttaagagtggccctctcttcatatcatcgaaaggtaaaactattagtggcacacgttggttttttcctttgtttccaacatgtaacattatattaggggtatgtgcagtttagggtaagtaatatactcctttgtgctcagtaagtaattgatagaaggtagaagaaggtagaaacatatgtgcagtttagagtttacctctttatgatttctgggtagccacaatattttcacattgcaattcaagtccttagtaccctggtaatcaaactaacatgtcagagcatcaggcaaattcattgtgcacctgcctattgtatgctaaagaaatcagtttttttgcatgtgttagttgtctcctaacctgctgcattttcaatttttgtgttctgtgttttgtaatttgggagcaccttcaccattgtgttattagagctaggcaccttcaccattgtgttattgatgatctttcttggtctgaatggagtttttgcacctattcacatgccagagagtttatgcattgtcctccttttttggatacactttctgttaaaaaatgctacacagttgcattctacttaccttgtgattttgatggagctctgttgttgtgcttctttgacatttgtcggtcctttgagcattaggtctgcatcatgcattatgttgttatctattgatctatatatcccatattgtggagatcactaaaatcttagtaatttaagttctgttcaaactttcaattccatcgtccgtgaaaaattgataagtatgaatgtgttgacttgactccattttatcttctccttatttgagcttgtattcttattttttaatacattgctgccctgcactgagatttctattgtaaataaacaaagtgctatttaaattttgatttattccttacgaatgtctgttggtttcaggaaagtgctgagagaggtggcatctagaggatgtcatgtcgaacgtgtgaagtttttttagaaatatgtatatttgtgtgaagctttttagaaacttggctccattttattttctatgttcctctcggctttgtttcctatcctttccaatgacttgctatgcatttgcactgtatttggcatgtctaaaactgctacacaaaacttgatatatattttgtctaaaaatactatatccttgttatgcttgattgatctttattttgtctgctcttctattcttgtgtgggtctatcaagaatgag

SEQ ID NO: 9107 - DNA, 3717 bp, Zea Mays
actgccgcggccgtaccccgccccgcatgctgcccggaatcagcgcctccgccgccgcagcccttccagaaatctccatcccgaatcctccgcgcccccgcctgcccccgcgcatcccgcagcccccgcccccgcgcatcccgcagccttggcgtcgtggccgccgcctctgctccctcctccatcccgcgcaacaacgacgaccgtcggggcctcgcctggcagatcaagcggggaatccacccgccaggcgtctccctgacagtggtagacggtggcggcgatgggggccgagagcgaggatgccccttccccatcctctaccctcccttgcgattccagcattggtgcccgcatccccgccgtccgaagcatggcgctcttcgtctcctccctcgccgccgccctctcccacctctccctcccatcgacctccaaccccaagcctcacccagcctcgctcctgcgcctgcgctccacctaccgccgcgctgttagcctcgcggtggccggagcaagaacggcaataggatgaagctgctgctgtccaacccctacggcttcagcagcccccgacatcgtgtgtcgggatctgggactccagcggcaaggcgaccactatgccgcacgggcgcggtgcaggagctcctccagcggcgccgcaactgcctctgagccctcatggtccagctcgagtgctcgacgcacccgctccgcacccgcccttgtcccccaggtgtcggcgtgcgggattcggtaacggtgttggagctcatccagtggcgccgcaaccgcctccgatccctcaaggtttggctcaaggctgatggccaggtcgaccgtctcctccatgcgcaggggaagaggaaggagctggagcagacggtgaatagcttctctgatttctccctctccggtcctgttgcaaagagccacaaactggttaggatgtcttggatcatcagacagatcagcatgacttgcaagcagctagctactgtttacagatgtcctctacttgccaaaaaataacaaaggggttctcgttcttgaaagctgcatagatagcacctcaacttggccactaaaacaactaagtttttttatggacatgtctgatgtttttctcaataattgtgcaaattttcctttcataattttcgtcgtcggggggcaggaaccgggcggtgtacgtgctggcgcagtgcacgctggacatgccgccggaccactgccgggcctcctcgatggagccatggcagagagcggcgacggaaggtcagcggcgacaagatggacgtggcggtcttcggggcgcggtgcaccctgcggtatgagatggacctgcagttcttcaatgtcactggcaacagcaagatgctgtccctattcaaagcaaggtggcaccccagtgttgatattggtaaatcatgcgtaaatgggtgtgctgaaatgatggagaacaatagggaacatagaattgctcttgttgctgctggattagctgctagaatcacttcagatatttttaataatgacctcagtggaccctatgcatttcttgaggattcagataactgtatcactttctgcaagtacaaatacacaaacacagaatatctttccctttatgtacttttagctagaccttccagtaatatttcgcttgaggggcattctccgatatatcgagtgggatgatgcttggtggacgtgtacatactaatattaatcggtctcgaagcttctgatacactcagttctcacatgtcgcatgaaatggacctcactagaaaccaaacacccttgaatcgcagtcacccacgtcgccaacaggagtgacttcctcaccctgctccacgccctgccgccgcagagcgggagcggcggctgcgacggccgcggtgctggggaggaggatgcctccgcgctcgccaactccctcgacgcgctttgcaaggcctgcaagcctgagtttcatcgccacccccatgtgagcaatccgggacaccgcggagatgcctcgtgaggaaagcggtacggcgaggcagagcagcgtcggtggtcgtggaaggatggagcaacaaccccacatgttttgttctaatgacacagtggcgccaaggttccagactgtggcgggactgggctctgcagccgctgcaaaggagagtgcttcgtcttcaagcaactctcgaaggagacggccaccaggtcacacaaggccgccaagaacatggccaccggatacacttcggggctgtccaccaatggacctactgcaacaagtactcctccacccgcgtgcctgcataaaatggcaggggttctaccaacaatcaacacacatgtgaagcgaagctgggacgtgcatgtatgtggatccacgacacgtgcatctgtaggaaccctgattttggtatggtttctacactcaaattcatcagtatgatataaggcaatctgctggctggtatttaagagtggccctctcttcatatcatcgaaaggtaaaactattagtggcacacgttggttttttcctttgtttccaacatgtaacattatattaggggtatgtgcagtttagggtaagtaatatactcctttgtgctcagtaagtaattgatagaaggtagaagaaggtagaaacatatgtgcagtttagagtttacctctttatgatttctgggtagccacaatattttcacattgcaattcaagtccttagtaccctggtaatcaaactaacatgtcagagcatcaggcaaattcattgtgcacctgcctattgtatgctaaagaaatcagtttttttgcatgtgttagttgtctcctaacctgctgcattttcaatttttgtgttctgtgttttgtaatttgggagcaccttcaccattgtgttattagagctaggcaccttcaccattgtgttattgatgatctttcttggtctgaatggagtttttgcacctattcacatgccagagagtttatgcattgtcctccttttttggatacactttctgttaaaaaatgctacacagttgcattctacttaccttgtgattttgatggagctctgttgttgtgcttctttgacatttgtcggtcctttgagcattaggtctgcatcatgcattatgttgttatctattgatctatatatcccatattgtggagatcactaaaatcttagtaatttaagttctgttcaaactttcaattccatcgtccgtgaaaaattgataagtatgaatgtgttgacttgactccattttatcttctccttatttgagcttgtattcttattttttaatacattgctgccctgcactgagatttctattgtaaataaacaaagtgctatttaaattttgatttattccttacgaatgtctgttggtttcaggaaagtgctgagagaggtggcatctagaggatgtcatgtcgaacgtgtgaagtttttttagaaatatgtatatttgtgtgaagctttttagaaacttggctccattttattttctatgttcctctcggctttgtttcctatcctttccaatgacttgctatgcatttgcactgtatttggcatgtctaaaactgctacacaaaacttgatatatattttgtctaaaaatactatatccttgttatgcttgattgatctttattttgtctgctcttctattcttgtgtgggtctatcaagaatgag

SEQ ID NO: 9108 - DNA, 4448 bp, Zea Mays
ctgccgcggccgtaccccgccccgcatgctgcccggaatcagcgcctccgccgccgcagcccttccagaaatctccatcccgaatcctccgcgcccccgcctgcccccgcgcatcccgcagcccccgcccccgcgcatcccgcagccttggcgtcgtggccgccgcctctgctccctcctccatcccgcgcaacaacgacgaccgtcggggcctcgcctggcagatcaagcggggaatccacccgccaggcgtctccctgacagtggtagacggtggcggcgatgggggccgagagcgaggatgccccttccccatcctctaccctcccttgcgattccagcattggtgcccgcatccccgccgtccgaagcatggcgctcttcgtctcctccctcgccgccgccctctcccacctctccctcccatcgacctccaaccccaagcctcacccagcctcgctcctgcgcctgcgctccacctaccgccgcgctgttagcctcgcggtggccggagcaagaacggcaataggatgaagctgctgctgtccaacccctacggcttcagcagcccccgacatcgtgtgtcgggatctgggactccagcggcaaggcgaccactatgccgcacgggcgcggtgcaggagctcctccagcggcgccgcaactgcctctgagccctcatggtccagctcgagtgctcgacgcacccgctccgcacccgcccttgtcccccaggtgtcggcgtgcgggattcggtaacggtgttggagctcatccagtggcgccgcaaccgcctccgatccctcaaggtttggctcaaggctgatggccaggtcgaccgtctcctccatgcgcaggggaagaggaaggagctggagcagacggtgaatagcttctctgatttctccctctccggtcctgttgcaaagagccacaaactggaaccgggcggtgtacgtgctggcgcagtgcacgctggacatgccgccggaccactgccgggcctcctcgatggagccatggcagagagcggcgacggaaggtcagcggcgacaagatggacgtggcggtcttcggggcgcggtgcaccctgcggtatgagatggacctgcagttcttcaatgtcactggcaacagcaagatgctgtccctatatttttacagatatttttaataatgacctcagtggaccctatgcatttcttgagccaccttttgttcaaagatcccttctatataagatacaggcaaggagaaaaaataggtttggcccttaaacgatctgtcaaatattttgaacatttgatctcgctgtgtatcgttctatgttcagttcaacagcttgataaatgaggttcaatatcgtgcctatgtctcctatgtttaatgtcatggcatgggcacaaccaagagtggtgagcaccagcggtgcactttaccaatttaggattaggactatagtttctttgttagttagttttttagctgtcgccgttgtaagatcatttgaggcttagcttattggagtttctcttccagtttcctttactattctttaggaactatgtacatagaataagtaatataaattgttggtgtcttcttctcatgattatgtttttacttggctacagctccaaaggttgtaggattaatatatcattttggtgtcaaataattggagttagtcatttatttgtttgtgtcagaaatctggagccttttattgctctgaatgcccagcagctaaataagggtattgttctgaatttagtcacaccttttcattaataagaccaaaacatttcatttcataaatgtcaatgaggtttggagaagagaagaaagagcaataaccaagtaaccaacaatccacacactgttatgcttctatgtttttatacattcaagttttcaacttttaatagacgtcttaactagatggcttcatattcttcatgtgcatagtaaataattactcaggtgttatcttttttatgaactacctgcactattcaaacaagaaacttgtttgttgctgttattggtctgtgtttgacagtttatctctaccaatgtaggattcagataactgtatcactttctgcaagtacaaatacacaaacacagaatatctttccctttatgtacttttagctagaccttccagtaatatttcgcttgaggggcattctccgatatatcgagtgggatgatgcttggtggacgtgtacatactaatattaatcggtctcgaagcttctgatacactcagttctcacatgtcgcatgaaatggacctcactagaaaccaaacacccttgaatcgcagtcacccacgtcgccaacaggagtgacttcctcaccctgctccacgccctgccgccgcagagcgggagcggcggctgcgacggccgcggtgctggggaggaggatgcctccgcgctcgccaactccctcgacgcgctttgcaaggcctgcaagcctgaggtgcgtgtactcactccttcactcgtgcgcaacttgttccttctccaacgtgttccagaacaccacagcatgcctctgtccacagtaagcaagagaacaaaacccgcgggactgtgaacaagcgcagaaagaaatacgaatgcaacaagtcctacattctgttctccttttttggggggccaaaacgttgaggtctcaactcactcgtgcaagcagtttcatcgccacccccatgtgagcaatccgggacaccgcggagatgcctcgtgaggaaagcggtacggcgaggcagagcagcgtcggtggtcgtggaaggatggagcaacaaccccacatgttttgttctaatgacacagtggcgccaaggttccagactgtggcgggactgggctctgcagccgctgcaaaggagagtgcttcgtcttcaagcaactctcgaaggagacggccaccaggtcacacaaggccgccaagaacatggccaccggatacacttcggggctgtccaccaatggacctactgcaacaagtactcctccacccgcgtgcctgcataaaatggcaggggttctaccaacaatcaacacacatgtgaagcgaagctgggacgtgcatgtatgtggatccacgacacgtgcatctgtaggaaccctgattttggtatggtttctacactcaaattcatcagtatgatataaggcaatctgctggctggtatttaagagtggccctctcttcatatcatcgaaaggtaaaactattagtggcacacgttggttttttcctttgtttccaacatgtaacattatattaggggtatgtgcagtttagggtaagtaatatactcctttgtgctcagtaagtaattgatagaaggtagaagaaggtagaaacatatgtgcagtttagagtttacctctttatgatttctgggtagccacaatattttcacattgcaattcaagtccttagtaccctggtaatcaaactaacatgtcagagcatcaggcaaattcattgtgcacctgcctattgtatgctaaagaaatcagtttttttgcatgtgttagttgtctcctaacctgctgcattttcaatttttgtgttctgtgttttgtaatttgggagcaccttcaccattgtgttattagagctaggcaccttcaccattgtgttattgatgatctttcttggtctgaatggagtttttgcacctattcacatgccagagagtttatgcattgtcctccttttttggatacactttctgttaaaaaatgctacacagttgcattctacttaccttgtgattttgatggagctctgttgttgtgcttctttgacatttgtcggtcctttgagcattaggtctgcatcatgcattatgttgttatctattgatctatatatcccatattgtggagatcactaaaatcttagtaatttaagttctgttcaaactttcaattccatcgtccgtgaaaaattgataagtatgaatgtgttgacttgactccattttatcttctccttatttgagcttgtattcttattttttaatacattgctgccctgcactgagatttctattgtaaataaacaaagtgctatttaaattttgatttattccttacgaatgtctgttggtttcaggaaagtgctgagagaggtggcatctagaggatgtcatgtcgaacgtgtgaagtttttttagaaatatgtatatttgtgtgaagctttttagaaacttggctccattttattttctatgttcctctcggctttgtttcctatcctttccaatgacttgctatgcatttgcactgtatttggcatgtctaaaactgctacacaaaacttgatatatattttgtctaaaaatactatatccttgttatgcttgattgatctttattttgtctgctcttctattcttgtgtgggtctatcaagaatgag

SEQ ID NO: 9109 - DNA, 781 bp, Zea Mays
  misc_feature (1)..(2): n is a, c, g, or t
nnagcgttccagcggtatgacatgatcccacagaacgctttgagagtagcagaggaaggaggaacgaggaagggtttatagtttggattatatgattggatgatcggatggttagtagtttggattggaagattggatcacatcgcgtagtccacctctcctctccagtttccacgagaaaaaaagtggatcctctttcccaccaagtcaaggtttgtgaattcgggagtgctagaatcttgatcttccacaagagaatgtctccagaagcaatggataggcttctagaaaaagataaagtgccaaacccatgctatagagtatagactgagagtggtgcaacaaattctgaattggttgaaggagttctctcctagcactatcctggagacggatgttggagaaatatgactgctggatctgcaataggataatgtcttttagtcgatcccttttgtgcttgtttggtgaacttgtgtccccaatctgttgaactctgtaaacatttgctttccataaaagcagagatattctccttaaaaactcagtccagaatggtgatatatgaatgatccctgagagtttataaggtacaaccgtacaagtccaggtgctagagacttctcaatttgctggaaaatgctgtagtattttgtgttgacttgctgtttgatatatgctcagtacctcactgtaaaatgtggttctcttgtttgcctcttaacaaaatcctgagaaatgacatgagaacaaattgagaattagtagatcagtacttaac

SEQ ID NO: 9110 - DNA, 3157 bp, Zea Mays
  misc_feature (1)..(1): n is a, c, g, or t
nagcgttccagcggtatgacatgatcccacagaacgctttgagagtagcagaggaaggaggaacgaggaagggtttatagtttggattatatgattggatgatcggatggttagtagtttggattggaagattggatcacatcgcgtagtccacctctcctctccagtttccacgagaaaaaaagtggatcctctttcccaccaagtcaaggtttgtgaattcgggagtgctagaatcttgatcttccacaagagaatgtctccagaagcaatggataggcttctagaaaaagataaagtgccaaacccatgctatagagtatagactgagtttcaacattggaaggctcaactaaatataccagttccggatacacactacaggacaaaggtgcacagcacccgatagcgcgctgccttttttagtgtagaactagaaaaccaacgcacaacacaaaccagagagttctccatggacgtcggtggcggcgccaccggcacacgctgccgagaccccaccgctgacccctcgtcccagttcttcgttgacgctggccatccatacgcagtcgctgcagccactgcgctcacctcccaccgcaccaagtccaagtggtcccacctctcttcggtccccgtcccctcccccttcctggcctccgccgccgccggcgtgctcctcctcctccgccaccgaccgcacaccgcgctccgcttccatgccttcgccatccgccgcctccttccctcccgctcccctccccctctcgtcttctctgccgccgcagcccacgtcgcggcggcctcccgccttcggggccctgccctctccatccttgcctctgcctcccgccactgctcaccggcccagatcttcaatgccctcgctgccacctaccgctgctttgcctccgccccattcatcttcgacctcctcctcctcgcctaccttcgctcccgccgcgacgtcctcgctgcggcctccgtcgcccgccgcatcctcgctgccggcgcacggccgctcccctccactgcggcagctcttcttcgttcactcccttccgccaccgcggccctcgacatgtatcatcaaatctacacgcatccaagtccacggagcaatcacctcctcctgccgactgttcacaccttcaattccctcctccttgctttccaccgcgaaggcaagtgtgatgaattcaagattgtgctccaggaaatggacaaatattcctgcaagcacaacgtgtgcacctacagcatcaggatgtctgggtactgcaatggcgggcatgtggataaggcgcgaacactatgggatgagatgattcaggaagggatccagcctgatataactgcgtacaacacaatgattagtgggtattgccattctggggaggtaggggtggcagaggagatgtttaaaaatatgttgatgggtgggattgattcaagtgccacgacgttcgaatggttggtcagagggcattgtatggcacgggatgtcgaggcagcaatgcttgtgcgtgcagacatgaaaaggaaggggtttgggttggcgccagaggttgttgaggaattgctggatggattatgtcaaaatgggagggttgaggatggcttgagtgttttgcgagaggagatgaagagggaagaatttgtgccaacccggaggagttacgaggtgttgattatggggttttgtgatggagggaaggtggaggtggcaatcagactccaagcagagatggctggaaaaggattcactgctggcagcgaggtgtactatgcatttattagtgcttatgagaagtctgaaaattatgagatggtcgagaagttgaggaaggaaatgtcggcgatgggcacttagagcatgtctagcagctcaccaataattcatccctaataaaatggtattggtggtcaccaatagtgctttttttggaatattggggagactctatagtagattaccaataatctttcccaatacatgggacccacatgtcagaatagaggatgtgggaggaagaagatgacgacagttgttgtggtcccaacacctatagagggagatgcaactccccttttatttgaggggagatgggagatttgttttggtgaccaccaaaaaaagggagagctattggggagctgttggagcaatggaattgcctcatctcccccaatatgacagttttatggggatgagggatggtattggagagctactggatgctctatcggatctgatatttggcttggatattgcacagtgatgcatggatatcaacctcacctaattgcagttgagaactatggtgagaggtgtgtaaagcttgtttgcttcaaaccgatggtaacaactggtatggaaacatcatgttagagcaggcattagttccatattccactcagtcacattcatctaaatgtaagcgtctattgtagttatgtagttggcatgaatatttatacctgtaaattatgattcatagatgatgaacaatcacttaaacaatataagtctggtgccaaatgctatttcagatgatacctaaatgttacagcacatagttttgatacatgcagggtatccttagaaaagcaagtaaattatgtaatagttgaaagataattctcaatatcatatgtcagatgttctttctggttcacttctctatctggttcacaattcattccagagtggtgcaacaaattctgaattggttgaaggagttctctcctagcactatcctggagacggatgttggagaaatatgactgctggatctgcaataggataatgtcttttagtcgatcccttttgtgcttgtttggtgaacttgtgtccccaatctgttgaactctgtaaacatttgctttccataaaagcagagatattctccttaaaaactcagtccagaatggtgatatatgaatgatccctgagagtttataaggtacaaccgtacaagtccaggtgctagagacttctcaatttgctggaaaatgctgtagtattttgtgttgacttgctgtttgatatatgctcagtacctcactgtaaaatgtggttctcttgtttgcctcttaacaaaatcctgagaaatgacatgagaacaaattgagaattagtagatcagtacttaac

SEQ ID NO: 9111 - DNA, 3163 bp, Zea Mays
  misc_feature (1)..(2): n is a, c, g, or t
nnagcgttccagcggtatgacatgatcccacagaacgctttgagagtagcagaggaaggaggaacgaggaagggtttatagtttggattatatgattggatgatcggatggttagtagtttggattggaagattggatcacatcgcgtagtccacctctcctctccagtttccacgagaaaaaaagtactggcatattaatttcagatttttagtaccacttatgtcattaacattagcaatggtaaattcctcttattttgttaacgtatctctcaacatgcttatttatatttatttgctgcagaacatattaaatctttgcttaattttgaattgttcgctgtaaattagaacttatatgtgcatatacatgtagtcatgtatcaaatccgccgttcagtcattcagtgctctgttcaagtgtaagtgttcagtaccaatttttaatcatgttcagtattactacatcgtggttcatgatgttcacttggaaaatgttgacctttttttttgttctttgataggtggatcctctttcccaccaagtcaaggtttgtgaattcgggagtgctagaatcttgatcttccacaagagaatgtctccagaagcaatggataggcttctagaaaaagataaagtgccaaacccatgctatagagtatagactgagtttcaacattggaaggctcaactaaatataccagttccggatacacactacaggacaaaggtgcacagcacccgatagcgcgctgccttttttagtgtagaactagaaaaccaacgcacaacacaaaccagagagttctccatggacgtcggtggcggcgccaccggcacacgctgccgagaccccaccgctgacccctcgtcccagttcttcgttgacgctggccatccatacgcagtcgctgcagccactgcgctcacctcccaccgcaccaagtccaagtggtcccacctctcttcggtccccgtcccctcccccttcctggcctccgccgccgccggcgtgctcctcctcctccgccaccgaccgcacaccgcgctccgcttccatgccttcgccatccgccgcctccttccctcccgctcccctccccctctcgtcttctctgccgccgcagcccacgtcgcggcggcctcccgccttcggggccctgccctctccatccttgcctctgcctcccgccactgctcaccggcccagatcttcaatgccctcgctgccacctaccgctgctttgcctccgccccattcatcttcgacctcctcctcctcgcctaccttcgctcccgccgcgacgtcctcgctgcggcctccgtcgcccgccgcatcctcgctgccggcgcacggccgctcccctccactgcggcagctcttcttcgttcactcccttccgccaccgcggccctcgacatgtatcatcaaatctacacgcatccaagtccacggagcaatcacctcctcctgccgactgttcacaccttcaattccctcctccttgctttccaccgcgaaggcaagtgtgatgaattcaagattgtgctccaggaaatggacaaatattcctgcaagcacaacgtgtgcacctacagcatcaggatgtctgggtactgcaatggcgggcatgtggataaggcgcgaacactatgggatgagatgattcaggaagggatccagcctgatataactgcgtacaacacaatgattagtgggtattgccattctggggaggtaggggtggcagaggagatgtttaaaaatatgttgatgggtgggattgattcaagtgccacgacgttcgaatggttggtcagagggcattgtatggcacgggatgtcgaggcagcaatgcttgtgcgtgcagacatgaaaaggaaggggtttgggttggcgccagaggttgttgaggaattgctggatggattatgtcaaaatgggagggttgaggatggcttgagtgttttgcgagaggagatgaagagggaagaatttgtgccaacccggaggagttacgaggtgttgattatggggttttgtgatggagggaaggtggaggtggcaatcagactccaagcagagatggctggaaaaggattcactgctggcagcgaggtgtactatgcatttattagtgcttatgagaagtctgaaaattatgagatggtcgagaagttgaggaaggaaatgtcggcgatgggcacttagagcatgtctagcagctcaccaataattcatccctaataaaatggtattggtggtcaccaatagtgctttttttggaatattggggagactctatagtagattaccaataatctttcccaatacatgggacccacatgtcagaatagaggatgtgggaggaagaagatgacgacagttgttgtggtcccaacacctatagagggagatgcaactccccttttatttgaggggagatgggagatttgttttggtgaccaccaaaaaaagggagagctattggggagctgttggagcaatggaattgcctcatctcccccaatatgacagttttatggggatgagggatggtattggagagctactggatgctctatcggatctgatatttggcttggatattgcacagtgatgcatggatatcaacctcacctaattgcagttgagaactatggtgagaggtgtgtaaagcttgtttgcttcaaaccgatggtaacaactgagtggtgcaacaaattctgaattggttgaaggagttctctcctagcactatcctggagacggatgttggagaaatatgactgctggatctgcaataggataatgtcttttagtcgatcccttttgtgcttgtttggtgaacttgtgtccccaatctgttgaactctgtaaacatttgctttccataaaagcagagatattctccttaaaaactcagtccagaatggtgatatatgaatgatccctgagagtttataaggtacaaccgtacaagtccaggtgctagagacttctcaatttgctggaaaatgctgtagtattttgtgttgacttgctgtttgatatatgctcagtacctcactgtaaaatgtggttctcttgtttgcctcttaacaaaatcctgagaaatgacatgagaacaaattgagaattagtagatcagtacttaac

SEQ ID NO: 9112 - DNA, 3396 bp, Zea Mays
  misc_feature (1)..(1): n is a, c, g, or t
nagcgttccagcggtatgacatgatcccacagaacgctttgagagtagcagaggaaggaggaacgaggaagggtttatagtttggattatatgattggatgatcggatggttagtagtttggattggaagattggatcacatcgcgtagtccacctctcctctccagtttccacgagaaaaaaagtactggcatattaatttcagatttttagtaccacttatgtcattaacattagcaatggtaaattcctcttattttgttaacgtatctctcaacatgcttatttatatttatttgctgcagaacatattaaatctttgcttaattttgaattgttcgctgtaaattagaacttatatgtgcatatacatgtagtcatgtatcaaatccgccgttcagtcattcagtgctctgttcaagtgtggatcctctttcccaccaagtcaaggtttgtgaattcgggagtgctagaatcttgatcttccacaagagaatgtctccagaagcaatggataggcttctagaaaaagataaagtgccaaacccatgctatagagtatagactgagtttcaacattggaaggctcaactaaatataccagttccggatacacactacaggacaaaggtgcacagcacccgatagcgcgctgccttttttagtgtagaactagaaaaccaacgcacaacacaaaccagagagttctccatggacgtcggtggcggcgccaccggcacacgctgccgagaccccaccgctgacccctcgtcccagttcttcgttgacgctggccatccatacgcagtcgctgcagccactgcgctcacctcccaccgcaccaagtccaagtggtcccacctctcttcggtccccgtcccctcccccttcctggcctccgccgccgccggcgtgctcctcctcctccgccaccgaccgcacaccgcgctccgcttccatgccttcgccatccgccgcctccttccctcccgctcccctccccctctcgtcttctctgccgccgcagcccacgtcgcggcggcctcccgccttcggggccctgccctctccatccttgcctctgcctcccgccactgctcaccggcccagatcttcaatgccctcgctgccacctaccgctgctttgcctccgccccattcatcttcgacctcctcctcctcgcctaccttcgctcccgccgcgacgtcctcgctgcggcctccgtcgcccgccgcatcctcgctgccggcgcacggccgctcccctccactgcggcagctcttcttcgttcactcccttccgccaccgcggccctcgacatgtatcatcaaatctacacgcatccaagtccacggagcaatcacctcctcctgccgactgttcacaccttcaattccctcctccttgctttccaccgcgaaggcaagtgtgatgaattcaagattgtgctccaggaaatggacaaatattcctgcaagcacaacgtgtgcacctacagcatcaggatgtctgggtactgcaatggcgggcatgtggataaggcgcgaacactatgggatgagatgattcaggaagggatccagcctgatataactgcgtacaacacaatgattagtgggtattgccattctggggaggtaggggtggcagaggagatgtttaaaaatatgttgatgggtgggattgattcaagtgccacgacgttcgaatggttggtcagagggcattgtatggcacgggatgtcgaggcagcaatgcttgtgcgtgcagacatgaaaaggaaggggtttgggttggcgccagaggttgttgaggaattgctggatggattatgtcaaaatgggagggttgaggatggcttgagtgttttgcgagaggagatgaagagggaagaatttgtgccaacccggaggagttacgaggtgttgattatggggttttgtgatggagggaaggtggaggtggcaatcagactccaagcagagatggctggaaaaggattcactgctggcagcgaggtgtactatgcatttattagtgcttatgagaagtctgaaaattatgagatggtcgagaagttgaggaaggaaatgtcggcgatgggcacttagagcatgtctagcagctcaccaataattcatccctaataaaatggtattggtggtcaccaatagtgctttttttggaatattggggagactctatagtagattaccaataatctttcccaatacatgggacccacatgtcagaatagaggatgtgggaggaagaagatgacgacagttgttgtggtcccaacacctatagagggagatgcaactccccttttatttgaggggagatgggagatttgttttggtgaccaccaaaaaaagggagagctattggggagctgttggagcaatggaattgcctcatctcccccaatatgacagttttatggggatgagggatggtattggagagctactggatgctctatcggatctgatatttggcttggatattgcacagtgatgcatggatatcaacctcacctaattgcagttgagaactatggtgagaggtgtgtaaagcttgtttgcttcaaaccgatggtaacaactggtatggaaacatcatgttagagcaggcattagttccatattccactcagtcacattcatctaaatgtaagcgtctattgtagttatgtagttggcatgaatatttatacctgtaaattatgattcatagatgatgaacaatcacttaaacaatataagtctggtgccaaatgctatttcagatgatacctaaatgttacagcacatagttttgatacatgcagggtatccttagaaaagcaagtaaattatgtaatagttgaaagataattctcaatatcatatgtcagatgttctttctggttcacttctctatctggttcacaattcattccagagtggtgcaacaaattctgaattggttgaaggagttctctcctagcactatcctggagacggatgttggagaaatatgactgctggatctgcaataggataatgtcttttagtcgatcccttttgtgcttgtttggtgaacttgtgtccccaatctgttgaactctgtaaacatttgctttccataaaagcagagatattctccttaaaaactcagtccagaatggtgatatatgaatgatccctgagagtttataaggtacaaccgtacaagtccaggtgctagagacttctcaatttgctggaaaatgctgtagtattttgtgttgacttgctgtttgatatatgctcagtacctcactgtaaaatgtggttctcttgtttgcctcttaacaaaatcctgagaaatgacatgagaacaaattgagaattagtagatcagtacttaac

SEQ ID NO: 9113 - DNA, 3441 bp, Zea Mays
  misc_feature (1)..(2): n is a, c, g, or t
nnagcgttccagcggtatgacatgatcccacagaacgctttgagagtagcagaggaaggaggaacgaggaagggtttatagtttggattatatgattggatgatcggatggttagtagtttggattggaagattggatcacatcgcgtagtccacctctcctctccagtttccacgagaaaaaaaaacatattaaatctttgcttaattttgaattgttcgctgtaaattagaacttatatgtgcatatacatgtagtcatgtatcaaatccgccgttcagtcattcagtgctctgttcaagtgtaagtgttcagtaccaatttttaatcatgttcagtattactacatcgtggttcatgatgttcacttggaaaatgttgacctttttttttgttctttgataggtggatcctctttcccaccaagtcaaggtttgtgaattcgggagtgctagaatcttgatcttccacaagagaatgtctccagaagcaatggataggcttctagaaaaagataaagtgccaaacccatgctatagagtatagactgaggtactgattttccttatctgatgaaccatctgcttggtgctgtgacgatctctaggatatgcgacttgttaaaatgattttgattgcttcgttggttacattagttctactattaccatgcattaatggccttcctgactatcatttggttatctcatgtttctgagaataaaagataaccattgctgtaaagtactaacgttgttgtgcgcttaatctgcatttgtatttgtttgccttattacacttgcttgcctttatcttgtgttttctatgtataagtgtgcaattttggcatttttgtttatctgttactgttgttctctacctacccacgttagataaatgattcacacggcactgtacaggattcaacactggcatgattctaattgaactttacctattactagcatcctaagtgatcccttcatttgtttgtttcagtttcaacattggaaggctcaactaaatataccagttccggatacacactacaggacaaaggtgcacagcacccgatagcgcgctgccttttttagtgtagaactagaaaaccaacgcacaacacaaaccagagagttctccatggacgtcggtggcggcgccaccggcacacgctgccgagaccccaccgctgacccctcgtcccagttcttcgttgacgctggccatccatacgcagtcgctgcagccactgcgctcacctcccaccgcaccaagtccaagtggtcccacctctcttcggtccccgtcccctcccccttcctggcctccgccgccgccggcgtgctcctcctcctccgccaccgaccgcacaccgcgctccgcttccatgccttcgccatccgccgcctccttccctcccgctcccctccccctctcgtcttctctgccgccgcagcccacgtcgcggcggcctcccgccttcggggccctgccctctccatccttgcctctgcctcccgccactgctcaccggcccagatcttcaatgccctcgctgccacctaccgctgctttgcctccgccccattcatcttcgacctcctcctcctcgcctaccttcgctcccgccgcgacgtcctcgctgcggcctccgtcgcccgccgcatcctcgctgccggcgcacggccgctcccctccactgcggcagctcttcttcgttcactcccttccgccaccgcggccctcgacatgtatcatcaaatctacacgcatccaagtccacggagcaatcacctcctcctgccgactgttcacaccttcaattccctcctccttgctttccaccgcgaaggcaagtgtgatgaattcaagattgtgctccaggaaatggacaaatattcctgcaagcacaacgtgtgcacctacagcatcaggatgtctgggtactgcaatggcgggcatgtggataaggcgcgaacactatgggatgagatgattcaggaagggatccagcctgatataactgcgtacaacacaatgattagtgggtattgccattctggggaggtaggggtggcagaggagatgtttaaaaatatgttgatgggtgggattgattcaagtgccacgacgttcgaatggttggtcagagggcattgtatggcacgggatgtcgaggcagcaatgcttgtgcgtgcagacatgaaaaggaaggggtttgggttggcgccagaggttgttgaggaattgctggatggattatgtcaaaatgggagggttgaggatggcttgagtgttttgcgagaggagatgaagagggaagaatttgtgccaacccggaggagttacgaggtgttgattatggggttttgtgatggagggaaggtggaggtggcaatcagactccaagcagagatggctggaaaaggattcactgctggcagcgaggtgtactatgcatttattagtgcttatgagaagtctgaaaattatgagatggtcgagaagttgaggaaggaaatgtcggcgatgggcacttagagcatgtctagcagctcaccaataattcatccctaataaaatggtattggtggtcaccaatagtgctttttttggaatattggggagactctatagtagattaccaataatctttcccaatacatgggacccacatgtcagaatagaggatgtgggaggaagaagatgacgacagttgttgtggtcccaacacctatagagggagatgcaactccccttttatttgaggggagatgggagatttgttttggtgaccaccaaaaaaagggagagctattggggagctgttggagcaatggaattgcctcatctcccccaatatgacagttttatggggatgagggatggtattggagagctactggatgctctatcggatctgatatttggcttggatattgcacagtgatgcatggatatcaacctcacctaattgcagttgagaactatgagtggtgcaacaaattctgaattggttgaaggagttctctcctagcactatcctggagacggatgttggagaaatatgactgctggatctgcaataggataatgtcttttagtcgatcccttttgtgcttgtttggtgaacttgtgtccccaatctgttgaactctgtaaacatttgctttccataaaagcagagatattctccttaaaaactcagtccagaatggtgatatatgaatgatccctgagagtttataaggtacaaccgtacaagtccaggtgctagagacttctcaatttgctggaaaatgctgtagtattttgtgttgacttgctgtttgatatatgctcagtacctcactgtaaaatgtggttctcttgtttgcctcttaacaaaatcctgagaaatgacatgagaacaaattgagaattagtagatcagtacttaac

SEQ ID NO: 9114 - DNA, 928 bp, Zea Mays
atggagttcggggttcaccgaagcgtggctatggcttttcccatcgcacaacaacacttcggtggtgacccccacggtgctattagtttgcccaagggtggaccctacccctatgtcttgactacttgcactttccccatcaccccaaccctaactgaattagagggcaagcactgcgctagtagagcgaacgacggcgagcacggtgctggcggagcgaagcaaacgacggcaagggactacctacgggctgatggcgtagcacggtgcgacggctccccctctgggcaagctcgacggcggcaggcactctgcccactggtgtcgatctggaggcgacgatcgatatagacactgggttgtcgttgataatctgcccagattgtagggacgtgagggtgtttgctgccactaccaagtttgggtctaatgagggaaagagatatttcaagtgtcctaggaagacttatggacatggaacatgtactaggtattggttcgaggaagaatatgtggtgttctttcattataacggatatctaccaatgacttcctcgatcgttgcagcagcttcgacaatagaagttcctaagattgtgagaagaattgttagcttagagaaaaatctgaatgaggtgaaggacaaagttggcaacaacagggaaggaatgggaagctgcatttgtcttgtgtgcggatgtgtgaatgtaacactattcctgttgttggccatcgttttgcttgtagttgtagtgctcaagtaggcaaggctgatgaagtatgggcatttctgttgaagttgtgtgttgaagaacacaatgtattgaatctgttgtatttgcatttgctatgaagtatgggcctttatgggcattccatgacatttgtcagtggtcataagaaacatccagtatgtaacccagaacta

SEQ ID NO: 9115 - DNA, 1918 bp, Zea Mays
ccactccaccagtccacctgcatcctccctctctctctcccgctcccgtgctctctccctctccccaggatccgaattgccagcgcaccagtcgagctcgcgggacctcgccggcgccggcgatggcctcctcccttttggccggacggggagggggccaccaccacaactggggggagacgcgcgccccgctcgagcccataccccccaaccctagtcccagccagccccacccgcgcgccgacgggtccaagtccaagccgcgggcggcggccggctacgtgaagttccgcccggcgtccctgggccaccgcgaggcccgcgcgctccgggaccgcctcgcggtggagctcggccaggtccgcgccctcctctcccgcatcgacacctggcagcagcagggcccgccgccgcgcgcggtgctccgcggggcgatgcggaagcggtgcggccagatcctcagcaggctgcgcaaggacaagcgcagcgtgtggttcaacgcgcccgtcgaggtggagcgcctcggcctccacgactaccatgccgtcatcaagcgccccatggatctcggcaccgtcaaggagggcctcgccgccgggaggtacgcctcgcacgacgacttcgcggccgacgtccgcctcaccttcaccaacgcgctgcggtacaacccggtcggccacgaggttcacacgttcgctggcgccctcctcgcctacttcgagaggatgtacaaggaggcgctcgtttgtttagaggaagagcgcaagcgccttgagccgccgaggccagtggcggctgagctgccacctccgccggcagttgagcctgtcgaggcgaaggctaagacgagagcagggaatgtgaggatgcggaagcccaaggcgagggagcctaacaagagggagatgagcctggaggagaagaacatgctcaggctggggctggtgagcctgcccgaagagaagatgcacaatgtgcttcagatcgtgcgcaagaggaacaacaacccggagatgcttggggatgagatcgagcttgatattgatgagatggatgttgagacacagtgggagcttgatcgtttcgttactaacttcaacaaggcgctcaagaagtcccagcgtgctgcgatgttgaatggtggcgttgctgatgtaaccagtactgctgtggctgaggatgacactgcacctgtgggcgatgtgcctacattggttggcaatgacgatgcggagagtgaggaacctgtgaagagcactacagtggctgagcaggtggatgagtatgttgatattggggatgaaatgccagcagccacttaccaatccatggagatcgagaaggacgctgaagggtgcggactttttacatttacaggttctgagtcgaggagctcaggggacagtgcctcaggagctggcaatgctcattctttgacttaggggaggttggtaacaataggatttgaaaatctgaatgatccgagttcgtgtgcaggtaattgtaagtgtgtagctgtttctgagacatgggtgtctgcttaggctttgattacgttagtagtagataacaaactggctttgtgggtgtctgacagcagtacagcaccatgtgtatgtaagctggaggtggaaggtactggtgtgttaaaagtagctgatcgaccttctcgtatgaagggggccagggctagtgtctgtgttcttaatggtagggttgatcgaccttctcgtaattgatgctttgtgcatgacattaaagtatggttttataagtaacaatgcagtatcatttgttgggtgatgacttttgatgtaagagttatttctgcattttggataggattacgcaagataaatttcaacgaccatgcaaatttgtgttgactgttgagtttgttctggtggtgttgcttgat

SEQ ID NO: 9116 - DNA, 2440 bp, Zea Mays
aagagctcggtacatagccaagcaaacaggctgcaaacgctcacgaaaccacgcgtttggtggggtcggcgaggctggtgcggtggtgcacgccggtaactctcctcgccgtccaaagaagctataaattccacccaatcgccgccccgcacgcaccacaccgccccgaccatcaccgacaccagcgcctaagccccccccaaacggcaggagacagcagcaggccggaggtctcctccttctacgcatccactgagttccttcctgcgcaaatgttgctagccccgccagagttttcttctcccccgcagtcgaattgggcgagaagttgatgggaccgggggcacactggaaggttgtgtgagatcgcgaaggggaccgtgaaatcctgagagggctgcggtgattcggctgctcggctgtatgaactgtttcgtgaacctgggactcaactcgaactcgaaccactacgtcgcctgcctcctcatcttcctgctgcatttctccccccagttaaatccatccaattctaattcaactagtagttgtgaaggagaagaacagagctgcacagatggcgagcaacagggaacatgcctcactactaaccctctattgtggaggggggtagaggagggttgatgtgagaagaacaggagatcagcaatttcacaacttggctcatgtggtgaaaatgcgagaaagccacacacaccatccgctattgttattggtggtgggtttgcaggtcttgctgctgctgatgcgctcagaaatgcatccttccaggttattcttctggaatctcgtgatagaattggtggcagagttcacactgactactcttttgggtttccagtcgatttgggagcatcttggcttcatggcgtttgtgaagaaaatcccttggcaccaataattggaaggcttggacttccactgtaccgcacaagtggagacgattctgtgctgtttgatcatgatctggagagctatgcactctatgacactaatggacgtcaagtaccacaggagttggtagaaaagattgggaaggtgtttgagaccatactggaagagactggcaaattgagggaaggaaccaatgaagatatgtctatcgcaaaagccattgcaattgttatggatagaaatccacagttgaggcaagaagggattgctcatgaagttcttcagtggtatttgtgccgtatggagggttggtttgccactgacgcagattcaatttcactacagggctgggatcaggaggtgctgcttccaggtggccatggcctcatggttcgtggatatcgtccagttataaatactcttgcaaaaggcttagatatacgcctcaaccataaggttttggaaattgttcgccaccggaacagggtagaggttactgtaagcagtggccaaacattcgttgcggacgctgcagtggtcactgttccgttgggtgtcctgaaagtgaaaaccatcagatttgagccgaggctgccagagtggaaagaagaggcaatcagagaactgacggttggagttgagaacaaaattgttctgcacttcggccaggttttctggcctaacgtggagttcctcggcgtcgtttcctctagcacgtatggttgcagctatttcctgaaccttcacaaggcaacaggccaccctgtccttgtttacatgcctgctggccgacttgctcgtgacattgagaagatgtcagatgaggctgctgcgcagtttgccttttctcagttgaagaagatccttcccaatgcagctgagccgatgaattacttggtgtcgcactggggctcggacgagaacacacttggctcctacacgttcgatggggtgaacaaaccccgcgacctgtacgagaagctgcgcatccccgtggacaacctgttcttcgcaggagaggccacgagtgtcaagtacacgggcacggtgcacggcgccttctccactggtgttatggcagccgaggagtgcaagatgcgagttctggagcggttcagggagcttgacatgctggagatgtgccaccctgccatgggcgacgaaagccctgtctccgtcccgttgctcatctctcggctctaagcagacgagaggttgtctatgggattgattggcacctgacagtacgctggacgtcccactgattgccggagggaaagctggcagtacagggagaaagaaactccccttgcttctccctcttcggcatgaggaatgtgctggcattacttgtgtggcgtttcatgttaaaacctatattgtgtattgtggccttgtgggtctgtgtgtgttcagggttatcatgtcatcttggtagaaaaggatgccccgtatgtattatgaacactagtaataataatacatatatgtaacttaactgtttggagtattgagttatttggcatgt

SEQ ID NO: 9117 - DNA, 868 bp, Zea Mays
cgccccgccgcctccccctctccggccttctccgctccgcgcgggcgccatgtgcgaggtgttctgcgaccaggtgccgcgcacggcggagaacttcctggcgctctgcggaacgggctactacgacggcaccgtgttccaccgcaacatcaagggcttcatggtccagggcggcgaccccaccggcaccggcaagggcgggtcgtccatctggggcgccaagttcgcggacgagttgagggagtcgctcaagcacaacgcgcgcgggatcatgtcgatggccaacagcgggcccaacaccaacggcagccagttcttcatcacctacgccaagcagccgcacctcaacggtcactacaccgtgttcgccaaggtcatccacggcttcgaggtgctggacctcatggagaaggcgcagacgggacccggggacaggccgctcgccgagatcaggctcaaccgcgtcaccatccacgccaacccgctcgccgtctgaactcctcttcctaccgctctcccctccactcgctcctgtcctcatccaccgggatctgagcgtcatcagccttgctttcaaccgcaaaatcacgctttggtttcggaacatcaatctgtagctctctaattttataccgatgctgtgacatgtaacctttgatagatttgttttgcctggcgtttttttttttttttttgcttcatcgaccatcaaaatcttcaccggccatgtctgccagggtttgagtttgacactgtaacttgcaaaacaatatagcagccatggtcagcaaagagatggtataactgattcgatacattggcccagatgcgacctcgtactcattacaactgtgatcctataactagt

SEQ ID NO: 9118 - DNA, 1652 bp, Zea Mays
atgaaagaaagggaacgggagacgagacttgtaactgtagaggacgaagcccttagctctgggcattatatatacatatccactcctgctctggtctctcgcaaccaccgtgcgcgcatcaactcggcacaaccgcggccgtgtgcagggccgccggcgagccgctggccatcgaggaggtcgtcgttgacacgcccaaggcgcacgaggtcaggatacggatcatctgcacgtcgctctgccacagcgacgtcacgttctggcgcatgaaggatctccctgacaatatccccagaatatttggccacgaagccttcggggtggtggagagcgtgggtgaacaggtggacgagttcgcggcgggcgacgcggtggtgccgacgttcctggggcagtgcagcgagtgcgtggactgcaggtcggcgcgaagcaacatgtgctccaagtaccggttcgcggtgcgcccggggatgccgcgcgacggcaccacccggttcaccgacggccaggggcgcccgctgcaccacttcttcggcgtgtccagcttcgccgagtacaccgtggtggacgtgaaccaggtcgtcaagctcaaccccgccgtgccgccggcactcgcctgcctgctcagctgcggcgcctccacgggggtcggagccgcatggaagcaggcgaaagttgagcctggatcttcggtcgctatcttcggcctcggcgctgtaggattggcggtggctgaaggagccaggatttgtggggcgtcgaagataatcggcgtggatataaaccctgagaaatgcgagcttggaaagaagttcggcgtgacacatttcatcaatcccaaagagctcggtgaggagaaacctgtccaccaggcgatcgccgagatgaccgacggtggcgcggactactgcttcgagtgcattggactggcggcgctgatgaacgacgcgttccggagctcccgagacgggtggggcaagacgatcattcttggggtggaaatgcacggtgcccccctctgcatctctcctcacgagatcctccacgggaagtctgtcatcgggtccatgttcggcggggtgaagcctaagcaggatatccccattctcgccgacaagtacatgaacaaggagctggagcttgacaagttcataacccatgaagttggcctcaaggacatcaaccaagcttttgacctcctgctgcaagggaagagtctcaggtgcaccatatggatggacaagtgatgcaataaccagagttacgcatcggaacctgaagatgctatgatgcttccacctcgtttcagtgaaaataattgtttcatcagctgccaaaagaaatgttatatgtatcttaaattcgagttttccattccttttcttcacgtcatcactcaaacatgttaaaatgtgcccatgttttgatttttactgctttcaaaagttgtgactatccttatcttattagtgatattttcggaatttatctggcggaagtaggactgaaattaagcaggtgctatcgtgctagtgtaacaaaaatatagcatatatgtagcacatgagtagcaagaaaacattatgtaatatatcattgaggtgctacttgttagccatggacaataatgtgagtagtaaacaatatcatta

SEQ ID NO: 9119 - DNA, 860 bp, Zea Mays
atggagggtgccagccggccgccgctcctcgcgctggcgtgtctctggctctgcgccttgctgccccatggagccagcgcagccggcgagtgcgggaacgtgagctgcggcatggggacgtgcagcgagtccagcgactacgccttcggcttcgcgtgcgagtgcaagcccgggtggagccgctaccacctcgccggcctgcagttccccttcctcccctgcgtcatccccaactgcaccatccactcctcgtgccaggacggatcgtcgtcgtccccggcgccggccccgtcgtcgtcgcctccagcggggctgcccccgctaaccgtcttcgatccgtgcctgatgcagtactgcggcgacggcggcgcctgcgagaaggcgtcggacttcgcccaccgctgcagctgccgcgacggctactccaacctcctcaacgacacctcctacccgtgctaccgacagtgttcgctgggcccggactgcaagggtctggggatcgacgtgatcaacgggtccacgccgagctcgtcgccgcctgcacccttctccttcaccgtcaagaagtccggcgccggagctgccgccgcgccggctggcacgctcctcgcgctgctcgcattcttcgggctccaggcgatatggtgaacgagctgccagggcgcgggacaaacgaaagcactgctgtgggactccagacaaagatttcacgcagttttgatttccgtatgtactacatggtttaggatatttcctacgtgtagccttgaccgtcaggagccgcaaagtaccgttttgtccatcaaccgctatagcagagtaaaaaattaccgctactagtgttatccaacatagtaagc

SEQ ID NO: 9120 - DNA, 1000 bp, Zea Mays
cagtcctcaaaaagagaatccaggttttgaggacatctcttcacatccagggcaacctgaagaactctccacacaaaagtggccactgggcaattgagaaaaagccacttattggtacttctacaagctaaagtagatttccagaacagtgctttcccctgtgggccaggcgtactgaacaggtttttgtttttctatttataagccaagaatagcacatccaatgcacgttttctgaggatgaactggggttgtatttggatcttgccccatttttaaatccttcaccatacatagtgccagaggacatgtcgttggcgaaggtgtacaatctcttccgtcaacttggattgagacatatatttgttgttcctaggccttctcgtgttgtaggattgataaccagaaaagatttattacttgaggaggataacaacaatgtgatgccggagctccaatcgacgagtgggcttgctgaacggcaaaatgctcgggggtaatatacatctggaacgtcctcttcttgacaacctagttattgaatagacacgtagcagcatgtatgtcaaaataattttgatagctagcagttaaccttgcactgcatgttgggacatggcccatgggtattatacttcacatgaatgatgaagcagcagtgagcggataatgcagcatggttttggattctgccgactgttgcgcatggatgttggcgttgcgcatcattttttgctccgtcagcagtggctagggaggcgattccccggtgccgtgtgtttagattaggtgattgtaacttacaaaggcgtccatacatacacaccatccatgtatcccacggtaaatttcgaagactgtatgtataagtacatatttgttatacgatggtaaagacaaaagctatgtaggatttgcgtgctctcatgaaactatgatacgtggctataattacttccggttcccgctgaaatcgctagaattttccattgactacatt

SEQ ID NO: 9121 - DNA, 2568 bp, Zea Mays
atgtggtctcctcaagcaagctttgaggaggtggatgtggcatggcggcactatgagcaggccggtactggattagctgctatattcataaacctggctgttgagaacttctctggatggaaatatactgcgacatttgctataataaagcactcgtattttgtgggattctttgtgtacacagttttcaatttagccctggtcttctcttctgtatatatagtcacaaactttgctccagcagctgctggatctggtattccagagatcaaaggttacttaaatggagtggatacacatggaatcctccttttcaggacattagttgggaagatctttgggagcattggatcagttggaggtggattggctctagggaaagaagggcctcttgttcatactggggcctgcattgcttcgcttcttggacaaggtggatctgcaaagtaccacttgagttctaggtgggtacggatttttgaaagcgatcgtgataggcgagaccttgtgacatgtggatgtgcagctggagttgctgctgccttcagagctcctgttggtggggtactatttgccttggaggaagttacttcctggtggagaagtcatcttatgtggagagtattcttcacatctgccgtggtggccgttgtggtgcgttcagccatgaattggtgcaacagtggaaaatgcggtcattttggagctggaggttttataatatgggacatatctggaggtcaagaagattactcataccaggaattgtttcctatggcaattattggtgttatcggtggacttcttggggcattatttaatcaactcaccctctatataactaaatggcggcgaacgtgtcttcataagaaagggaaacgagtccaaatctttgaagcctgtcttatatctttggtaacatccacgatttcctttgtgttgccactactgaggaaatgcagcccatgccctaagttagaaactaattctggcatagaatgccctcatccacctggcacagatgggaattttgttaacttctattgttcacaagatagagagtacaatgatttagcaaccattttcttcaatactcaggatgatgcaatacgtaatcttttcagtgcaaaaacatttcatgaatacagtgcacaaagcctgatcactttcctggtcatgttttatttcttggctgttgtgacatttggaactgcagttccggctggccagttcgttcccggaataatgattggatctacatatggaaggcttgttggaatgtttgttgtcaagttctataagaaactaaacattgaggagggcacgtatgcactccttggtgctgcatcgtttcttggaggttcaatgagaatgactgtatctttatgtgttatcatggttgagattacaaacaacttgaaactcttgccattgatcatgcttgttcttctggtttctaaggcggttggtgacttttttaatgaagggttatatgaagagcaagcccgattaaggggcatccctttactggattccaggcctaagcaagtcatgagaaatatgaatgcaagggatgcgtgcaagaatcaaaaggttgtctgcctaccacgtgtttcaagggttgttgatatcatttctgttttgcgaactaacaagcataatggtttccctgttgttgaccgtgggcagaatggcgagtcacttgtcataggtctcatacttcgtagccacttattggtacttctacaagctaaagtagatttccagaacagtgctttcccctgtgggccaggcgtactgaacagaggatgaactggggttgtatttggatcttgccccatttttaaatccttcaccatacatagtgccagaggacatgtcgttggcgaaggtgtacaatctcttccgtcaacttggattgagacatatatttgttgttcctaggccttctcgtgttgtaggattgataaccagaaaagatttattacttgaggaggataacaacaatgtgatgccggagctccaatcgacgagtgggcttgctgaacggcaaaatgctcgggggtaatatacatctggaacgtcctcttcttgacaacctagttattgaatagacacgtagcagcatgtatgtcaaaataattttgatagctagcagttaaccttgcactgcatgttgggacatggcccatgggtattatacttcacatgaatgatgaagcagcagtgagcggataatgcagcatggttttggattctgccgactgttgcgcatggatgttggcgttgcgcatcattttttgctccgtcagcagtggctagggaggcgattccccggtgccgtgtgtttagattaggtgattgtaacttacaaaggcgtccatacatacacaccatccatgtatcccacggtaaatttcgaagactgtatgtataagtacatatttgttatacgatggtaaagacaaaagctatgtaggatttgcgtgctctcatgaaactatgatacgtggctataattacttccggttcccgctgaaatcgctagaattttccattgactacatt

SEQ ID NO: 9122 - DNA, 2657 bp, Zea Mays
gacgaactcttggttctcaagctttcccggccagtctcgcagcaaccctttccctaccccgatcgagcgtgcgtcaaggtcgggatccggcgccgccgcatcccgatccgatgctctccggcgtcgaccacgacgttcccgacggcatcgggatggcgcggctcgcgtggacgcgcctccccaccgccgacggggagggggcgggcccctccacttccgaggccgcggacgacgaactcttatcgggcgctgccatagagagcctcgactacgaggtcatcgagaactacgcgtaccgggaggagcaggcgcagcggagcaagttctgggtgccctactacgtcatgctcaagtggctgttcgctctgctgatcggcgttggtactggattagctgctatattcataaacctggctgttgagaacttctctggatggaaatatactgcgacatttgctataataaagcactcgtattttgtgggattctttgtgtacacagttttcaatttagccctggtcttctcttctgtatatatagtcacaaactttgctccagcagctgctggatctggtattccagagatcaaaggttacttaaatggagtggatacacatggaatcctccttttcaggacattagttgggaagatctttgggagcattggatcagttggaggtggattggctctagggaaagaagggcctcttgttcatactggggcctgcattgcttcgcttcttggacaaggtggatctgcaaagtaccacttgagttctaggtgggtacggatttttgaaagcgatcgtgataggcgagaccttcttatttttgtttttgaggtttcacaacttgaaattctctggccaagtcatgaagctattgttaaagtgacatgtggatgtgcagctggagttgctgctgccttcagagctcctgttggtggggtactatttgccttggaggaagttacttcctggtggagaagtcatcttatgtggagagtattcttcacatctgccgtggtggccgttgtggtgcgttcagccatgaattggtgcaacagtggaaaatgcggtcattttggagctggaggttttataatatgggacatatctggaggtcaagaagattactcataccaggaattgtttcctatggcaattattggtgttatcggtggacttcttggtcatgttttatttcttggctgttgtgacatttggaactgcagttccggctggccagttcgttcccggaataatgattggatctacatatggaaggcttgttggaatgtttgttgtcaagttctataagaaactaaacattgaggagggcacgtatgcactccttggtgctgcatcgtttcttggaggttcaatgagaatgactgtatctttatgtgttatcatggttgagattacaaacaacttgaaactcttgccattgatcatgcttgttcttctggtttctaaggcggttggtgacttttttaatgaagggttatatgaagagcaagcccgattaaggggcatccctttactggattccaggcctaagcaagtcatgagaaatatgaatgcaagggatgcgtgcaagaatcaaaaggttgtctgcctaccacgtgtttcaagggttgttgatatcatttctgttttgcgaactaacaagcataatggtttccctgttgttgaccgtgggcagaatggcgagtcacttgtcataggtctcatacttcgtagccacttattggtacttctacaagctaaagtagatttccagaacagtgctttcccctgtgggccaggcgtactgaacaggcacaattttagtgactttgttaaaccagcatcaagtaaaggaaagtcaattgatgatattcatttgacagaggatgaactggggttgtatttggatcttgccccatttttaaatccttcaccatacatagtgccagaggacatgtcgttggcgaaggtgtacaatctcttccgtcaacttggattgagacatatatttgttgttcctaggccttctcgtgttgtaggattgataaccagaaaagatttattacttgaggaggataacaacaatgtgatgccggagctccaatcgacgagtgggcttgctgaacggcaaaatgctcgggggtaatatacatctggaacgtcctcttcttgacaacctagttattgaatagacacgtagcagcatgtatgtcaaaataattttgatagctagcagttaaccttgcactgcatgttgggacatggcccatgggtattatacttcacatgaatgatgaagcagcagtgagcggataatgcagcatggttttggattctgccgactgttgcgcatggatgttggcgttgcgcatcattttttgctccgtcagcagtggctagggaggcgattccccggtgccgtgtgtttagattaggtgattgtaacttacaaaggcgtccatacatacacaccatccatgtatcccacggtaaatttcgaagactgtatgtataagtacatatttgttatacgatggtaaagacaaaagctatgtaggatttgcgtgctctcatgaaactatgatacgtggctataattacttccggttcccgctgaaatcgctagaattttccattgactacatt

SEQ ID NO: 9123 - DNA, 2961 bp, Zea Mays
gacgaactcttggttctcaagctttcccggccagtctcgcagcaaccctttccctaccccgatcgagcgtgcgtcaaggtcgggatccggcgccgccgcatcccgatccgatgctctccggcgtcgaccacgacgttcccgacggcatcgggatggcgcggctcgcgtggacgcgcctccccaccgccgacggggagggggcgggcccctccacttccgaggccgcggacgacgaactcttatcgggcgctgccatagagagcctcgactacgaggtcatcgagaactacgcgtaccgggaggagcaggcgcagcggagcaagttctgggtgccctactacgtcatgctcaagtggctgttcgctctgctgatcggcgttggtactggattagctgctatattcataaacctggctgttgagaacttctctggatggaaatatactgcgacatttgctataataaagcactcgtattttgtgggattctttgtgtacacagttttcaatttagccctggtcttctcttctgtatatatagtcacaaactttgctccagcagctgctggatctggtattccagagatcaaaggttacttaaatggagtggatacacatggaatcctccttttcaggacattagttgggaagatctttgggagcattggatcagttggaggtggattggctctagggaaagaagggcctcttgttcatactggggcctgcattgcttcgcttcttggacaaggtggatctgcaaagtaccacttgagttctaggtgggtacggatttttgaaagcgatcgtgataggcgagaccttgtgacatgtggatgtgcagctggagttgctgctgccttcagagctcctgttggtggggtactatttgccttggaggaagttacttcctggtggagaagtcatcttatgtggagagtattcttcacatctgccgtggtggccgttgtggtgcgttcagccatgaattggtgcaacagtggaaaatgcggtcattttggagctggaggttttataatatgggacatatctggaggtcaagaagattactcataccaggaattgtttcctatggcaattattggtgttatcggtggacttcttggggcattatttaatcaactcaccctctatataactaaatggcggcgaacgtgtcttcataagaaagggaaacgagtccaaatctttgaagcctgtcttatatctttggtaacatccacgatttcctttgtgttgccactactgaggaaatgcagcccatgccctaagttagaaactaattctggcatagaatgccctcatccacctggcacagatgggaattttgttaacttctattgttcacaagatagagagtacaatgatttagcaaccattttcttcaatactcaggatgatgcaatacgtaatcttttcagtgcaaaaacatttcatgaatacagtgcacaaagcctgatcactttcctggtcatgttttatttcttggctgttgtgacatttggaactgcagttccggctggccagttcgttcccggaataatgattggatctacatatggaaggcttgttggaatgtttgttgtcaagttctataagaaactaaacattgaggagggcacgtatgcactccttggtgctgcatcgtttcttggaggttcaatgagaatgactgtatctttatgtgttatcatggttgagattacaaacaacttgaaactcttgccattgatcatgcttgttcttctggtttctaaggcggttggtgacttttttaatgaagggttatatgaagagcaagcccgattaaggggcatccctttactggattccaggcctaagcaagtcatgagaaatatgaatgcaagggatgcgtgcaagaatcaaaaggttgtctgcctaccacgtgtttcaagggttgttgatatcatttctgttttgcgaactaacaagcataatggtttccctgttgttgaccgtgggcagaatggcgagtcacttgtcataggtctcatacttcgtagccacttattggtacttctacaagctaaagtagatttccagaacagtgctttcccctgtgggccaggcgtactgaacaggcacaattttagtgactttgttaaaccagcatcaagtaaaggaaagtcaattgatgatattcatttgacagaggatgaactggggttgtatttggatcttgccccatttttaaatccttcaccatacatagtgccagaggacatgtcgttggcgaaggtgtacaatctcttccgtcaacttggattgagacatatatttgttgttcctaggccttctcgtgttgtaggattgataaccagaaaagatttattacttgaggaggataacaacaatgtgatgccggagctccaatcgacgagtgtaaggggcttgctgaacggcaaaatgctcgggggtaatatacatctggaacgtcctcttcttgacaacctagttattgaatagacacgtagcagcatgtatgtcaaaataattttgatagctagcagttaaccttgcactgcatgttgggacatggcccatgggtattatacttcacatgaatgatgaagcagcagtgagcggataatgcagcatggttttggattctgccgactgttgcgcatggatgttggcgttgcgcatcattttttgctccgtcagcagtggctagggaggcgattccccggtgccgtgtgtttagattaggtgattgtaacttacaaaggcgtccatacatacacaccatccatgtatcccacggtaaatttcgaagactgtatgtataagtacatatttgttatacgatggtaaagacaaaagctatgtaggatttgcgtgctctcatgaaactatgatacgtggctataattacttccggttcccgctgaaatcgctagaattttccattgactacatt

SEQ ID NO: 9124 - DNA, 3512 bp, Zea Mays
gagtaaccaaaccaagcaccacgcgcggccatggccttccccgccgacgcgctggttctagagatcaccgacacatcatcctccgccaccgccgccgccgcccgtgctccatcctcaccttctcccccgccgctgtccatctccgacctcgcgctaatcgagagctcctcctacttccgcgcgctcctcggcggcagcttcagtgaatccggcagagagcatgtgcgtgtgggctgcaatttggaggctgctgtgcaagtgctgcgctacctttttgagccttccgagagctttaacatcacgcacaacaatttcctccccctgttggagggagctttgtttcttgctgttgagagccttctagtggagtgtcaaagatggttcggcaccatagcctctcaaacttctgccatgtcagttccattagatttcataattgaagtctggtactttgctgaagagcatggtgttacttttgttcaagacatttgccaaaaatttctagctcagaattttgtaggcacatgctatctcaggaaggtcatttaataaaataccttatgatttgctatgttcagcgatcaaatgtccacatctgacagtggatagtgaaaaacaattgtgtgaagcaattttgtattgggtttcagaaaatatgaaagcctgtgaacaatcaaaccccaactcagtagatggccacctcttcattcttagcaagcaggtgaagatatgccttttaccattaggatttgcggcagggacaatgaggcattggtttgactttggaaacaagatcatatgcactattcttgatcttctcaaagacagtttgaaaactttattggatgctgttgatgatggtaacttggatcgatattgcattcgaataacagaatattcaaagaacatagtgctttcaggatgtccccaagtaactacagcattcttgtacatatctgttctccctaatgatctgagtgtttcattgaagagaaggatagtgagttcatacacccaggttgatcatcaaaccttcgttctttatgaggaattagagaaggctactaaaaccttatcatttaagaatgtacacatggtggatatttcaaaatgtccaaacgttcattttggcgcagcaattgactggttgaagttgggttttccagaattaagggtattcagggtttcacattgtttatcatttcaatttgatgatttactatatctgttaatgagatgtccatggattgatgaaattgatatgactattgatacaagcactgtaacacccagacattcagtaatctcgtctagttctgaagtcctaagcaaggcaaaaccaaatcagaaaagatatggcatacattgttcagcatatgacaggcaaccaaattcggttttcttaaatatatcaagattgacattggaaggcagaaatgatattgatgatatggacttgttggagatatctgtcctgaaaaattctctgtgctatataaacattagaaactgcttcctgttgacggatgatggtatttctaaccttctgatgaagtgtacaaagatccattcgatggttctttcttatacttcttttggaaatcgatcaattcaaatgctatgcgctgccaatccttctggccacaacagtggacatgctcatgttatggcatcttatatgcaagaattacatctggatggctgcaaagctagtgagcattataagtatcacaaagtttttgagcttaagggaaacatcacttacagatggtgcactctgcaagtttgttggctctagtctggagtatcttgacgtttcagagactgtggtgcgatactgattatgtaatttagttttgtgcttctaataatcaagcactacaattgaccaattgatgaaacattcatactggaacattcactgagctaggagactattgatgagtaatacatagtgtgctgggggctattatttctattatctggttgatatgttatactcctatactgtaggcagggtatagacgtatattgtgttcatgaacttttctgctactttattttagtatgacagctatcacttttttatcttcgctacctccagagggcaaaccccaaaagtttatgattatgtttttatttttgcataccatattagagtgcttaattctttttttctgtccattgacttgcagatttctatggtatcattagcaccagttattcaaagaaactgtaaattgaactgtctgaaaacagctggatgctgtagtcttctgttgcaatgtgctaatgtagaacatatcaatggtaacaagtatggagattttctacaggagttaggaactacctactgtctggaggatgttgaaatgggctggggattttgccctattcgaatcgaagaccttgttccttcttttagtaaagtaaggaagatgaaaattggtctcggcacatcattagcggagaatgttctgtgtgctcttcctatgatttgcccattcctcgagtctttgattctaaggtttcaggtgatatctgacagagttgttagacgtctattggaatcagcaacaaatcttcaggtgctttgcctgcactattgtcttggaagtttaacttcatttagtttccaaacaaaggcacctgcattaagagtattgcggcttcattgggtaacttcatggcttacaaatgatgacttgacaatccttacagagaattgcaatttggctgaactttcactttctggttgcaaacttcttgactccagctctcaagacattatctcatctgggtggccaaacttggcacttttacaccttgaggaatgtggtaaagtaactgttgaaggggtttcttcttttttcaactgtaaggctttggaagacgtcctactacggcacacgggtaggggcatcggaaggagcatcatagacgatgctatcagagagttaccactactgcggaagctggctttggatctttgcgatgcctgtgaagacggttacgatagcccaaacgatgcggaagggaagatgattagaagtgtaaggatgagtcgatgcaagaagatggcggggtcgtgtttggaggtccccagacaagggtcttcaacttcaaggccggtgcacaaggacactgtagtgctggaatggagcagcagaatgttcacaaccaccatagtgaaagaaagagtgtgatgagcctcttctgtagttttgtccctgatgaagaacacaagagcaggccacaatatatatgacttgtatgaatggtctccccgcttctgattttgaatgctttgtatgtggacatatcctcgtgtgtgaatgtatttgtatggtatcaaacgaagatcatcttttgcagtcgtactgtacccatgcactcttatgttgatccacgaacaaagtttggaatttttaggtgaccgtgttcatgtttgaaaattattgttgtactagtccttggtaaaataaaggaggcaaggcaggagccaaaaaaaa

SEQ ID NO: 9125 - DNA, 3931 bp, Zea Mays
gttttttttagcttccggaaacagtccatctctcgtccttgacagagtaaccaaaccaagcaccacgcgcggccatggccttccccgccgacgcgctggttctagagatcaccgacacatcatcctccgccaccgccgccgccgcccgtgctccatcctcaccttctcccccgccgctgtccatctccgacctcgcgctaatcgagagctcctcctacttccgcgcgctcctcggcggcagcttcagtgaatccggcagagagcatgtgcgtgtgggctgcaatttggaggctgctgtgcaagtgctgcgctacctttttgagccttccgagagctttaacatcacgcacaacaatttcctccccctgttggagggagctttgtttcttgctgttgagagccttctagtggagtgtcaaagatggttcggcaccatagcctctcaaacttctgccatgtcagttccattagatttcataattgaagtctggtactttgctgaagagcatggtgttacttttgttcaagacatttgccaaaaatttctagctcagaattttgtaggcacatgctatctcaggaaggtcatttaataaaataccttatgatttgctatgttcagcgatcaaatgtccacatctgacagtggatagtgaaaaacaattgtgtgaagcaattttgtattgggtttcagaaaatatgaaagcctgtgaacaatcaaaccccaactcagtagatggccacctcttcattcttagcaaggtgaagatatgccttttaccattaggatttgcggcagggacaatgaggcattggtttgactttggaaacaagatcatatgcactattcttgatcttctcaaagacagtttgaaaactttattggatgctgttgatgatggtaacttggatcgatattgcattcgaataacagaatattcaaagaacatagtgctttcaggatgtccccaagtaactacagcattcttgtacatatctgttctccctaatgatctgagtgtttcattgaagagaaggatagtgagttcatacacccaggttgatcatcaaaccttcgttctttatgaggaattagagaaggctactaaaaccttatcatttaagaatgtacacatggtggatatttcaaaatgtccaaacgttcattttggcgcagcaattgactggttgaagttgggttttccagaattaagggtattcagggtttcacattgtttatcatttcaatttgatgatttactatatctgttaatgagatgtccatggattgatgaaattgatatgactattgatacaagcactgtaacacccagacattcagtaatctcgtctagttctgaagtcctaagcaaggcaaaaccaaatcagaaaagatatggcatacattgttcagcatatgacaggcaaccaaattcggttttcttaaatatatcaagattgacattggaaggcagaaatgatattgatggtaattgaaaagttttatacttattatgtcttgctttgcagctgtgtgtattgttattaccttaccaagctagtgacttcattgttagcgcgtgtgcagatatggacttgttggagatatctgtcctgaaaaattctctgtgctatataaacattagaaactgcttcctgttgacggatgatggtatttctaaccttctgatgaagtgtacaaagatccattcgatggttctttcttatacttcttttggaaatcgatcaattcaaatgctatgcgctgccaatccttctggccacaacagtggacatgctcatgttatggcatcttatatgcaagaattacatctggatggctgcaaaggtattgactctgttgctttgtcgcagctagtgagcattataagtatcacaaagtttttgagcttaagggaaacatcacttacagatggtgcactctgcaagtttgttggctctagtctggagtatcttgacgtttcagagactgtggtgcgatactgattatgtaatttagttttgtgcttctaataatcaagcactacaattgaccaattgatgaaacattcatactggaacattcactgagctaggagactattgatgagtaatacatagtgtgctgggggctattatttctattatctggttgatatgttatactcctatactgtaggcagggtatagacgtatattgtgttcatgaacttttctgctactttattttagtatgacagctatcacttttttatcttcgctacctccagagggcaaaccccaaaagtttatgattatgtttttatttttgcataccatattagagtgcttaattctttttttctgtccattgacttgcagatttctatggtatcattagcaccagttattcaaagaaactgtaaattgaactgtctgaaaacagctggatgctgtagtcttctgttgcaatgtgctaatgtagaacatatcaatggtaacaagtatggagattttctacaggagttaggaactacctactgtctggaggatgttgaaatgggctggggattttgccctattcgaatcgaagaccttgttccttcttttagtaaagtaaggaagatgaaaattggtctcggcacatcattagcggagaatgttctgtgtgctcttcctatgatttgcccattcctcgagtctttgattctaaggtttcaggtgatatctgacagagttgttagacgtctattggaatcagcaacaaatcttcaggtgctttgcctgcactattgtcttggaagtttaacttcatttagtttccaaacaaaggcacctgcattaagagtattgcggcttcattgggtaacttcatggcttacaaatgatgacttgacaatccttacagagaattgcaatttggctgaactttcactttctggttgcaaacttcttgactccagctctcaagacattatctcatctgggtggccaaacttggcacttttacaccttgaggaatgtggtaaagtaactgttgaaggggtttcttcttttttcaactgtaaggctttggaagacgtcctactacggcacacggtgagtatgaaaaatatcgtagcaggttcttggtatatagttctggtgaatcttaaaacacaacgtagaaccatactaaatgacgtgacatggctacagctgaaacaaaatttcaccatgctgttgcaaaattgcagtccatctgtgcatgtcatttccaggacttctaccggtgtaacttttctccgttgaaaaagttgaattgttgattcacttgattggttatatagtttctgagagttgggaaccgcagggtaggggcatcggaaggagcatcatagacgatgctatcagagagttaccactactgcggaagctggctttggatctttgcgatgcctgtgaagacggttacgatagcccaaacgatgcggaagggaagatgattagaagtgtaaggatgagtcgatgcaagaagatggcggggtcgtgtttggaggtccccagacaagggtcttcaacttcaaggccggtgcacaaggacactgtagtgctggaatggagcagcagaatgttcacaaccaccatagtgaaagaaagagtgtgatgagcctcttctgtagttttgtccctgatgaagaacacaagagcaggccacaatatatatgacttgtatgaatggtctccccgcttctgattttgaatgctttgtatgtggacatatcctcgtgtgtgaatgtatttgtatggtatcaaacgaagatcatcttttgcagtcgtactgtacccatgcactcttatgttgatccacgaacaaagtttggaatttttaggtgaccgtgttcatgtttgaaaattattgttgtactagtccttggtaaaataaaggaggcaaggcaggagccaaaaaaaa

SEQ ID NO: 9126 - DNA, 2862 bp, Zea Mays
atgacctcgccgcagcccactaagctattgccgtcagtcctcctcgtccggcacctgacactctccttctccttaactgccttcagctggacgcctggaccagagggaaggctcacagccgccgcagggtgccagggcgttagggccttagggcaaagcatagcaacggcggctgcgcagcaagcagttcagctcagcacctcgccggacgccggctcacccatccggccatcccctgccggccgactctccctggtccccagcgcagcaagcagttcaccggagccggcgcagcaagtagtcaggcaagtctccatttccagatctcaacacaggtacaggtatcgtgtatacatgtatcatcgtgtagtattccatgtactgagtattatgtttatcaattataaattagtatgtactgagtatactagtattccatggcatacatgtaccgtgctctctcctatctagaaaaaaaagattaggacatttcaactcgtattatgtttatcaattataaattagttcctgttttctcagtgttcatgtactgtgttcaggaggcttttgtagatttgtttgtgtttagcaattagtccctattgcaggttgattaacaaggtttgggtttgggagcacttcacaaggtatgaggtagaggttcaggaagctgatggttctattgttaagcaaaagtgggctaaatgcctaagatgttcacataaagctaaggcatatagttataatggcacaaaggcttttagtaaccatttaaggatgaagcatcaagttttgaaaggtcaacaaatgcttagtcagagtggggatgccatagcaacatataaatatgatgagaatgctagtgtgagacttttatattatgccattatcatgcatgagtatccgtttagtattgctcaacataggtactttgtgaaattcatcaaatcattaagaccatcatttccttcgaagtctcgtgttactgtttgtaaagagatcatggaactttataaggaggaaaagaatctactgtatgcacaattcaataaactatcatgtcgtgttagttttactatggatacttggacatctattcagaacaagtcatatttgtgtgttactgcacattggattgatgatcattggaaaatgcaaaaaaggattatcaactttatgcatgtagaaggcagccatggaggaataaaattgagcgatacattttttgcaaatgtgttgaattggaacctagataagaaaatgtttgctctttctttggataatgctgctgcaaacaaggtagccgttgagatagtgattgaaaatgctaaagagttgcttgtatgtgatggaaaattctttcatgttagatgtgcaaatcatatattgaatctagttgctagagatggattatcatgccttggaaatgtcattggaaacattagacaatttgtaacaattatcaaaaggtcacctttgcagttggaggcatttgagaaatgtgctaaagaatgtggtctagaccctaaaaagaccctttccttggatgttgctactagatggaactctacatatatcatgattagagatgccatttactataagaatgcttttgatcgtctggctaaaaaagataaggacaaatatggtcacatcaatccttcaagcactgattggttgaatgcaacaaatattagcaagtgtttgaaaaaattctatgatgtcacattgcttttttccggtacttcatatcctactgcaaatcatttctttcggaagttttctgagattaagatggctattgcaagatggtgtgatagtagtgatctggtaatttgcacaatggcattttctatgagacacaagtttgataaatattgggaaatgaacaatttagctttggcagtgggagcatttcttgatcctagatacaaacataggatgattgagctatatatgtctaagatgtatggcagtgataaagccgagttagagaaattagtattcatgaatgttatcaatgaattatttgcatattattcagcagtcatcaatgcaaaatcaaccacaaaaggttctagttcaagagagagtgagtttgttccacataaaaatacttgtttggtggatgaggaggaggatgaggttgatcttgatgagttgtatgcaacaacaagcaatgacaagaaggtgtcagagttagatttgtatatgagcgaggacctagtgaaggtcaatgacaatgaagcaacatttgatatcctatcatggtggaaagggcaagtcacaaattttcctattctttctacccttgctcgtgatgtgttgtctatgcaagtgtctactgttgcttcagagtctgcatttagttcgggtggacgcattgttgatgcattccgttcaagactcaaaccagaatttattgaggcattggtttgttgtaaagattggaagattgcttcggagaaagatttggagattgaaattaaaaccttaagtgaacctatgaatgacgttgacttggaggatgctgctgcaattggaacttgagaagttaaagttcaagttaccatggatgatgttgaacttgttacttattgttgtaatgttgtggagcggaggtttgctggttgtttggttgttgcaactttattttcttatttgcacttcttcacttgaacatgttaattaatgtcaactatctactatttgttatatacttgtggatttgtggattatgcctaaaataggggaaatgctgccgaatttttttaatattagtaactttgaactgcatgatgttaattttataggtttcttttcctacatttgatctattatatacatgcttatgtattgctt

SEQ ID NO: 9127 - DNA, 1641 bp, Zea Mays
tctcacatcttcctttccttccctttcccctcctctctcacgggcttctctctcacatctcgtcatgccgcatcgtcccacgcgtccctccttccgtggtctcaccggcgaccccctcagcacagcaccttgcccggccggctgcccctccgcagtgccttggccccatcgttgcccgagctgcatctcccgcaccctcgtcgcctgagccgccactgtgccttggccccacgagccgtcatgcctagccccgtgtgcagccgtgctcctagtccgtcgtcgtgccttggccctacgtgccgctgtgcctggctcgcgcctgcctgtattcgccaaccactacggcgaagactagtggttgcttgagatcagcgctggttgcctcgtgtgaaggatgttgatgtcgaatggattggctaggcgggcgttaacctaccagactgatacactgttgctcttattattaggcactagcatagctaaaggctctaggcaaccgtttgtcatggagacagtgaaagatgatgatgctgcaaaactgggtttgatatcaggtaaacatctgctattcgacacttctgtaatagtaagcagaaaggagcaagtcctcattttttatatgtgcaatgttgctttcatgctacacgagaggggtgaatgctagttataaaacaatggattatttgacataatgtagatgagattttcgcaactattcttatgtactgcaatatttgaaataaacagcccttgcaagatgttagggtcctcctaaaacatatgaatgaccattggattagtctaacattactctttaggcttcctagaccatgtaagcagtctttcacaagtccacgatgactttatttaaacatggagttagcacacataggtagagatagtaatggagtggtagttgttaattcttgaactattgaatttggcaaggacatcggttattgaatttggcaagcaaagatttatccctgatttggcaaggacatgttgcagaaatttacatggcgtccgttttcccatattactatactggtaaactaaagctacaaaaatggaggcaagcatattaactcgtttaatgccacgttcacaagtgatatcctagaactttagttttaaatgttaccggtgccagcttccaatgtttattatacttgtttgcatattgatatatttgttcaagttcttcaagctgatggtggtaagtgtgctaccttcctactttcaagcttacaaccttgtttaaatggaattgttttgcgcatgaggtctgcttttggaaacatcttcagtgctaatttgagacaagctcctgcaaggcaagctgcactgggcacagggatactaaacactgttgtttgtgctttttatgattgaggaatacttgaagaagagtacttgtggtctttatcttgtgctgagatgcatgttctttacctaccgaacatcagacccctccagctaccttgctgacgcgtgaacgagaagacgggttagactttgtcgaaaccctcttcgctagtggaggtatcgaccatcactcgtcactgtaccccgatggtgatcgacgatcatgagcttccatattatgtgttgtgatacttgagacttttattatgacta

SEQ ID NO: 9128 - DNA, 525 bp, Zea Mays
ctcaaagacgtcctttcgcagttggcacacatcagagtcctaccaagtggcaccaaagctcgttctcccgaccccgactgtccccaatgcgcagtccgcgaggcctcctcaccgcctccggctaccttgcgggccggcacgctccgtcgccctccgtgtccaccactggccacaactccctactcgctcgcaccttccaaatcctagcccagccggagtccgtccgtctgcagaagcacccggcacccaactccgggatcttagagctgaggctggagcggccggaagtcaagaacgccattaattgggatatgatgaggatgctgcggagcgccatagagaagattcaggccgacacgacggcgaaggtcgtccttgttgcgagctccgtgccgggggctttctctgcaggcgccgatctcaagattcaattgttaaaaggaaaaggaatggttggagtgctgtgaagtggagtgcggaaaagaaagactcgtggctaaaaaagccagcacatagaagagtcag

SEQ ID NO: 9129 - DNA, 1233 bp, Zea Mays
ctcaaagacgtcctttcgcagttggcacacatcagagtcctaccaagtggcaccaaagctcgttctcccgaccccgactgtccccaatgcgcagtccgcgaggcctcctcaccgcctccggctaccttgcgggccggcacgctccgtcgccctccgtgtccaccactggccacaactccctactcgctcgcaccttccaaatcctagcccagccggagtccgtccgtctgcagaagcacccggcacccaactccgggatcttagagctgaggctggagcggccggaagtcaagaacgccattaattgggatatgatgaggatgctgcggagcgccatagagaagattcaggccgacacgacggcgaaggtcgtccttgttgcgagctccgtgccgggggctttctctgcaggcgccgatctcaaggcacttcctattccaacaattgctgtcattgaaggagctgcccttggtggtgggctagaactggctttggcgtgcgatcttcgaatatgtggagaaaatgctgaacttggactgccagaaacaagccttgctattatacctggagctggtggtacgcaacgccttcctaggatcatagggaggtccagagcaaaggaactgatattcactggccgcagatgtggtgcagctgaagctgtaacgatggggttagcaaactattgtgttccagcaggagaggcttaccagaaggctcttgacattgcctgtgagataacccagaagggtcccatggggataagaatggcaaagaaggcgatcaatgagggggcagaggttgccgacatgtcctcggcgctggctatcgaaggggagtgctacgagcagctgctttacacgcaggatcgcgttgaggccctagctgcatttgctgagaagaggaagcctgtgtacacaggaaagtagtagtgtcagaaaggatgataatcgtcttgagagtctgctacaagcagagatggtggcaatggataccccaaatccatacatccaatagccgggtgtggaataaattctttatcatagatacgttaatgggtacaatattatacccatcagtagacgggtgcaagatggatgcgggtatagatatatattagctatctatgggtaatttttacccacctcatctatatatataatctactcaattaagtacatataaatatatattagctaaaaataaaatcaacttacatatctctacaacact

SEQ ID NO: 9130 - DNA, 1299 bp, Zea Mays
ctcaaagacgtcctttcgcagttggcacacatcagagtcctaccaagtggcaccaaagctcgttctcccgaccccgactgtccccaatgcgcagtccgcgaggcctcctcaccgcctccggctaccttgcgggccggcacgctccgtcgccctccgtgtccaccactggccacaactccctactcgctcgcaccttccaaatcctagcccagccggagtccgtccgtctgcagaagcacccggcacccaactccgagctgaggctggagcggccggaagtcaagaacgccattaattgggatatgatgaggatgctgcggagcgccatagagaagattcaggccgacacgacggcgaaggtcgtccttgttgcgagctccgtgccgggggctttctctgcaggcgccgatctcaaggaaaggaggctaatgagttcttctgacgttggggggtatgctagatccttgaggtctacattttcgtcttttgaggcacttcctattccaacaattgctgtcattgaaggagctgcccttggtggtgggctagaactggctttggcgtgcgatcttcgaatatgtggagaaaatgctgaacttggactgccagaaacaagccttgctattatacctggagctggtggtacgcaacgccttcctaggatcatagggaggtccagagcaaaggaactgatattcactggccgcagatgtggtgcagctgaagctgtaacgatggggttagcaaactattgtgttccagcaggagaggcttaccagaaggctcttgacattgcctgtgagataacccagaagggtcccatggggataagaatggcaaagaaggcgatcaatgagggggcagaggttgccgacatgtcctcggcgctggctatcgaaggggagtgctacgagcagctgctttacacgcaggatcgcgttgaggccctagctgcatttgctgagaagaggaagcctgtgtacacaggaaagtagtagtgtcagaaaggatgataatcgtcttgagagtctgctacaagcagagatggtggcaatggataccccaaatccatacatccaatagccgggtgtggaataaattctttatcatagatacgttaatgggtacaatattatacccatcagtagacgggtgcaagatggatgcgggtatagatatatattagctatctatgggtaatttttacccacctcatctatatatataatctactcaattaagtacatataaatatatattagctaaaaataaaatcaacttacatatctctacaacact

SEQ ID NO: 9131 - DNA, 6282 bp, Zea Mays
cgcacgttcgccgtccgcgccttcggcttccgcagttcgcacagctgacagcagtccattcaccgtccgcgcctccggtcaccgcacagtacgacgcgcttccgaggaggttagagcgttggctgctatggcgccgcctcgcgtcaccaggaagaaggggaagggcgccggcggcaagaccgacctgcgtcccgaccggaagcagttcaaaaggcaccacaaggaggatgcagccgctgagcagggggatggcaacggagagcggcagcagtcggcagcgccgggttctgcagcgctcctcgccgcagcttctgacgaagctgactttccaagagggggacacagcctcctgagcaaggatgagatggcggaggctcgtgcggaggcggagcaggatttcgagagggaggcgaagaaggggaagggaaaaaggaagaggagtggcggcgagtcgtctggttttggcgtggatgacgacttggggatactcttcggtggggccaccactgggaagctcccacgctttgctaatcgcatcacagtaaaggttggagacagcgaaatcaagataacagcagcagaagcaagcagggctagaagcaaaattgaatggtccagcagcggaatcgagggcttgttttggacagtttcagttgctagaatatggtacaagttatgcacctcgatgcacattaagattaagaatatttcaccaaatatgaagctctggggtgttgtaattgaggttaaccagaaagatattgtgttaagtctacctggtggaattagaggctttgttcgctcagaggatgtttgcgacattgctttgcaggaaaatcgtaaggatagtgggaacaatttatgcgcagaagttgttcatgttggtcagcttgttccttgtatagtcctacgagtcgacgatgatagtagagaaggaaaagtaaacaaacgggtttggctatcattgcgattaagcctattgtacaagggacttgccctggatggcttgcaggaaggaatggtacttactgcccaagtcaaaagcatcgaggatcatggttacattcttcattttggagtatcttcctttagcggatttatgcagaaggatgacaaagaagatgtgaagactgagcgccgacaactgatgcaatgtgttgtgaaggcgattgacaaaactcgggccattgttcacttgagttctgatgaagacttgctttctaaatctactattaaggatctgaaaggcctttctattgatcatttgattcctgggatgatggttaatgcacgtgtccattcatttcttgaaaatggactcatgttatcatttcttacttatttcagtggaacagttgatatttttaatttgttgaattccttcccctctggtaattggaaagatgattacagtaagaataagaaggtaaatgctcgcatcctgttcgttgatccatcaacaagagcagttgggcttacattgaacaaacatttacttcatcttgaagtaccccctattaatctaaaagctggagatatctacgataaatcaaaggtgctgagggtagataaaaaggccggtctctttcttgaaataccttctccaactccatcacctggatttattagtatacgtgatgtgtcagacaaggatgcaaaaaacttggagaagttcaaggaaggcagtagcttacgtgtccgtatacttggagtgcggaatcttgaaggagttgcaataggcaccataaaagacagtgcttttgaagggtctgttttcactcatgatgatgttaaacctggaatgttagtgagagctaaggttgctactgttgagccattcggtgctattgtacagttttcaagtggcgtgaaagcactttgtccgcttcctcacatgtcagagttggaacatgttgttaaaccaccaaagaaatttaaggttggagctgagcttcttttccgtgtgttgggctgcaaatccaagagagttacagtgacatacaagaagtctctggtgaaatcaaaacttgatgtgctttcatcatatgctgatgcaaaaattggtttagtgactcatggatggattactcatattgaaaagcacggttgctttgtaaaattctacaatggagttcaaggttttgttagcagatctgaccttggattagaggctggaactgaagcagaaaatgtttatcatgttggccaagtggtcaaatgtagaattatcaatgtgatccctgcttcaaggaaactaaatgttagttttgtcatatcccataataggattgctccaatagacactccaaagttgggcagtattgtctctggtgttgtggaacggcttactcctgcagctgttgttgttagtgtaaatggcttctccaaggggacaatactgaatgaacatttggcagaccatcatggtcaagctgctcagttgaagaatgtgttgaaacctgggcacgagttcaaccaactcttagttctcgatactgaaggtcaaaatttagttctttcggcaaagcactcacttataaattgtgcaaatgacattccttcagagatatcacagatgcatcctggtgttgtagttcatggttacatctgcaacattattgaagctggttgttttgtccgtttcctcggacatttgactggtttctctcccaaggacaaagcagttgataggtggatagaaaagctttctgatgcgttctatgttggccagtcagttcggagtcatatactcagcgtaaatgcagaaactgctagagtaaaactcgcacttcaacagtcaatgtgctcctcaatggattcttcatttattcagggatactttcttctggatcagaagattgcagcattgaagtactcaagcaatgactgggctcgccattttggcattggtagcttagttgaggcggaggtgggagctatagaagaatatggtattatccttaacttcaaagaccatctggatactgttggtttaatcgagcaccatcaacttggtggcagtagtgtggaagtgggatcttctgtgaagggtcttgttttggatttatctgatggagttgttaacttgtccgtcaaaccagagctaattgacagtgtcagaattgttggaaaaaagaagaaacgccaaagggccgtagttgcagacttggagcttcatgaggaagtgaatgcagtcgtggaaataatcaaagacagctatatggtcctttccatccctgagtacaattatgcaattgggttttcaccactgatggattataactcacaactgcttccccaccaccactatgataatggacaacgcattactgtggttgttggaaatatcccaagttctgactcttctggaagacttatcttactaccaaaagcttcagcacagtattcttccctctctgattctaaaagggctaagaagaaatcaggctacaaaattgggtcacttgttgaagcagagattattgatatcaaaccgcttgagcttctactgaaatttggtggcaatcttcatggaagaatccatattactgagattcttgaagaggattctgctgagcatccctttagtgaactcagaatagggcaaaagcttactgccagaattgtttcagaggctgaaccttctggaaagagtggcaaaaaattcaaatgggaattgtctattaggccatgtatagtcaatggagagtttgctcaaaaagaacaaaatcacaccacaaatgggattgtacgtgcttatgttgtcaaggtggataaggaatgggtctggttaactgtatcaagaaatgttatggctcatttatttttacttgatagttcttccgagcccagcgaactgaaagaattccagcagcgctttagtgttggccaagcagtgaaaggtcgtgttatcagtgtgaaccaggagaaaaggttacttcggttgaaggcacttgataaccaatgcacacaaccgaatatagatgaaacacaagaaccaaagtcctctgtgtttggacaaacaaaacaaggagatatcattggtggacgtgttcaaaaaattctacctggtgttggtgggctcgtcgttcagattggacctcatctccatgggagggttcattatactgaaattgttgactcttgggtgtctgaacccttgtctggattccatgagggccagtttgtgaagtgcaaggtcctgtctgtgagccgctcatcagaaggatcacttcgagttgatctatcactccgttcatcaaacctgatcagagactctaacaactcaagactagatgatctggaaacctgtacctcccggattgagaagatcaaggatctgctccctggaactgagattaagggctatgtgaagaacgtgaattccaaaggatgttttattatgctttctcgaatggttgatgctaggattactctatcaaatttatcagatgaatatgttgaaaatccacagaaggatttccccgttggaatgcttgtacacggaaggatcctgtctacagacccatcatcagggagagttgaggcatcacttaggaagaccactggttcaaaattggaaaagctggatgatattagttatagtgacttgcatgttggggatatcgttgatggccaagttaagcgggtggaatcctttggattattcgttacaattcggagaagtgaattggttggtctgtgccatgtatcagaactttctgatgaacctgtcgttgatattaactcttgctataaagctggtgatatggttaaagccaaaattctgaagattgatgagacgcggcatcgagtatcacttggaatgaagaagtcatactttgattctgatctgactgctgacacaaatgatgatgaaagtgctcttatggacatcagcgttgcccctcagatggttgaatatcataacagaaatttagttcaccgcaaagcagaaccaagggcttctgttctgcctcttcaggtttccttggatgaatcggaaggttccgacctagaggataatattagtaatacatgtcttgaaattgctaatggaactgaagcaaatgctaaaaagagtgataaacagttaaagaaggaagcaagaaaacaaagggaactagaaatcagtgctatggaggaaagggctttgcaggaagatataccacaaactccagatgattttgagaagttagttaggagctccccaaatagtagttttatctggataaagtatatggcaactttgttagatcttgcagatgttgagaaagcacgtgcagtagctgagagggctttaaaaacaataatccccagagaagaagaagagaaactaaatgtttgggtagcatatttcaatctggaaaatgaatacggtagtccaagggaggatgctgtgaaaaaggtattccaaagagccttgcaatattgtgatcccaaaaagctgcacttggctcttcttgcgatgtacgagaggaccgaacagtatgagcttgcagatgaacttctagacagaatgaccaaaaggttcaaaacttcctgcaagatatggttatgccgcattcagtttgctctcaagcaagaattcaaatgtggggtgcctgaagaaggaagatccagatttgaactaatattgcgggagtacccaaaaagaacagacctttggagtgtttatctagaccaagaaatccgccttggtgacgtagaagttatacgggcattgtttgagagggtgacttgtctgaccctacctccaaaaaagatgcagttcttgttcaagaagtatcttaatttcgagaagtcactgggtaaagacaacgaaagaattcagcttgtgcaacagaaggcaatcgaatatgttcagagttcactgccgtcacaagacaactcttgaactacatggagacttaataagcccacaaacaatcattaggaaataccagtcgtactgtagatgtgatctctttgatgactccttgaacattattgtgaaaaggtcaatgtaaaatgtgggctgttcaaaattttgtttgaaacctttatataagttatgagtctagtatgtcatgtttcacccaattttttggaaggaactattctaagccggatctggttcgaatattgaccttttctatctgtggtattgactgatgaggcacaattgaatgggtaactgtctgtgctactctgtcacacccgggtttcggacaccaagacacgggcgcgaacataatcacctggtgttgctgggatcaggtcttacacatatgatgaatcatg

SEQ ID NO: 9132 - DNA, 1207 bp, Zea Mays
aaaagactctcgcgaaggagcaagccaccagaactttttaggcaccaggtgaggctgaagcacagtgtgcagcactttgtgaaaatcaccaggtttatgctgtagcttcagaggacatggacacactgacttttggtgcccgaaggtttcttcgtcacttaactgaccttggttataagaaatctcctgtgacagaatttgatgtgtcaaaggttttggaagaacttggactcacgatggatcagttcattgacttgtgtatccttagtggatgtgattactgtgagaatattagaggtatcggaggacaaagagccttgaaactcattcgtcagcatggttgcatagaagaagttctgcaaaatctgaaccagacgagattcagtgttccagaagactggccttaccaggaagttcggacattgtttaaggaacctaatgtttgtgcaggaattccagatttcacgtggacctcaccagatccagagggccttatggatttcttgtcaacagaaaacagtttcagtcctgatagagtaacaaaggcagtagaaaagataaaggttgctagggataggtattccccaggcagaatgaagcatttaacaccagttgctagcttacgaggatctcatactgagaaggaaccccagtgcatactaggttctccaggacaaactctgaaggtcatgtcatctccacaagtatgcaagagtccaagctctggtttcagatatggtagctcaaagccatttatgctgggcagacagtcaggatttcatggaatgccttatgctctctcttttatctaaaatctgtagctgctctggtttatgagaaggttgaccgaagctgtagctgcggctacatttttagatgatggaaaccgatatccggctttcacctcactgggaggatatggccaagtagctgtagctgcagctacatgaaaggatgctcacttataatatgttaatctcgtgctactattgtaatctttccatttctattgtaacgtagttaatcagctactgcagttcatcgttgacatctaatgctggttgctgctacaccggttgaccttaccttttgtcaatatattctgagttttcgggatggtgtttttaaacctatgctgagagggtaaactggcagaaatgtcctcgactttcatgtgatggcattgtatgcatcgtgtgcttaccac

SEQ ID NO: 9133 - DNA, 6392 bp, Zea Mays
ccgccggagacggcggcgacgccgacggcggtcggaagcgcaagggaatggcgctgttccggaggctcttctatcggaagccgccggatcggctcctcgagatagccgaccgcgtctacgtattcgattgttgcttctcaacagaaaccatggaccaatacagatacaagaattacctggacaacattattttgcagctccgtgaacagtttgcagattcttcattgatggtacttaactttagagatgaaggaaaaagtcttatttcaggcattttctccaagtacaatattacagccaaagactacccttgcaagtatctaggatgcccgttacttcctttggatatcattctccacttcctaaggctgagtgaaaggtggcttatgcttgaagggcagcaaaatattttactaatgcactgtgagaaagatggatggccagtgttggcatttatgcttgcaggtcttcttctgtacaggaaacaatataatggggagcaaagaactctagatatggtgtacaagcaagccccaaaggagcttcttcagatgctaaccacattgaatccacaaccgtctcatcttcggtatcttgggtacatatgcagaatggatgacggcataggatggcctacacaacctattcctttcaccttggattgtgtaattcttagagaaattccaaattttgatggagtcggtggttgtcggccaattgttcgagtatatgggcaggatattccaacaactgacagaagtcatagtgtcatttcaccaccatcaaaggccaagaaacatattaggcgttacagacaggcagataatgcgccagtgaagttaaatgtaggatcctgcgtccaaggtgatgtcgtccttgaatgtctgcatgtggatgatggccaaggaaatgaaaggttaatgtttagggtgatgttcaatacctttttcatccagtctcacattttaccgttgaactttgaggacatcgatgtcccttgggatgccgatcaccagttcacaaagaacttcaaagcagaggtactcttttcagagtttgatgctgagtctgatgcgtcaactgaagtagcacctgattatgattatgattatgactatgataatgatatggatgttgcctctgctgatgagttctttgaagcagaagaaatcttcagtaatgctgaatctcaagatggaaataaggatgcggatactctttctatggtctctacagattatattcgaactccaagtgccgaatgttggaaaaactctccattttccaactttgatctgaatattgacattgatggatcacaagacaataaagccgataacttgggcttgttgttagaaacagtaaatgatggaaagacatgcacatccactgaagccaatattttgctcaacaatgagactgcagttgtgaagtcaacttttaccgctacaatagcatgcacatccactgaagccaatattttgctcaacgatgagactgcagttgtgaagtcaacttttacagctacaatagatggagacacagatagcggcatctcaagttctacctataaagaggatgggtgcatgtttgaaaagggtagttccaagcaggatataaggatgggttccaatcaagacttgagccagattgataatgtattggttaaggaggtgattatattagaaactaatagtactgatgacatacagatgatcaaagaggtcatcatatctgaagttacaactcccaaacaagtggtagaggggaatatgatggaaactgaattagatgaggcagtccacagttcagaaagcactgcactgggagaagacgaggacacaaaacgacctaatacttttttcaaaaaagatgagggacagagtgcacgagatgaatatgctgcttatgacaatggcatagtgattgaacgggaagaaagtcgcaacaaagaaaaatttaccatcacaggcacagattcactagtggctgagcccaaagatttaccacatcttgacagctcaaacacttctttggaactaagttcagccaatgaaaatattgatcagcttcgtgcttgcagtagtaatgtcactgcagagcgaagagcaggaattgacacatcattttccagctccaggagtcagtcttctaatatctcttgtgcgaacattctaccagaagaatctaacttgataataaaccatgcttcaacttctgtgaatgcaaatacagatacaaccgattcatctcgactggtgctaaagaaaaaaccttttctaccattggcgacatctagtcttttttctccatcatctcccagacgcaatctgcttcgtgctgcatccacagatttgtcctttttttctccatcacaaacagaatctaagcagaactccgttacttctacaagtggaaggggtgattcagatacatcttctgtgcttccaccatttcagctctacacatccctgggatcatcatccaaaatgtctctagtacatcctactctgcgaccaataagaacgatttcatctctaccatcattatcatttggcacattcatagagatgtcaatggcttcttcaagatcacccaaacaccaagagcatgttagatctccctcaataccacaagatcaacatcttcacccaccaatgacagaggaaaatgatctacattcaggtagcttaactttgcctgcttccaaccaatatggccctcaaaccccacacccacctccactaccacccccacatgattcttgcacccaaagttattcgagcaccataatatatgaacctgaacaaataagagctgatggatcttgttcctatagtccagattatagacaaagtgttctcaacttaggtgattcctcactaacttcactctctaatagtagtatagctgcaactgaatgtcccttaggagcctctgattttgtagatgaggaagtaacaagtagacctaatatagtaactgccatggatgtcccatttaccaatgaagatacaaattctttgttgcacatgacttgttcttcacctcccaaaacattacaacgtgctgaaccaccaacgctgccgccaccacctttgcctctagtaccaccaccatcacaactaccactgccaactatatgcagtgatagtggatcagttccactggtatactcaaatccgtcttcagattgtccatataaagaaccaacaatgctaccagaacacaaatctgatgttccagctacttctctcgaaggacatgaagcaagtgaagttcaatttctgcaatctgatactgctgtcgaattatctccatcagagcattctgagtataaagttcagcatgtggttggaagcgctgaagatacaatttcaagtatgtcatcctatatacctgcagcacctccatatccaatgtttcacattgtaacagataattcctcatgttcaatatctgcagagcaagtaaattgtgagcagcctttagatcaaacaacattatcaattcatttgaggccatttgaggtggagatatcacaaggtgaaacaattaacggagtcttggcctctataattgatgataaagaacacggaggcattccaattctgcaattgccacaaaagttgcctcattctggagaacatatgaaatctccacctccacctcctcctcctccacaaccaccaccttgtcatgcaacagttataccttctttgtgtttatcttcaaaaccaccttctccaacagaacattacgaaaatccaccttcttcccctccacctttttctagagaatcatgtgttgttctacctccacttccagctccactcttgaatcatccatctcttcctggaaaacatattaatctatatccacctccaccacctccaccaccaactttacatcatatcgcacctgcatctccgtgctcgtaccaaccttctttctatgcagatatagcaacccaacctaccttttcagaggatattgtaatagttccacctccacattcaaaaggggttaatataattccattgccacctcctcctcctagaacaagtgaaactttgtctcaacctcttgatggtgggcaatcaacaggaccagcttctcttcttgaagttactaaagaaaacccaccacctcctctccttccccctgaaggacaaatgggatctccattgtcaactctttgtggagaaattgtgaatattccaatacctccaccttcacttcctggaggacatggagaagttccactatcaactcctcctagaggatgtggggccattccacctccaccaccctttactaaagggataggaggaattacattgccaattggatttcatagtggagacttgtcattcctccaatctaccagagaatctaaaggcccttcatgcttgccacctccacctccacctccacctccacctccaccaccaccactatcttctaatggacacataggtgatctgccaccaccacctacgagtgtatttgtagaggcttcgatccctctgccacctcaaacaggatgtggaggggatccaccaccgccaccacctactggaggacatgtagggcctccaccaccaccgccacctctaggggaatgtgcatgggatcttcaacctcccaaagcatgtgtaagggctcccccgccacctccacctcctggaggatatgcagaagttctaatgccaccaccacctcccagaggatatgtaggggctccagcaccacctccacctcctggaggatatgcaggagctccaccaccaccgccacctcctggaggatatgcaggagctccaccaccaccgccacctcctggaggatatgcaggagctccaccaccaccgccacctcctggaggatatgcaggagctccaccaccaccgccaccccctggaggatatgcaggagctccaccacccccgccttcatatggaggaattggaggagttcctcctcctccaccaccctttggaggactaggaggaactccaccgcctccacctccagcagggtttcgaggtggagctccatcaccacctcctcctcctggaggtcatggaggtccaccaccacctcctcctagaggacatggaagtggtccccctccccctcccggtgcaccttctcctccaatgcctcctggaatgtctggtggcccccctcctcctccaggtggaagagggatgcctactccacctggcggaaggggacatggccttgctcgaacgttaggcccgacattacaaagtgcaatgcgaaagtcatccctaaaaccactacattgggtcaaagtaacaagagcaatgcaaggaagcttatgggcggagctacaaaaacaagtggaagctaatagccatgctgaattcgatgtaaatgaactagagtctctgtttaccattgctccaaaggcaaaagctggctcaaaatcagaaggccgtggaaaatcccttggaacaaaatctgataaagttcaactgatcgatctaagacgggccaataacacagagatcatgttgacaaaaatcaaaatgccgctccctgatatgatgagtgctgctctagctttggacgattcagttttggatgctgaccagattgaaaatctaataaaattttgcccaacaaaagaggagatggaacttctaaagaactacagtggggacaaggaagctcttggcaagtgtgagcatttctttctagagttaatgaaggtgccaagggttgaatctaagcttaagatatttgctttcaagattcagtttcagtctcagattagggatgtcagaaagaatttgcagactgtatcatctgcttgtgaggagctcagaagctctgagaagttgaaggttatcatgaagaacattctgttaattgggaatacattgaatcaaggcacaccaagaggccaggctgttggttttcgcttggacagcctcctaaaacttatagagacccgtgccactagtggtagaatgacattaatgcattttctatgtaagtcccttgcagagaagtcaccagaagtaatggattttcatgaggatcttgtccacttggaagcttcttcaaagttgcaactaaaagcattggcggaggagcagctggcagtggtaaaggggctggagaaagttgaacaggagctaactgcttcagaaagtgatgggccggtttctgatgttttccgtaagactttaaaggagttcattgattgttcgagtgctgatgtatgctccttgtcagcattctattctgaagtaggtaaaagcgcagatgcacttgctctttattttggagaagaccctgctaaatttccttttgagcaaggtaatattcatgcctatagacccatggaaatggtttaa

SEQ ID NO: 9134 - DNA, 7023 bp, Zea Mays
cggcaagagtaccattcgttgggctaactttgattcatcctgctattacgggcccatcccaattgctcctgactagtgcagatccggcctatcatgaaaaagcccacacggtgaccgctgcctgatgtgatgtcatgcgccgagcagcgtggcgcgcaccggtgcaaccgttggcgccgggccccacatgtcatacgcacaaaaaatcttacccccgaggcatttcatcgtgtgtttgtttcgagcaatcgtgctcgcgcgtgctcagctttgctctgctctgcctgccgcctccgcctccgccgtcgtctcccctctgtcttcctccgtttccttctccgccacctccaacaccccaaaaataattttagcagcacgagcagaaaaaaaagttccgctcgaaaaaaagaattcctcaacgagagggggaaaggaaaccctagctgtctgaattccgccgcgcgcggcattgccctcccgcgactcgagccgggagcttggcgggcgggtgcgtgcgtggcgcacccgatcgccggcgttcgtatcgttagcctccgctggcgagtgggtgctaggtcggcggcggcagcgggcagcacggggcccgatcatcgctggcgccgccgctgcggtctggctggctggccgccggcaagagtgcggtcggctggtcccgggcgtcgcggagcaagtgggtccgggggcaggccgccggagacggcggcgacgccgacggcggtcggaagcgcaagggaatggcgctgttccggaggctcttctatcggaagccgccggatcggctcctcgagatagccgaccgcgtctacgtattcgattgttgcttctcaacagaaaccatggaccaatacagatacaagaattacctggacaacattattttgcagctccgtgaacagtttgcagattcttcattgatggtacttaactttagagatgaaggaaaaagtcttatttcaggcattttctccaagtacaatattacagccaaagactacccttgcaagtatctaggatgcccgttacttcctttggatatcattctccacttcctaaggctgagtgaaaggtggcttatgcttgaagggcagcaaaatattttactaatgcactgtgagaaagatggatggccagtgttggcatttatgcttgcaggtcttcttctgtacaggaaacaatataatggggagcaaagaactctagatatggtgtacaagcaagccccaaaggagcttcttcagatgctaaccacattgaatccacaaccgtctcatcttcggtatcttgggtacatatgcagaatggatgacggcataggatggcctacacaacctattcctttcaccttggattgtgtaattcttagagaaattccaaattttgatggagtcggtggttgtcggccaattgttcgagtatatgggcaggatattccaacaactgacagaagtcatagtgtcatttcaccaccatcaaaggccaagaaacatattaggcgttacagacaggcagataatgcgccagtgaagttaaatgtaggatcctgcgtccaaggtgatgtcgtccttgaatgtctgcatgtggatgatggccaaggaaatgaaaggttaatgtttagggtgatgttcaatacctttttcatccagtctcacattttaccgttgaactttgaggacatcgatgtcccttgggatgccgatcaccagttcacaaagaacttcaaagcagaggtactcttttcagagtttgatgctgagtctgatgcgtcaactgaagtagcacctgattatgattatgattatgactatgataatgatatggatgttgcctctgctgatgagttctttgaagcagaagaaatcttcagtaatgctgaatctcaagatggaaataaggatgcggatactctttctatggtctctacagattatattcgaactccaagtgccgaatgttggaaaaactctccattttccaactttgatctgaatattgacattgatggatcacaagacaataaagccgataacttgggcttgttgttagaaacagtaaatgatggaaagacatgcacatccactgaagccaatattttgctcaacaatgagactgcagttgtgaagtcaacttttaccgctacaatagcatgcacatccactgaagccaatattttgctcaacgatgagactgcagttgtgaagtcaacttttacagctacaatagatggagacacagatagcggcatctcaagttctacctataaagaggatgggtgcatgtttgaaaagggtagttccaagcaggatataaggatgggttccaatcaagacttgagccagattgataatgtattggttaaggaggtgattatattagaaactaatagtactgatgacatacagatgatcaaagaggtcatcatatctgaagttacaactcccaaacaagtggtagaggggaatatgatggaaactgaattagatgaggcagtccacagttcagaaagcactgcactgggagaagacgaggacacaaaacgacctaatacttttttcaaaaaagatgagggacagagtgcacgagatgaatatgctgcttatgacaatggcatagtgattgaacgggaagaaagtcgcaacaaagaaaaatttaccatcacaggcacagattcactagtggctgagcccaaagatttaccacatcttgacagctcaaacacttctttggaactaagttcagccaatgaaaatattgatcagcttcgtgcttgcagtagtaatgtcactgcagagcgaagagcaggaattgacacatcattttccagctccaggagtcagtcttctaatatctcttgtgcgaacattctaccagaagaatctaacttgataataaaccatgcttcaacttctgtgaatgcaaatacagatacaaccgattcatctcgactggtgctaaagaaaaaaccttttctaccattggcgacatctagtcttttttctccatcatctcccagacgcaatctgcttcgtgctgcatccacagatttgtcctttttttctccatcacaaacagaatctaagcagaactccgttacttctacaagtggaaggggtgattcagatacatcttctgtgcttccaccatttcagctctacacatccctgggatcatcatccaaaatgtctctagtacatcctactctgcgaccaataagaacgatttcatctctaccatcattatcatttggcacattcatagagatgtcaatggcttcttcaagatcacccaaacaccaagagcatgttagatctccctcaataccacaagatcaacatcttcacccaccaatgacagaggaaaatgatctacattcaggtagcttaactttgcctgcttccaaccaatatggccctcaaaccccacacccacctccactaccacccccacatgattcttgcacccaaagttattcgagcaccataatatatgaacctgaacaaataagagctgatggatcttgttcctatagtccagattatagacaaagtgttctcaacttaggtgattcctcactaacttcactctctaatagtagtatagctgcaactgaatgtcccttaggagcctctgattttgtagatgaggaagtaacaagtagacctaatatagtaactgccatggatgtcccatttaccaatgaagatacaaattctttgttgcacatgacttgttcttcacctcccaaaacattacaacgtgctgaaccaccaacgctgccgccaccacctttgcctctagtaccaccaccatcacaactaccactgccaactatatgcagtgatagtggatcagttccactggtatactcaaatccgtcttcagattgtccatataaagaaccaacaatgctaccagaacacaaatctgatgttccagctacttctctcgaaggacatgaagcaagtgaagttcaatttctgcaatctgatactgctgtcgaattatctccatcagagcattctgagtataaagttcagcatgtggttggaagcgctgaagatacaatttcaagtatgtcatcctatatacctgcagcacctccatatccaatgtttcacattgtaacagataattcctcatgttcaatatctgcagagcaagtaaattgtgagcagcctttagatcaaacaacattatcaattcatttgaggccatttgaggtggagatatcacaaggtgaaacaattaacggagtcttggcctctataattgatgataaagaacacggaggcattccaattctgcaattgccacaaaagttgcctcattctggagaacatatgaaatctccacctccacctcctcctcctccacaaccaccaccttgtcatgcaacagttataccttctttgtgtttatcttcaaaaccaccttctccaacagaacattacgaaaatccaccttcttcccctccacctttttctagagaatcatgtgttgttctacctccacttccagctccactcttgaatcatccatctcttcctggaaaacatattaatctatatccacctccaccacctccaccaccaactttacatcatatcgcacctgcatctccgtgctcgtaccaaccttctttctatgcagatatagcaacccaacctaccttttcagaggatattgtaatagttccacctccacattcaaaaggggttaatataattccattgccacctcctcctcctagaacaagtgaaactttgtctcaacctcttgatggtgggcaatcaacaggaccagcttctcttcttgaagttactaaagaaaacccaccacctcctctccttccccctgaaggacaaatgggatctccattgtcaactctttgtggagaaattgtgaatattccaatacctccaccttcacttcctggaggacatggagaagttccactatcaactcctcctagaggatgtggggccattccacctccaccaccctttactaaagggataggaggaattacattgccaattggatttcatagtggagacttgtcattcctccaatctaccagagaatctaaaggcccttcatgcttgccacctccacctccacctccacctccacctccaccaccaccactatcttctaatggacacataggtgatctgccaccaccacctacgagtgtatttgtagaggcttcgatccctctgccacctcaaacaggatgtggaggggatccaccaccgccaccacctactggaggacatgtagggcctccaccaccaccgccacctctaggggaatgtgcatgggatcttcaacctcccaaagcatgtgtaagggctcccccgccacctccacctcctggaggatatgcagaagttctaatgccaccaccacctcccagaggatatgtaggggctccagcaccacctccacctcctggaggatatgcaggagctccaccaccaccgccacctcctggaggatatgcaggagctccaccaccaccgccacctcctggaggatatgcaggagctccaccaccaccgccacctcctggaggatatgcaggagctccaccaccaccgccaccccctggaggatatgcaggagctccaccacccccgccttcatatggaggaattggaggagttcctcctcctccaccaccctttggaggactaggaggaactccaccgcctccacctccagcagggtttcgaggtggagctccatcaccacctcctcctcctggaggtcatggaggtccaccaccacctcctcctagaggacatggaagtggtccccctccccctcccggtgcaccttctcctccaatgcctcctggaatgtctggtggcccccctcctcctccaggtggaagagggatgcctactccacctggcggaaggggacatggccttgctcgaacgttaggcccgacattacaaagtgcaatgcgaaagtcatccctaaaaccactacattgggtcaaagtaacaagagcaatgcaaggaagcttatgggcggagctacaaaaacaagtggaagctaatagccatgctgaattcgatgtaaatgaactagagtctctgtttaccattgctccaaaggcaaaagctggctcaaaatcagaaggccgtggaaaatcccttggaacaaaatctgataaagttcaactgagtgctgctctagctttggacgattcagttttggatgctgaccagattgaaaatctaataaaattttgcccaacaaaagaggagatggaacttctaaagaactacagtggggacaaggaagctcttggcaagtgtgagcatttctttctagagttaatgaaggtgccaagggttgaatctaagcttaagatatttgctttcaagattcagtttcagtctcagggatgtcagaaagaatttgcagactgtatcatctgcttgtgaggagctcagaagctctgagaagttgaaggttatcatgaagaacattctgttaattgggaatacattgaatcaaggcacaccaagaggccaggctgttggttttcgcttggacagcctcctaaaacttatagagacccgtgccactagtggtagaatgacattaatgcattttctatgtaagtcccttgcagagaagtcaccagaagtaatggattttcatgaggatcttgtccacttggaagcttcttcaaagttgcaactaaaagcattggcggaggagcagctggcagtggtaaaggggctggagaaagttgaacaggagctaactgcttcagaaagtgatgggccggtttctgatgttttccgtaagactttaaaggagttcattgattgttcgagtgctgatgtatgctccttgtcagcattctattctgaagtaggtaaaagcgcagatgcacttgctctttattttggagaagaccctgctaaatttccttttgagcaaggtaatattcatgcctatagacccatggaaatggtttaa

SEQ ID NO: 9135 - DNA, 2628 bp, Zea Mays
gcgccagcagcggcggtgctcgaccttcaggcatcagagctgcgggacatcacacgcaccgctacgatctcctcctgcgagcgagatctcaccaccgcagcggcgccgcggccatggcgggaaggtatcaccaggatcagggcggggacgggggcgcgtccatggaggtagtcagcacgccgaaccaggagctggcccttaccaactgcgcatacgtctctcccgctgacctccgccgcttccccaacgggctcgccctcgtcgctgacgcctgggtcttcaccctacgtgaccacaatgctgttgcaagtggacgcattgccttgaatgctattcagcgtcggcaggcaaaggtttcagctggggattctgttactgttagcagttttgtcccccctgatgatttcaagttggctttgctcactttagatctagattatgccaaggcaagagccaaccgaaatgacgagctggatgctgttgtgcttgcccaacaactccgtaagaggtttctgaatcaggtcatgacctcagggcaaagggtgccatttgaattttatggaacaaactatgtattcaccgtcaatcaagctttgctagagggtcaagagagttctacaccattggatagaggattcttgtccagtgatacatacatcatatttgaggctgctcctaattcaggaattaaggtgatcaaccaaaaggaagctgctagcagcaagcttttcaaacataaagagtttaacctggaaaaattgggtataggtggattaagcgctgaattcactgacatatttcgtagggcattcgcttcaagagtctttccgcctcatgttgtcagttgggcatcaaacatgttaagggtatattgctatatggacctcctggtactggcaagactctaatggccagacaaattggaaagttactgaatggaaaagatcccaagattgtgaatggacctgaagttctgagcaagtttgttggagaaactgagaagaatgtgagagatttgtttgctgatgctgaaaatgagcagagaacacgaggtgatcagagtgacctccatgttatcatattcgatgaaattgatgccatctgcaagtctagaggatctacccgtgatggtacaggtgtacatgatagcattgtaaaccagctgcttacaaagatagatggtgttgaggcgttgaataatgtattgcttattggaatgacgaatcgtaaagatttgcttgatgaagctttattgagacctggacgattggaagtacacattgagataaacctgcctgatgaaaatggtcgtttgcaaatccttcaaattcatacaaataagatgaaggagaattctttcctgtctccagatattaatcttcaggagctagctgcgcggacaaagaactacagtggagcagagttggaaggtgttgtcaaaagtgctgtctcatttgctttgaaccggcagataaccatggatgacctcactaaacctttggatgaggaaagcatcaaggttaccatggatgattttgtgaatgcacttcatgaaattacccctgcatttggtgcttccaccgatgatctcgaaagatgcagattgcgtggtattgttgattgtggcaaggcacataagcacatttatcaaagagctatgctcctcgtagagcaagttaaagttagcaaaggtagcccactcgtgacttgcctattggaaggtcctgctggaagtgggaaaacggctatggcagcaagtgttggcattgacagtgattttgcatatgtgaaaattatatcagcagaaacaatgattggtttcagtgaaagcagcaaatgcgcacagatttgcaaggtttttgaggacgcatacaagtctcagttcagcatgataattcttgatgatatcgaaaggttactggagtatgtagccatcggaccacgtttttcaaacttgatctcacaaactcttctggtcctcctcaagagagttcctcctaagggaaaaaacttgcttgtcgttggaacaacaagcgaggttggcttcctagaatctgttggaatgtgtgacgtgttctctgtgacctaccatgttcccaaactgaaaaaggaggatgccaaaaaggtattgcatcatcttgatgtgttcgatgacggagatcttgacgcagcagcagaagcactggacgatatgccaatcaagaagttgtacacacttgttgagatggctgctcaggggccaaccggaggaagtgctgaagcgatttatgccggagagaagatagatatcaaccatttctttagcatcttgagtgatattatccgttactaagcccgcatggagccgaaatgaaccctataagtatccagtaggagtttgtttgcacccgtgcttcatcaaccatttctgtagattggtttgatctttgatgtgttgtttttgtttgatgcacctactagagctgttggattagatcagaggcgaattacacgatatatcatttttgtattgtatgacgatgtttatacagttcttaatgggatccagctttacacctcagaacaccgataattttcacattcctattagacccgcttgttttgttgaaattgaattctattttaata

SEQ ID NO: 9136 - DNA, 995 bp, Zea Mays
tttcttttcttttctgtaggttgaactcatagctgatcttcatgttatccatgctagcaatgtattgcgtttattcatatttctcttttatagtagggtgggtatatgtgataaagcatgtattcgataaagcagatctttccaagtagggaactaaattgaaaattgtattttatgaactttatgtttagtttcatggatcagtttgaggcatagctaagtataatttatatgattacactcacatccacttggtgtttttaaaatgtttgcaacggtccactattgagttcgaaatactgaacctcaaactccttgtcaaggtacacctcgtgtagcgattttctgactttcctgagtgaggcggcgctattggctttgtctattgtgtagttgcaaaagaatatgtgaattaccagtcagtggagattgagagggattccccggctagaagctcaagcggattaggaagtggctcatcttcatccagtgtaaccagaggatgacaagcctactacaagagttggtcctaagttataaaataagcctaactttttttacagagtacacaaatgtcaggttttcctgtttgggctagcaccacaaatggaaacaaaaaattggactcagcccatcgtgaagatatgaaggaagagcactgtcccattattctgtttttcgaccatgtttctagcatgaacatgccagcatggtgccatcaacaacttccctgttagctcacggtacaccatgctccagcctgtcccctggttatcactgtggtgctgattgtgttcccaagatgcactgaaatagagcaagatcaaatgaggatgaagttactgtgtagagatttttgttccccctttgtagcagcacccatggatttttatttgcacagaattactctcttttactggttcattcaataattcaatttgttgcttggaaaccactgtataataaatacaaatgctatggtatgattttgtgaa

SEQ ID NO: 9137 - DNA, 1686 bp, Zea Mays
tccgcgttgccattctcgccggcatcgtcgcgcccccaccccatacgagccgcccccgcgacgctgaccccactgccgtccagcaggatctctcccttcccccgccccacgcctagcaggatctctcccttccctcgcgcgtccgagacgacatggacgaaggtgggaggctcccaacgcatccccgccgacctcaacgccgacggtcctttcctaacccgcagcccccggccacagtctctctcttccggtccagtgggggctgctagcttccaggaatattggagatgtgccttcaacactctagggctcgattgcctccagataagcaacttgctgcagaaaaaagttttgccttgtattgcaagccagttgaattgtacaatattatccagaggcgagctattaaaaatccaccttttgttcaaagatcccttctatataagatacaggcaaggagaaaaaagaggctccaaccgcgcctcctcaagttacttcgcagcaatgccttcaaggcgaagcccgcgctcatcaccctcatcggcgcctgcgcggccatgggcgccaatgccgaagtcaccgcctccatcacgtgcctccgcgatgcaatcgctagcgatgactgggcagcgaggaaggccgcggcggaggcgcttgctgcattggccctagagcacacggatcttctcacgacctacaaatcctcttgcgtcaccttcttcgaggccagaaggtttgacaaggtcaaggttgtgcaagagtcgatgaaccagatgattgaggcggggaaggagatcccaggtgctgaagaggacgagtgctcctcgctctgccaccagcgtcccagtcacaacgaagatcttctcttacagggagtgcaagtgatgggcgatatccagctgcttcgctgggctcaaactcagttcctttagcaacaaggaagagcatattatctgtaagcagatcatctctgtctgacgtgtctaccagtgtaattttctggaccttctccaggtacacctcgtgtagcgattttctgactttcctgagtgaggcggcgctattggctttgtctattgtgtagttgcaaaagaatatgtgaattaccagtcagtggagattgagagggattccccggctagaagctcaagcggattaggaagtggctcatcttcatccagtgtaaccagaggatgacaagcctactacaagagttggtcctaagttataaaataagcctaactttttttacagagtacacaaatgtcaggttttcctgtttgggctagcaccacaaatggaaacaaaaaattggactcagcccatcgtgaagatatgaaggaagagcactgtcccattattctgtttttcgaccatgtttctagcatgaacatgccagcatggtgccatcaacaacttccctgttagctcacggtacaccatgctccagcctgtcccctggttatcactgtggtgctgattgtgttcccaagatgcactgaaatagagcaagatcaaatgaggatgaagttactgtgtagagatttttgttccccctttgtagcagcacccatggatttttatttgcacagaattactctcttttactggttcattcaataattcaatttgttgcttggaaaccactgtataataaatacaaatgctatggtatgattttgtgaa

SEQ ID NO: 9138 - DNA, 2774 bp, Zea Mays
tccgcgttgccattctcgccggcatcgtcgcgcccccaccccatacgagccgcccccgcgacgctgaccccactgccgtccagcaggatctctcccttcccccgccccacgcctagcaggatctctcccttccctcgcgcgtccgagacgacatggacgaaggtgggaggctcccaacgcatccccgccgacctcaacgccgacggtcctttcctaacccgcagcccccggccacagtctctctcttccggtccagtgggggctgctagcttccaggaatattggagatgtgccttcaacactctagggctcgattgcctccagataagcaacttgctgcagaaaaaagttttgccttgtattgcaagccagttgaattgtacaatattatccagaggcgagctattaaaaatccaccttttgttcaaagatcccttctatataagatacaggcaaggagaaaaaagaggctccaaccgcgcctcctcaagttacttcgcagcaatgccttcaaggcgaagcccgcgctcatcaccctcatcggcgcctgcgcggccatgggcgccaatgccgaagtcaccgcctccatcacgtgcctccgcgatgcaatcgctagcgatgactgggcagcgaggaaggccgcggcggaggcgcttgctgcattggccctagagcacacggatcttctcacgacctacaaatcctcttgcgtcaccttcttcgaggccagaaggtttgacaaggtcaaggttgtgcaagagtcgatgaaccagatgattgaggcggggaaggagatcccaggtgctgaagaggacgagtgctcctcgctctgccaccagcgtcccagtcacaacgaagatcttctcttacagggagtgcaagtgatgggcgatatccagctgcttcgctgggctcaaactcagttcctttagcaacaaggaagagcatattatctgtaagcagatcatctctgtctgacgtgtctaccagtgtaattttctggaccttctccaggtaattttcctttagtgtgtttattgttactgtatatttttacagttctcttgcgagacgtagtagtatagggcttgtagtcgttaccttttcttccagaaataagtaatcattaacttctctgctgattactaaacacaagagaaaacattctgtaactgtaagtccacgttggaagtggaagtagttagtttttggatacttggttgcaacttgagctgtggcttcaatgctggagcagattatctggtgaagctgaggttgttttgagaaaacgtttggttgaacagcttctgatatctcttataaatagctgagaggggcaatgtccaagatgcccttgggtattgtaaaatttgattatatggttgcagatgttcttttatatttgagtacttttcaaattttaaaataaaaattatcaacaaccaataactttgccaagaaacgagcagataaggaattggggttatggcggattctttctaatttcttgtgaactttaggggtgaaaatgtactttgtgtggtgggccgtgggcctgtccatgtagcgcgtggaagctcctttttccaactccaccatgcacctgtccctcgtgaaagcgcactttatggtttatggagctccatgaatggagctgctacagcagcaccttcttggtacaaggagctaaaaacagctccaggagctgtaatggaatccccaccaaaggggggcatatgttggtcgtaagaagagggtacacctcgtgtagcgattttctgactttcctgagtgaggcggcgctattggctttggtaggtctttctcatgatcatgttgtttgggtctgaaaatgctctgagtcgtagtctcgtaatgttatagtaacaataacatcatttttgtgaggatttgtctgaaaggagaacaactcaacatcaatcttggttatcaaccaagagtctaaactcctttgtcatgtgttatcgtttcaatcctgaactatgcattgttgtgggtcttgaagatctggttacaagcctacaacttaactgatatatatcacatgatgatgataatatgtatattcatggtgacacctttgctctttgaacatgttgtagtctattgtgtagttgcaaaagaatatgtgaattaccagtcagtggagattgagagggattccccggctagaagctcaagcggattaggaagtggctcatcttcatccagtgattctgactctgatgttacagtttattttttcagtaaccagaggatgacaagcctactacaagagttggtcctaagttataaaataagcctaactttttttacagagtacacaaatgtcaggttttcctgtttgggctagcaccacaaatggaaacaaaaaattggactcagcccatcgtgaagatatgaaggaagagcactgtcccattattctgtttttcgaagaccatgtttctagcatgaacatgccagcatggtgccatcaacaacttccctgttagctcacggtacaccatgctccagcctgtcccctggttatcactgtggtgctgattgtgttcccaagatgcactgaaatagagcaagatcaaatgaggatgaagttactgtgtagagatttttgttccccctttgtagcagcacccatggatttttatttgcacagaattactctcttttactggttcattcaataattcaatttgttgcttggaaaccactgtataataaatacaaatgctatggtatgattttgtgaa

SEQ ID NO: 9139 - DNA, 2742 bp, Zea Mays
gttgccacctacacagcactccccccgtagccatatatagcttgctcgcataaacgtcaaaaaggagactcttttggccctcttccggcaccggcaccggcaccggcaccagcgccaatctagctagtcagtttagcttcgctccttcgcttgcttgcaagtaacagcctctctcgtgtccaaaaagaaagtctttctctggaaaggagagaaggatcatcatcaccaggatcaagaaagaactcgtcgattccttaccccttccgtcttcttctgatctcagctctatccactagctaggagatggacatgaacaacgggtggcttggcttctccttgtctccttcggcagcgagcaggggcggctacggctacggcgacggaggcggcggagcgagcgcgagcgcgtgcggggatggagagggctcttgcccctcgcctgccgcggctgcctcgcctctccctctcgtggccatgccgctcgatgactctctgcactatagctctgctccagattggaggcacggcgcagcagaagccaaagggcccaagctcgaggacttcatgagcatcacttgcagcaacaagagcagtggccgcagcctctacgacagctgcggccaccacgacgacgagcaggccagcaagtaccacgaggtccacggcatccaccccctctcgtgcgggtcgtactaccacggctgcatcagcagcggcggcggcggcggaggcggcattggcctggggatcaacatgaacgcgccgccctgcaccggcgggttcccggaccaccagcaccaccagttcgtgccgtcgtcgcaccacggccagtacttcctgggcgccccagccgcaagcgcgggcccgccagcaggcgcagcaatgccgatgtacaacgccggcggcggcagcgttgtcggcggctccatgtccatctccggcatcaagtcctggctccgggaggccatgtacgtgcctccggagcgaccggcggcggctgcgctgtcgctcgccgtgacggatgacgtcccgccggccgagccgccgcagctgctgccggcgccgttgccggtgcaccgcaagcccgcgcagacgttcgggcagcggacgtcgcagttccgtggcgtcaccaggcacagatggaccgggcggtacgaggctcacctgtgggacaacacttgcaggaaggaaggccagactaggaaagggaggcaagtctacctaggtgagctactgcaagcctcctcctagctgtttgttgctccacatgctcaccaccatgtctttgctatgactgtggctgctctaggcggctatgacagggaggagaaggctgcgagggcttatgacctggcagctctcaagtactggggcccctcgactcacataaatttcccggtacgtttactgatggctcccttcgtccccttctcacggcgaccttaatttactactaactccatgcatgaaattaagaaaaagggccctgtagctcaacgtagggggccggcgcaggcctcgttcttcactattcatcgtccatgcgctctttattcttgcatttgatgaatggctggtacacgtttcctgatccactgacctccgatctaaataatgcccgtagctgagccactacgagaaggagctggaggagatgaagcacatgtcgaggcaggagttcattgcacacctgagaaggaacagcagcggcttctcgaggggagcatccatgtacagaggagtgacaaggcatcaccagcacgggagatggcaggccaggattgggagggtcgctggcaataaggacctgtaccttggcacattcagcacgcaggaggaagcggcggaggcgtacgacatcgcggcgatcaagttccgtggcctcaacgcggtgaccaacttcgacatcagcaagtacgacgtgaagcgcatctgcgccagcacccacctcatcggcggcggcgacgcgtgcaggcgctccccgacgcggccgccggacgcggcgccggcgctcgcaggtggcgccgaccgctcgtcggacgcgccgggcgaccaagccgcgtccgacaactcggacacctccgacggccaccgcggcgcccacctgctgcacggcctccagtacggccaccccatgaaactggaggccggggagggaagcagctggatggcggcggcggcggcagcgcggccggtgcccggcgtgcatcagctaccgatgttcgcgctgtggaacgactgttgattgtggcaatggcaacctggttggtagagtacgtagtagttagtgaagaaatgcatgtcattgcacctgcatgcgcatgcgcgagcacgaggtgtaataactttcggcagtagaagtggcggtgaagaagtggacgacacggcctggggaaggacatgcatggcgtactgcctccctgcaagcgagatgcatgcatgttgcacacgctcgccgtttcttcgcaagatggcgacaattttgccgcaatatgtaatgtaatggttccacatgcatgcatgttattcttcaatgaaacaccccactagtagttatctgatttttgtgatgacgttggcaaactaagctcgccagctttttgcggagtagtgatacaaaaacttacatgcatggtcggtgggtgtagtagattgatctaataataaagtgttcatattagtgcaagaatttggaaaaatgatgcatatgcggactaaattttggtagagtgcaaaaatggc

SEQ ID NO: 9140 - DNA, 3620 bp, Zea Mays
atgaagcgggcgatcgtgagtgccggcgagggtggtgacacgcgagggcctgggggaaacgcccctggtgctagtgacggtggagaaagaagccctagtggatcacgaggtgaggagaaactctatcaaacatggtggatgaaagcgcatggagagtgggggaaagaaagcaaaaaagagaggaatctgtgggctaacatgtatgacgagaagatttgggatgtcgagatcggccctgagatcattgacgaggcgctccatcctgccaccgtaggccgtggcatcatcgagctcgatgtgtggcctgcacccagtcatgagcagattgtgcggcttgagaccccggtgtcggagagggcggacaaggatgagggcagggcacgtaacggagggagagagagcagcagttgcagccgccactacctcctctccagcttcgcgtccactcccctcaaaaccctaaacgcgctcaggaccctagttgtcatgtcgtaccgcggagggcgcgggggcggcgggcccaactcgcaccgcgggcgcgggcggggcggcggcggtggggcgggacgccgcggcggcggcgggggacgcggggagcagaggtggtgggacccggagtggcgagccgagcgcctccggcagatgcatggggaggtggaaaaggtcgatgagaatgaatggtggaacaagattgggcaattaagagaagggtcccagcaggagctagtagtcaagcggaattttggacgggatggacaaaatatacttgcaaacatggctcagagacaaggaatttactttaatgcatacaacaaagggaagacacttgttttcagcaaggtacccttacctgattatcgagcagatctggacgacaggcatggatcaacacaaaaggagattaagatgtctaatcagacagaggcgcgagtcgaagaccttttgtccaggtcaaagtggaacaacaattctgcaagcacatcaactgtctcaacgagacaaattttccctggcgcatcctcgtctgtagttgaaccagcagcaccaattgataaagaaaagctcagttcccagcttagggagttgcagaattcaaggaagacgacagcaagtgctagatcaatgcaatcttttagggagaaattacctgcattcagcatgagagaggggtttctgaaagcagtggcagccaatcaggttctggtcatttctggcgagacaggctgcggcaaaacaactcagcttccacagttcattctagaagaagaaataaacagcctccgcggtgctgattgcaacataatttgtactcagccccgccgtatatctgccatttcagtagcagcaagagtatctgctgagagaggtgaagaactcggcgaggctgttggataccagattcgccttgaatcaaaacggtctgcacaaacacggttgctgttctgcactactggagttttgcttagaagactggttcaagagcctgacttaattggggtgagtcatttactagttgacgaaattcatgaacgcggcatgaatgaagattttctcatcataatactgcgtgaccttctaccaagacgtccagatcttcgccttgtactgatgagtgcaactataaatgctgaactattttccatgtactttggagatgctccagtgatgcacatcccggggttcacttttcctgttgctgagttgtttctggaagatgttctagaaaagacacgttacaggatcaattccgaacgtgataattttgcaggtagttcaaggagaaagaggttttcatcagttaagagtgatccactatctgatgtttttgaggacattgacattactaaggagtatggaaattacagcagttcaacaaggcagtcccttgaagcttggtctgctgctgaactagatttgagccttgtggaaaatacaattgaatatatttgtcgctatgaagcagaaggtgcaatccttgtgttccttactggctgggatgaaatttcgaagcttctggacaagattaaagggaataatttccttggcagtcctaatagatttcttgttcttcctttgcatggttctatgccaactgtgaatcaacgcgaaatttttgacagaccaccagctaatatgagaaaaattgttttggcaaccaacattgcggagagtagtatcactatagatgatgttgtctatgtgattgattgtggtaaggccaaggagacaagctatgatgccttgaataagctcgcatgccttcttccgtcatggatatcaaaagcttctgctcatcagaggagaggtcgtgcaggccgcgttcagccaggtttttgctatcggctctatccaaagatcattcacgatgcaatgccacagtttcagttgcctgaaattctcaggactcctttgcaagagctatgccttaccatcaaaagcttacagcttggagcagtatcctcctttttagccaagtcactgcagccaccagatccactttctgttaagaatgctattgagcttcttaaaaccattggcgcactggatgatatggaggagctcacttctcttgggcgacatctctgtactctcccactggacccaaacatcgggaaaatgctgcttatgggatctgtattccagtgcctggatccagtattgacaattgctgctgctctcgcatatcgaaatccatttgtgctcccaatagatagaaaagaagaagctgatgctgtcaaaagatcatttgctggtgactcgtgcagtgatcacattgctcttgttaaggcgtttgtagcatggaaggatgctaaaaggagtggtagagaacgcactttctgttgggaaagttttctgtcccctatgaccctgaagatgatggacgacatgcgaaatcaattttttgatctactatctgatattgggtttgttagcaagacagcaggagtgaaggcatataaccgctatggtaatgatctggagatggtttgcgctgtcttgtgcgctgggctgtacccaaatgttgtgcaatgcaaaaggcgagtgagaaggtgaagactgctagcatttatgtaagggactcgacaaatatatcagactatgcccttctactctttggtggttcgcttagtccgagcaaaactggagaaggcattgagatgcttgggggttatcttcatttctcggctccaaagcgtaccatagagttgattcagaaattaagaggtgaattggacaaactccttcagaaaaagattgaggaacctggactcgacatcttttcgcaaggaaagggtgttgtggcggcagctgtagaactgctacacagtcaaaatttcgaccattagatgccaaatattacatgttatcaggacaagtttcacactagacgaaagcaaaatcagcgtattcttttgtaaatctcacctctgcgtgttagcatatttctgttgctttttttagaaaccagaatttgagcccagcaacaaccacaacgatatcgttgcggagaaaggacttatacaaggtgattctctgtctccgatcctctttaatatcgttgcggacatgttggctattttaattgagagagcaaagaataatgttgacctaaaaaaaaa

SEQ ID NO: 9141 - DNA, 3090 bp, Zea Mays
ccgttttgtttagtactaacagtacgtaatcgtcgttcatctgatgaccaacaagttcagagttcaagacatctctacatatgagttcaacgactatgcatcccggtgctccacccgccgctgaactggcttcagctggggaggccggaggggattacatctgcgacgtgggagacatttcggctggggatcgtgagcattctgaggcagcgcctgaagccgagcatggacaacctgcaatagatgatgatactaaacgccggtggtgggaagatacggaagaaccaaacacatcggctgatacgatgatcgacctcctgggagacatgggaagtttgatgaacaaggttgatgccgaagcaatcctgaacccagtggggagaaaatcgtatgaaatcgggctggctagttcatcgacacccaatgtcggaactgtcagcaccattgcttcgagcaatgtctctatctatagccgcaaggagagcatcgaaaatcagaacaaaatgaaaaaaagaaaggggagatgctacggatgtaaaattcgtccttggcgcggtcctctgcccaggatcagtaaacggttgatcactctcgaggcattcatgccaagcttgatcaatgggcttgatagtttgaaacggccattatcagatgagaagttcaagagttcttgggtgacgaaaacacacaacattcaaactaaagaaacctctttagaaaatgtgcagctgctaaacgcttcgggagaggaacagaggcatttattgcctttaagcagggctcagctggtacaaaaagcaaagacatatggcgcttcgcgtgaatcattacgacggccagcattaaatcaaaagaaaggtcaaatttctcccataccagtgcaacacttaatccgaccctcatacgctgagatagctgcaagacagcctgcaaacctcaagcctcagcgccagcatatgccaacaatggaggagaaagcccatcatggtgagagaaccttcgtacctcgccatcatcagcgcagagagcaatttcctcggggcggcagggcagggagaggtcctggacgtggctctccagcgtccggtcacggaaggggaacaggccagaactgggcgcgtggccgtggatacgcgccgcagcagtatgcacctgttgcctcatcccagcagcttgcgcctgtgggaattcaaaggatgggaaatcaacaggagatagtgggtggaaaccttcctgctgaaggtgtgcacgatgcgactcagaaatgggagaatcgagatttcaaggccaagaaaccaagaccaccacactgctatcgctgtaagtgcaacgagcatctagttgaagcatgcaaagcagatttagattgttatgtatgcaataagaagaatatacatattgcggccaaatgtcctttgctcaagatggagaaaccatctgcagccatgagtggatttgccaagaatgagctttgtttctttcgcataccagtttttgactatagacttgaaacacctgatgctgctccaactggattgataaagatgactgggggtaagcttgatgctgtctcaattcaagctgaattggcaaaattgtcaagggttgaatgggcttgggaagctttgcaacatggggaggattctttccttgttgcttttccatcagaagaagaattagcaaggatgtctgaaatggaatacaagatgaggagcagtggagtgaccttaaccatatctgaatggaaacatgggggcgatgcaacaccagcctactttttggatgaagtgtgggtgcatgttactggtgtacctcacgcatggaggcattatcttggtttttgggcgcttggatcaatgattggcaccaccattgatgttgatatgtatacatacaggaagaaaggtgtgattcgaatcttggttgggacactagataaagaacttcttccgctcacaacagatgtggtttttgataaggtggggtatgagattacattctccatggaggatcaatattttgagccggcaatacctccaccaaattctcttgtacccagagaaaaggatgatgatagtgaaggaaatgaggacgctgcaaaggataaggagagagtgcagactgctaaaaaagctaagaacaccaaagatgcctcaggctccaagtccatgcagggcgacaatgaatctgctcctatgcagactgatggtgaaaatctgaaacacagcattggtcacatcgtggtggctccttctgatccaatgacaattttttcaccaggcaaacccctcaaccttgagcagggggttatatgctctgatgagcagcgcccaaattatactcaactttatgaaaccaatgaagtagaagggaaagagcatgctagcttggacttggggatgaggaaacaaccatgcatcgatgtcatattagggagacatttttccatgccaacacaaaggatggaaaacagttctgactgtgacagcaatacacatcaaacaagtgctttggagaccccagcgagcaatgtattatcgcctttgtctatgagggctgagaaacctgcaacaccattaagccaagatataggacagaactcacagggcgagcaagtggctgagatagaaacgagtgaggaattgaagatggagatgtctcctaattctgcccaggacaaaaatatggattcattagagaaggcaatgaatcgtgctgctgctcgcaatttggatgtgaaaggaggatccagtattgctgccggatttaagcagtataatacatctccatgcccaggacctcatgcagcaggttattttcactactacccactggctacggtcttgggttgtactgcagagacacgatcaacagtctattgtgatggaagcttcacaacgtttggagcaggtggctacgaagttcttatctcaggcacatgggtggcgttctagtcgtaggattgacaaccattaagaatgtgcttaccatgttctttttcttttctctttttctttcttttctaggctgtgtgcatcttattgttgcagaggccgggagacgatttgtatcaaacttttagatgcaatg

SEQ ID NO: 9142 - DNA, 2863 bp, Zea Mays
cagaacatgagagatgcaggccttttattccctcgatgcttcataaacaggagggatttgcattttctcattgtactacctgcaaggctccatattacttgagggttcattcgcacactgacaggaaatggcgaacactgaagtttcgtttctttgttactagagatatattattcatctttgctctagtccagattatcatctctgcattggcatatttggtacattttattgatgggtgccaacaatattggttgaggacagcctgggcttttgataatgaagttagtttttattatatctgtggtgcattaatgttttttgctttgttgggactatcgggatgcttcataacctgttatgaccgaagagtacggaacgacctggctcagccttgtcgagaattatgtctttgttgctgtcagccagggatgtgtgcggattgccacctacctggcacgctgtgcatgtggactgactgcactacctgcttcgaaggctgtgctaccacagccggcgagtgcggtggttgcttgggaggggctggggaagccgggctaccgcttctcctcatcatgggggtcattgtgctggggcttttcacggtcatcggcatattctacagtgtcctggtcgcgaccatggttggccagcggatctggcagcgccactaccacattcttgccaaacggttgctaaccaaggagtatgttgtagaggacgtcgatggcgagcgcacagactggtgtccgccgccactgcccgcggagcacatcagccagctgaagtctctggggcttctgtaatatggaggctggtgaccctaagctaagaccggcgtggcgttacccagctccagctgtacaggagggaggctatactgtcaggcattctgcgttgaaatgtgtcaatattgatactttttctctttttttttcccttcttttttgtacattgtaatggcaaagctttctccctgacaaaacccaaaacttatatcaagtgaaaccgcctacatttttactggacaattcctttttaggccttgttcggctattcccattatacatgaattgtatgatattggaaacaatttagaagaattttgacttgcttgagatttaaacccacccaatctcactcaatctacatgaattgagagctaaccgaacgtgatcaacggcaactgggattcacagtacgaacctcgacctcgggttctgtaactgggacctttgtaagccagtgttctacatttttacttgattctacatgcagaattgtatcaaattgtttcgctgtttgattactgaacggattcttccccaaaaaagtttataaaaataaaaaggcgttttaaaacttacaagcccaactgcccaagttctttcaagtttcagctcaacttcgggtgcgggcctgttgggctcaatactttgggaacatcggtctggtggcccatgttctactatgaagagcttcccagccaccgaggcctagctagctcacttcgctcccctctttcttccccacgaaaccagagcaaattccggcgagccggtgcggtgcggcggaggaggccgagggagacgccggcgcgagaaggagcatcaggaggaggcagcggagatggatccggactcggtgaagtcgacgctctctaacctggccttcggcaacgtcatcgccgccgccgcccgcgacctccaaaaggaaatggtggctaaagacaaggctcaatcagcacctgcaagccatgatgaagttgatcttgatgagctgttggatgacccagaacttgagaagttgcacgcggagagaattgctgcccttaagaaagaagttgagaagcgtgaagtgctaaaaaggcaaggtcatggtgaatacagggagataactgaaggggacttcctcggggaggttactggcagtgaaaaagtcatatgccatttttaccaccgtgaattttaccgttgcaagatcatggataagcatttgaaggcccttgccccagtctatgtgggaacaaaattcgtcaagcttgatgctgaaaatgctccattctttgtggccaaactggcaatcaagacactgccatgtgtaatattgttcaagtaagcgcacaagtttttttgttgctcctgcccatttgataatgtttattgctgtttggcaccctgcaatcttcctgcctcacattactacctgcttcaccatactactatgacccctgtcatttttcaggaagggtattgctgttgaccgattagttgggtttcaagatctcagaagtaaagacgattttccgacaagagcgttggaaaatattctcaagacgaaagggataattgatgagaagaagaaagatgacgacgatgacgatgaagaaagcgaggctaagaataggagggttaggtcttcaactgctcaagactctgactcagactgaacctgagatgaggatcgaggactcaccgtttttgcactttggattttgtttgtttgtttgttctgtgttgtgctgtactgtactgtaattgatttgtgtaaccatgtatcggtaccagacaccacaacaagaacatgtacaagagattctttagcatccattgtgtgtaaaagctagggtttgtggctgccttttatttcgtttttcctcagccatcataggatggtacggctgatgtataatagattactatttgctatgtgggcgtcagatttgttttggcgtgcgctagagtgaaaaaggtcgcatgaaagcgaatctaaacccatgcgtgcttttgttttgtttttctgaaagggaatccatgcgtacttgagattctcattattagtacgtattagggtttgagcaaca

SEQ ID NO: 9143 - DNA, 3498 bp, Zea Mays
cagaaacttccccgcctcccccgcgctcttctttgttgctgttgttgttgttgggcaaatcagtagggtttttggtttcgccggtcttcgcttcgctgccgccatggcgtctcctcccgagcgtgaggtcgccgcactcgagagctgcttccgtgccctctccgcggctgacgccgtcccagcggttgtcgactgcgtcctcgcttcctccgcctcgtcctccccttcccaactcttccacgcgctcctccgttcctttcctccctcccaggttgtttgattgttggcttgctgcagctgctttcgcttccacttcaactaacatcagttgattgctctcttcttcccagcgggagcagggtctccaagcccagtctgaccgtcatgccgccatctgccacgccgcggcgctccgccatttgctcgcgcaactcgacagcccccctaaggttagggaggctctgcgcttgctgctgtggagggtcttcctgcccttgctccaggatatcattgaacccactcatcctgcccactttgacctggtaatcgagatgatgtgcaatgcagtctctgacactggatgctgggacctgcttggagctacaatagtatcattctgcattcggtcatctgttgttgccatgggtttgtccgccgcagacgccaactctatactttaccaaagtataatggaagcggattttcctgcggagactctctcatgcctactaccgctctccaattcaagcagtgtgttagcatcattgctggtggacatgctggagaggcgaaggactatacctacctcccaggaaggtgctgctgatctagctgcattggttcagaatttgacatgggaccttgccaagttggtactcaagatgtttacacatgctcaagagtatcggtcttgtgccactcgggtccttcttcagcctgtactcatatcgcttacagatgtttcttctgtcactgtatcgtttggtgcagtccagcataagctatcgaggtttggtttcctagaatgtatatggaattcctgtatttctctatttcctttggggcctggtgagcggcttgatgcatacagaatactctctgtatacttctcaacactgaaatcaggacatcaagccgctgtcttgggagttggcattgtccaggaatttgaccttaagaatgtcagtgaattctgggatgaactgcgcaggggactggttgacaaggattctttagtaaggaaacaggccttctatgtcttgacaatatcacttagcatctttacctcttcatctggaaatgatagctgccagcatttttccagtaggagcccagctgctttgcctgctcaaatcaaagcaaatgctggggaaacaaaaagggaaaggtgggctaacaaagaagccaagtcccttggtgttggagagatggaccaatcaggtgaaaattgctcaaatggtcaagatcggtggaaggtctttttgttactctatgagatgctccaggagtatggcacacatttagttgaagcagcttggacacaccatgtagtgcggctgtttgagtgtacgctacaaaatgactatctaaatcacacctcctgtggagcctttcatgctcagatggaatcttgggaaagaattttgtactggatggcagttttgtgggagcgtgggttcagtcatgagaatcctcaagtgagatgcctggttatgcaatcctttttggatattgcatgggaacgctacaaggtttgcactcatataattccaaggggttttgtgctcggccctctgatacgtggtttgaatgatgtggttcatcataaggattttggcattgggggtgcttatagttcgaaaaccataaaagatgctcagagatttttcagaacttatacccacaacttggcgagatggattgatgactcttgcatcctgtgttgcttcatgcacacgtcagtcagagacaaatgatgtgccatgtgctatatctgggaaagcagtgaccaaatgtgatggatgtgtacctacagaagttaggccaacagatttgttagatgtcttatggattctcagtgagaggagtaaacaacactttaatccaaagtatcgtctgaaagtttgtgaacaggttatccaagttgcaacatcactgataaatgccactgaaattccacttaaccagcttctgcatttcattgccacaattcctcgagagttcactgattatattggaccattgagagtagtagttcaaaaatggttttttcagaaggaagaatgttctcctggtgacactttgttgagtaagctgatcgatttctctgccaccttcgtaagtcaaaaacggaatgaaggttcgaatgtttttgatgacgaggatgtggatgcatgggaagctgaagcaaggaggtgggctagaacccttcttcttgtaaccgaggaggaggaacatttgaaacgaatcttcaggtttttggaggcatatggctacaagctctctgagcaatgtcccagtggagatttcatacccataaaattttttatcattgttttaagcttcattgaggaacttgagctgagacagagaaagcttgtttgccggagtaatacaatcttaagaggttcagatacattaaatggattagtgctcgatgatctcaacaaaatgttcacagaatcacttttgctaattttggaaaatatggtggcattcagtaaactgtcttgctccattttctggttagatgtggacaacaaggatttacccccttctatcaaaggaaagcttggaggcccaagccagcgtcgtttggctacctccattacttcttcagtattacagggtatttggtcaatgcgatgtgttagttctgttgcctcatggtgtaatccttacaactccgatgattctgtttcttctgcattttccgtgctatgggacttctatttgaatgttacccatcactccactattgccaatgagatcggagctgaacttcacctggcagcttatgaagctcttgcctatgttctggcagttctatctactgcttccagtactcagtttttggattttgtggaagcgaagcagacagatcaagcccacaagttttcattggacattttggtcaccactttccttgacaacatcaaccatcttcttacagagggaactctgacgcgaagcagaagagctgttttgatgacttggaagtggctttgtatggattctcttctatctatttcaagctgctatagtgacaatgaatctcaaatgaagaggttggaacctttattttctgattcaaccctccgatgcatttttcttgatattatcgaaagccttgaaaacactggtgaaaattctgtcttatctatcttgagatgtgtgagatctgttttgagattgctacacctgaatgagggcaacacaattttttcctctttaggcatcagctatgagttgccattcagtatctttttatctctgttc

SEQ ID NO: 9144 - DNA, 4719 bp, Zea Mays
cttggatgtccgcggcccgtcaggccgtacgagtcttgctttccgccccccttccgtcgcagcgtcctccttccacggtgaagaggagcgaccgcgcgaggacacgagacgagacccctgttcaatccccaatctggaatggtgatccgcgacgagatctgagagagagcgcctcgcaagaggcccgccgtccgcttcccccctccccacggcagccttccacgcgatggcgtcctccgcggcgccgccggcctccccgtcgtcgcgatcgcacggcaatgcggcgggcgccggcagcagcgccacggcgatgatgctcccgggccctccggggcgcggcaacggcggctgcatcgacctcagccccgcgggcctcctggcgcacggcgccgggagcagcgtcgttgtgtccgacccgcgctccatgcagctcctctgcgtgctccccatgccctcctcctcactcgcctccttcgtcaccgccgtccgctgggcgccccccgacacgccctccctcgacgacgacgacgacgaccgtcgcccgctccgcctcgccgcgggggaccgccacggccgcatcgccgtttgggacgcccgcgcgcgggctgtgctccactggctcaacctcgacgaggcgcgcggcgttgcgccgggctccgggggcggggtgcaggacctgtgctgggtccaccacggctccggctggcacctcgcctccatccacggcccctcgctgctctgcatctgggagacgtccaacagcccgcgcgtcctctggatgttcgacgcggcgcccgagtacctctcctgcctccgccgtgatcccttcgacgccaggcacctctgcgccattggccttcgcggcttcctcctctctgcgattcccaggcaggactccgacatctctctgcaggagcaccgggtgaactgcggtgcaggggatgtcgccgacctgcagaggctggagaaggagatttcagcacctgtacccgccccggcgctcgcggcgttcccgctcttttcctcgagaatttgcttctcccccctgtggaggcagatcctcttcgtcaccttccctcgggagctcatcgtctttgacctcagctacagcactgcgctttctgttactccattgcccagggggtttggcaagttctcggatgttatggccgatcctgatatcgacatgctctattgcacccatctcgacggcaagctgagcatctggaggcgcaaggagggtgaacaagtgcatttattatgtgctgtggaagagctcatgccttcaattggtactgttgttccttctccggctgttcttgcagctacaatatggcagtcagagtctattttccgaagcattgaaaaacaatgtcaggatttggcacagccacattctttcatgattgatacaaattcagaccagaatgcttgtcaagggactatgacatatctaacgtcgatatcagaagatggcaagatctggtcgtggcttttgaaatttgacaagtccgcacttcctagcaaagctaatctaggaaccaggtagaccgagccataacaatgctgcaactgccaacacatgctccaatagacctgattttataataaagattaatttggtgggacaacttcatcttttgtcatctactgtgactacactagcagtgccatccccttcattgcttgccacagtagctcgtggtggaaacaatcctgctccagcagtgccacttgttgctctggggactcagaatggaactattgaagttgtagatgttgtggcaaatgcagtttcagccagtttttccgttcatagcagcacagtgagaggattgagatggcttggcaactcacgtcttgtttcattcacatataatcaggttaatgataaaactggtggatacaataataaacttgttattacatgcttaagaagtgggctaaatcgctcattccgtgtgctccaaaagcctgaacgtgcaccgattagagcattgagggcttcttcatctggacggtaccttctgattctgtttcgcgatgctcctgttgaagtgtgggctatgacaaagaaccccatgatgcttaggtccttggcgcttccttttacagtattagaatggacactgccagctgcacctcggccaggtcaaaatgcatcatctaaacagtcttcaacctccaaggagcgatcagcagaggcttctggtgcagaaagttctgatgaaacatgtgaaagttttgcttttgcattagtcaatggcgctcttggtgtgtttgaagtgcatgggcggcgaatacgagattttaggccaaagtggccctcgtcatcatttgcatcttcagatggtttggttactgctatggcttaccgccttccccatgttgtaatgggggatcgatcaggcaacattagatggtgggatgttacaagtggcctttcttcttcttttagcactcacagggaaggcatcaggaggataaagttttctcctgttgttcatggtgatcgaagcagagggcgcatcgctgtgcttttctatgataatacattttcgatatttgacttggatagtccagatcccttggcaaatgcccttcttcagccgcagtctcctggtacccttgtcttggagcttgattggttgtcaacccgaacaaggaaggatgaaccacttatgttatgcattgccggagctgatagtagcttccgactgattgaggttaacattgatgctaagggcagttctatttcgaagccagtagctacgaaagagaggtttaggccaatgccattttgtttgccagtattatttccaacggcccatgctttggctttgcgaatgatacttcaacttggggtgaagccttcttggtttgaatgcaatagtagtgataaattaactggggacagctttaaggtagcaccaacatttggagatcttcgtagttacatgattgagacaacactccctcctattggtgacgccgttgtggctgaattgctccttaaagtgttggaaccatacagaaaggagggttgcattcttgatgatggaagagccagcctatattcagctatagtgaacaagggagcttgtgcaagatttgcatttgctgctgcgatttttggtgatttccaagaagcacttttctggctacagctgcctcaagctcttcgccacttcctgggtaaatccacaagtagatcaagagagaagatctcacaatcaagtttacatcctgattctgaacaaagctccagatttaatcggatagcttcaagagagagatctgcttctgaaaagttcacgaaaaatgctgcgaattatgggcaattaagctcaatggcatttaatcaagagcaactatggttcaatgcaagtgaaaggataccttggcatgacaagctcgatggtgaagatgctttgcaaaagcatgttcatgagcttgtctctctcgggaacttagaggctgcggtttcattgttactttcaacgccacctgaaggatcaaatttttacccaaatgcattaagagcagttgtgctgtcatctgcagtctcacaatccttgcatgaacttgcagtgaaggttgttgcagccaatatggttagaacggacaaatcgctatctggcacacatcttctatgtgctgttggaagatatcaggaagcatgttcacagcttcaagatgctgggtgttggaatgatgcagctactttggccgcaagccatttgcatggatctgactacgcaagggtgctgcagaggtgggccgattatgttcttcgtggtgagcacaatatgtggagagctcttatcctatacgttgctgctggagcactgccagaggctttggatacacttcgcaagagccagcgcccagataccgcagccatgttcttgctagcttgccacgagacctactcacaagccttatcagaatcagagcccgaggacgacacttccgtgttagcactgacgccgacgccggagcagacggagaagctccggttcccttccaagaatgtggccgacgaggacctgatcgcagtcagtgaggtcttcgggcagtaccagcagaagctggttcatctctgcatggacgccgaaccgacgtctgactgaatcgcacgccttgtcgcatggcagactgatgcgggcgtggattctccgtttttgaagcttattattatcaacaggttgcaaattccttccaagtttctgcgaagctttttgttctgtctgttggtaggtaccagacgtccagacatgacatcgggactgctgatgtggcagaatctgatggcaggaggcaggaacagacatgcagtgctgtatcgtaggtgccaatggttggcactgtttatacatacgtaagcatttgtatttggtacaagctatgttttttttttctttggtgcgcaaagagcgagtgcgcagcgaacttctcttgtggccgagatgagatgagaacagatgccatcgaggcagcagcagacgatatacttacacctgtacacccatgacagtttttgtctgaagattggttattatatgcttatctgcaaatgcatcgcttcaggccctggagacatcgctgtcactggatccatcgtcattgccgatccgtgcagacattgttttggaggtccgaaagctacgttcttgtcgcattcaagccctccatgattatggatgatggataatgata

SEQ ID NO: 9145 - DNA, 2055 bp, Zea Mays
cgcccgcatcccgccccgcatcccgcgaccttcttcctctgctgcctcctgcccgcatcctgccggcggacgcaccccgccccgcatcccgcgaccttcttcctctgttgcctccacgggagccttctcacctccacgcgtcgttgcgtcagatccgtctgtcgctagagaaaaccctacccaatgaccacatgcattcttactgggacgacgccactattggcgcagaggagcagatatggcgcatcgcatgtactccgtcgctgtcctcctcgaatccgcctctaatttctccaacgccataggcaaggagatgcctgcccaccgccccggcaccccccgccctcgccgcgcacaccccaagccccgcggatcacagtcgcctctaccctagcgggagccgcgcccgcacccacattacccgcacgatggcaagaggcagcggcacaaggccacggcgactcctcgagcagaggaacccgaccgagcgcagcaacgcaaatcttcaatctcaaatccgtgctgcgagaaaagtttcactcctctggctgctccttgtgtgtgtgtgtccactaatgcgttcagcattgcaactgctgctgccaaatgctgaggcagcagtatacataactggttcaatttgtgcagcattcgttgccaacatagatggtcactctgataaaactgtcaccttcaatgggaggatgctcagaaatttggtggctggtggatctacttaagaatcaaaagtcagacaaggtggacatcaccatccaaccggaggagcaggaagccatgaatgatgttctagcagccagccatgaccgcgtccacgtcatcaactttgacatcaagcaggggctacagtggccgggcctcctccagaaaaagaggaattgaagcagtatctgactcgaacatttttgtagaaaacttggtagaaaaagaggaattcctgcatacattttcgaaggaatgtgaatatatcagaactgcagtgacaaatggtagtgccattaagcatgatggctcatatgaatcagatcctgcagttgagattgttcgagttgaactccaaggtgctgctgcatttcttttattctcgtctggttccacgcctatatatattggagaacatggatgggaaatgcttctggtagtaaaaaaggcaacacaagaggctggttcaaaatttgaactgctaggttttgcatctgtgcataacttctatcattatcctgagagtattcgcttacgaatcagccagatacttgtgttgccaccttatcagggtgaaggccatggtcttggtcttcttgaagcaatcaattatattgcacagtctgagaacatttacgatgttacaatagaaagcccttctgattacctgcagtatgtgagatcatccattgactgcctctgtttgctcatgtttgatccgatcaaacctgcacttggtgctattgtctcgtctctgaaggagaccaacctgtcaaaaagggcccaaagtttgagaatggttccaccggttgacctgatggagactcagccagaggatctcaggacgcaggagcaacagctcaatgagctcgtggacatccaaatcgaggagattgatggggtcgccaagaacgtcacttcacgtggcaaggataagatggcagagctggcggttcaatgaatctgggtgaggttcctacttcaaacgatgttaaaatgttgtcgtagcttatctggtgaggtctcttttacgagttggcttcttggtagaaagggaatgtcacggcataggcactgagtagattgtcacgacagattattatatacttcaattctggaatatttgatggaaatgctattttagattgcttggtaagtgggaaccgcctcaaatcacagaagtagaagcagcttccgattcagccggaaccatttcttcaaaaatgttctattatagaataaacaaggcttaggagatagaaaacattatttacaatataaatatgtaatattattataaatgtaccgactcaaataaaatgaactggtattgaa

SEQ ID NO: 9146 - DNA, 1265 bp, Zea Mays
atggagtcggccaatgaagagcggaaggaggagagggtcaacgggggctcaatagctggttggtgtagatgttgctggtttgagaatagtggcggcaagatctcatggagagaagctatgcggactcccagaaaaggcgaaatcatcgtgcgattgtggagattgtcgatgggaggctccaccagcgctagggcacaatatgtcgcttcaggcttcagtcggttatgtgatcaccagaacattatgggctctaaagtaggacttttgagaaatgccaggcgatggtgcatgcatgatgaagctgttgtccattatattgacatgattgatcagaccacgcttggtcaccggatgatcaagaaacaattcaacaagactccaagagctggctggcaaatcgatccttttggacattctgcagttcaagcttatttgcttggagcagaggtaactactattaacatcatatttgggatgaagccatttttttaccaaaaccagtatgataagctcctacatttttctaaacagaaaatacaattctcataattatcatttttcagtctggcattgtaggcacatgatatactaattaaagttactaaatgaatattatatttgtacggtggatgcaaatgttaagccttagtgattttcctgtgtttaattctcaatacattttttttcttgacaatcaacatgcgactgtgcaaaacatatgaatataacattttttattgcaaactgtagcttggcttcgattctttgcattttgcaagaatcgattaccaagataagaaaaagtgtaaagctggcaaaggcttagaggatgacatactgatgtttgactataatgttgaagaacgagttaatgattttgttgttgtagccatagaacaggatggccaagtgcatgcactgtattctaccccatccatttacacagatgcaaaacatttgtcaaatgtatcttggccagtaaaatatgatgagtatttcccctatgctgattcaaaaaattcatattggactgggtactatacaagccgtccaactttcaagcgatatgttcgagtgttgagtggttattacctggctgcacgtcaaatagaatttttagtaggtaggaggagttccttagggttgttcacgaccagcttggaagacccaatggcaattgcccagcatcatgatgcagtctcaggtacaacaaacaacacacgacagatgactacttgaaacaccttgctcttggagcatctaag

SEQ ID NO: 9147 - DNA, 1311 bp, Zea Mays
atggagtcggccaatgaagagcggaaggaggagagggtcaacgggggctcaatagctggttggtgtagatgttgctggtttgagaatagtggcggcaagatctcatggagagaagctatgcggactcccagaaaaggcgaaatcatcgtgcgattgtggagattgtcgatgggaggctccaccagcgctagggtgcggccaacaagacgctgctcgccaccgcttgagtcggtagtgagatcttagggggagaagccctgcagcccccatgctcccactccctcctgcaccccacgcttaccggcgagccgctcgacctcattggagcttgccaagccgtcatgtgccccagtgcggtggtcgacatcatccacggcgtcgaccgcgtgctggtcctgcgctcaatgcaggagtccttcaactggcggcggtggagcaaccgtactaccacagcgcgtacacaggacgcagagaacaactccagaaggcgagccccaacccctagatctgcgatgcagtcttctcaactgaaaaaagagggcagagaacaactccagaaggcgagccccaaccccagatctgcgttgtagtcttctcgactgaaaaaagagggcatctctaccgccaccaaccactagcaggcggcagacgttgctggcaataggcaatggcatgcatcaggaaatgccaggcgatggtgcatgcatgatgaagctgttgtccattatattgacatgattgatcagaccacgcttggtcaccggatgatcaagaaacaattcaacaagactccaagagctggctggcaaatcgatccttttggacattctgcagttcaagcttatttgcttggagcagagattgaaatttgtaggatgacatactgatgtttgactataatgttgaagaacgagttaatgattttgttgttgtagccatagaacaggatggccaagtgcatgcactgtattctaccccatccatttacacagatgcaaaacatttgtcaaatgtatcttggccagtaaaatatgatgagtatttcccctatgctgattcaaaaaattcatattggactgggtactatacaagccgtccaactttcaagcgatatgttcgagtgttgagtggttattacctggctgcacgtcaaatagaatttttagtaggtaggaggagttccttagggttgttcacgaccagcttggaagacccaatggcaattgcccagcatcatgatgcagtctcaggtacaacaaacaacacacgacagatgactacttgaaacaccttgctcttggagcatctaag

SEQ ID NO: 9148 - DNA, 1481 bp, Zea Mays
atggagtcggccaatgaagagcggaaggaggagagggtcaacgggggctcaatagctggttggtgtagatgttgctggtttgagaatagtggcggcaagatctcatggagagaagctatgcggactcccagaaaaggcgaaatcatcgtgcgattgtggagattgtcgatgggaggctccaccagcgctagggtgcggccaacaagacgctgctcgccaccgcttgagtcggtagtgagatcttagggggagaagccctgcagcccccatgctcccactccctcctgcaccccacgcttaccggcgagccgctcgacctcattggagcttgccaagccgtcatgtgccccagtgcggtggtcgacatcatccacggcgtcgaccgcgtgctggtcctgcgctcaatgcaggagtccttcaactggcggcggtggagcaaccgtactaccacagcgcgtacacaggacgcagagaacaactccagaaggcgagccccaacccctagatctgcgatgcagtcttctcaactgaaaaaagagggcagagaacaactccagaaggcgagccccaaccccagatctgcgttgtagtcttctcgactgaaaaaagagggcatctctaccgccaccaaccactagcaggcggcagacgttgctggcaataggcaatggcatgcatcagggacggagatctgtcgtcgaagaccacctcattgtttctcatggcaggcttgcttgctctagcttggcacaatatgtcgcttcaggcttcagtcggttatgtgatcaccagaacattatgggctctaaagtaggacttttgagaaatgccaggcgatggtgcatgcatgatgaagctgttgtccattatattgacatgattgatcagaccacgcttggtcaccggatgatcaagaaacaattcaacaagactccaagagctggctggcaaatcgatccttttggacattctgcagttcaagcttatttgcttggagcagaggcaaattttacgcgtacaaaccacataatgtggaccatgggagatgattttagttatcagtatgcagaatcttggttccggaatatggacaaacttatctatcatgtgaacaaggatggccaagtgcatgcactgtattctaccccatccatttacacagatgcaaaacatttgtcaaatgtatcttggccagtaaaatatgatgagtatttcccctatgctgattcaaaaaattcatattggactgggtactatacaagccgtccaactttcaagcgatatgttcgagtgttgagtggttattacctggctgcacgtcaaatagaatttttagtaggtaggaggagttccttagggttgttcacgaccagcttggaagacccaatggcaattgcccagcatcatgatgcagtctcaggtacaacaaacaacacacgacagatgactacttgaaacaccttgctcttggagcatctaag

SEQ ID NO: 9149 - DNA, 1497 bp, Zea Mays
atggagtcggccaatgaagagcggaaggaggagagggtcaacgggggctcaatagctggttggtgtagatgttgctggtttgagaatagtggcggcaagatctcatggagagaagctatgcggactcccagaaaaggcgaaatcatcgtgcgattgtggagattgtcgatgggaggctccaccagcgctagggtgcggccaacaagacgctgctcgccaccgcttgagtcggtagtgagatcttagggggagaagccctgcagcccccatgctcccactccctcctgcaccccacgcttaccggcgagccgctcgacctcattggagcttgccaagccgtcatgtgccccagtgcggtggtcgacatcatccacggcgtcgaccgcgtgctggtcctgcgctcaatgcaggagtccttcaactggcggcggtggagcaaccgtactaccacagcgcgtacacaggacgcagagaacaactccagaaggcgagccccaacccctagatctgcgatgcagtcttctcaactgaaaaaagagggcagagaacaactccagaaggcgagccccaaccccagatctgcgttgtagtcttctcgactgaaaaaagagggcatctctaccgccaccaaccactagcaggcggcagacgttgctggcaataggcaatggcatgcatcaggcattgtttgcacaaaggacggagatctgtcgtcgaagaccacctcattgtttctcatggcaggcttgcttgctctagcttggcacaatatgtcgcttcaggcttcagtcggttatgtgatcaccagaacattatgggctctaaagtaggacttttgagaaatgccaggcgatggtgcatgcatgatgaagctgttgtccattatattgacatgattgatcagaccacgcttggtcaccggatgatcaagaaacaattcaacaagactccaagagctggctggcaaatcgatccttttggacattctgcagttcaagcttatttgcttggagcagaggcaaattttacgcgtacaaaccacataatgtggaccatgggagatgattttagttatcagtatgcagaatcttggttccggaatatggacaaacttatctatcatgtgaacaaggatggccaagtgcatgcactgtattctaccccatccatttacacagatgcaaaacatttgtcaaatgtatcttggccagtaaaatatgatgagtatttcccctatgctgattcaaaaaattcatattggactgggtactatacaagccgtccaactttcaagcgatatgttcgagtgttgagtggttattacctggctgcacgtcaaatagaatttttagtaggtaggaggagttccttagggttgttcacgaccagcttggaagacccaatggcaattgcccagcatcatgatgcagtctcaggtacaacaaacaacacacgacagatgactacttgaaacaccttgctcttggagcatctaag

SEQ ID NO: 9150 - DNA, 1533 bp, Zea Mays
atggagtcggccaatgaagagcggaaggaggagagggtcaacgggggctcaatagctggttggtgtagatgttgctggtttgagaatagtggcggcaagatctcatggagagaagctatgcggactcccagaaaaggcgaaatcatcgtgcgattgtggagattgtcgatgggaggctccaccagcgctagggtgcggccaacaagacgctgctcgccaccgcttgagtcggtagtgagatcttagggggagaagccctgcagcccccatgctcccactccctcctgcaccccacgcttaccggcgagccgctcgacctcattggagcttgccaagccgtcatgtgccccagtgcggtggtcgacatcatccacggcgtcgaccgcgtgctggtcctgcgctcaatgcaggagtccttcaactggcggcggtggagcaaccgtactaccacagcgcgtacacaggacgcagagaacaactccagaaggcgagccccaacccctagatctgcgatgcagtcttctcaactgaaaaaagagggcagagaacaactccagaaggcgagccccaaccccagatctgcgttgtagtcttctcgactgaaaaaagagggcatctctaccgccaccaaccactagcaggcggcagacgttgctggcaataggcaatggcatgcatcaggcattgtttgcacaaaggacggagatctgtcgtcgaagaccacctcattgtttctcatggcaggcttgcttgctctagcttggcacaatatgtcgcttcaggcttcagtcggttatgtgatcaccagaacattatgggctctaaagtaggacttttgagaaatgccaggcgatggtgcatgcatgatgaagctgttgtccattatattgacatgattgatcagaccacgcttggtcaccggatgatcaagaaacaattcaacaagactccaagagctggctggcaaatcgatccttttggacattctgcagttcaagcttatttgcttggagcagagcttggcttcgattctttgcattttgcaagaatcgattaccaagataagaaaaagtgtaaagctggcaaaggcttagaggatgacatactgatgtttgactataatgttgaagaacgagttaatgattttgttgttgtagccatagaacaggatggccaagtgcatgcactgtattctaccccatccatttacacagatgcaaaacatttgtcaaatgtatcttggccagtaaaatatgatgagtatttcccctatgctgattcaaaaaattcatattggactgggtactatacaagccgtccaactttcaagcgatatgttcgagtgttgagtggttattacctggctgcacgtcaaatagaatttttagtaggtaggaggagttccttagggttgttcacgaccagcttggaagacccaatggcaattgcccagcatcatgatgcagtctcaggtacaacaaacaacacacgacagatgactacttgaaacaccttgctcttggagcatctaag

SEQ ID NO: 9151 - DNA, 1571 bp, Zea Mays
atggagtcggccaatgaagagcggaaggaggagagggtcaacgggggctcaatagctggttggtgtagatgttgctggtttgagaatagtggcggcaagatctcatggagagaagctatgcggactcccagaaaaggcgaaatcatcgtgcgattgtggagattgtcgatgggaggctccaccagcgctagggcacaatatgtcgcttcaggcttcagtcggttatgtgatcaccagaacattatgggctctaaagtaggacttttgagaaatgccaggcgatggtgcatgcatgatgaagctgttgtccattatattgacatgattgatcagaccacgcttggtcaccggatgatcaagaaacaattcaacaagactccaagagctggctggcaaatcgatccttttggacattctgcagttcaagcttatttgcttggagcagaggtaactactattaacatcatatttgggatgaagccatttttttaccaaaaccagtatgataagctcctacatttttctaaacagaaaatacaattctcataattatcatttttcagtctggcattgtaggcacatgatatactaattaaagttactaaatgaatattatatttgtacggtggatgcaaatgttaagccttagtgattttcctgtgtttaattctcaatacattttttttcttgacaatcaacatgcgactgtgcaaaacatatgaatataacattttttattgcaaactgtagcttggcttcgattctttgcattttgcaagaatcgattaccaagataagaaaaagtgtaaagctggcaaaggcttagaggttatatagtgtggctcaagaacttttggttcatcttcacaggttcttattcttcttacaccacaattagttctgtctattccattcattagcacaatggatcgaattttgatttttttgaagggaatttgactctgtggtggttaaattgcatatatttacaaatgtatttcctgtcgattatagccctccagatggctttggctttgaagttttagatgaaaatatcttgcatgtctaggtacatgtacgcaaccatttccatgctcctcgaaccttacatgcatcttagattgaaatttgtaggatgacatactgatgtttgactataatgttgaagaacgagttaatgattttgttgttgtagccatagaacaggatggccaagtgcatgcactgtattctaccccatccatttacacagatgcaaaacatttgtcaaatgtatcttggccagtaaaatatgatgagtatttcccctatgctgattcaaaaaattcatattggactgggtactatacaagccgtccaactttcaagcgatatgttcgagtgttgagtggttattacctggctgcacgtcaaatagaatttttagtaggtaggaggagttccttagggttgttcacgaccagcttggaagacccaatggcaattgcccagcatcatgatgcagtctcaggtacaacaaacaacacacgacagatgactacttgaaacaccttgctcttggagcatctaag

SEQ ID NO: 9152 - DNA, 2039 bp, Zea Mays
atggagtcggccaatgaagagcggaaggaggagagggtcaacgggggctcaatagctggttggtgtagatgttgctggtttgagaatagtggcggcaagatctcatggagagaagctatgcggactcccagaaaaggcgaaatcatcgtgcgattgtggagattgtcgatgggaggctccaccagcgctagggtgcggccaacaagacgctgctcgccaccgcttgagtcggtagtgagatcttagggggagaagccctgcagcccccatgctcccactccctcctgcaccccacgcttaccggcgagccgctcgacctcattggagcttgccaagccgtcatgtgccccagtgcggtggtcgacatcatccacggcgtcgaccgcgtgctggtcctgcgctcaatgcaggagtccttcaactggcggcggtggagcaaccgtactaccacagcgcgtacacaggacgcagagaacaactccagaaggcgagccccaacccctagatctgcgatgcagtcttctcaactgaaaaaagagggcagagaacaactccagaaggcgagccccaaccccagatctgcgttgtagtcttctcgactgaaaaaagagggcatctctaccgccaccaaccactagcaggcggcagacgttgctggcaataggcaatggcatgcatcagggacggagatctgtcgtcgaagaccacctcattgtttctcatggcaggcttgcttgctctagcttggcacaatatgtcgcttcaggcttcagtcggttatgtgatcaccagaacattatgggctctaaagtaggacttttgagaaatgccaggcgatggtgcatgcatgatgaagctgttgtccattatattgacatgattgatcagaccacgcttggtcaccggatgatcaagaaacaattcaacaagactccaagagctggctggcaaatcgatccttttggacattctgcagttcaagcttatttgcttggagcagagcttggcttcgattctttgcattttgcaagaatcgattaccaagataagaaaaagtgtaaagctggcaaaggcttagaggttatatagtgtggctcaagaacttttggttcatcttcacaggttcttattcttcttacaccacaattagttctgtctattccattcattagcacaatggatcgaattttgatttttttgaagggaatttgactctgtggtggttaaattgcatatatttacaaatgtatttcctgtcgattatagccctccagatggctttggctttgaagttttagatgaaaatatcttgcatgtctaggtacatgtacgcaaccatttccatgctcctcgaaccttacatgcatcttagattgaaatttgtaggatgacatactgatgtttgactataatgttgaagaacgagttaatgattttgttgttgtagccatagaacaggtaaactttcaatattgttgccacaggctgtagttcactagagcaattaattatgcttcgttcaaagtaagaaattggatttaattaacttgtgatgatcaggcaaattttacgcgtacaaaccacataatgtggaccatgggagatgattttagttatcagtatgcagaatcttggttccggaatatggacaaacttatctatcatgtgaacaaggatggccaagtgcatgcactgtattctaccccatccatttacacagatgcaaaacatttgtcaaatgtatcttggccagtaaaatatgatgagtatttcccctatgctgattcaaaaaattcatattggactgggtactatacaagccgtccaactttcaagcgatatgttcgagtgttgagtggttattacctggctgcacgtcaaatagaatttttagtaggtaggaggagttccttagggttgttcacgaccagcttggaagacccaatggcaattgcccagcatcatgatgcagtctcaggtacaacaaacaacacacgacagatgactacttgaaacaccttgctcttggagcatctaag

SEQ ID NO: 9153 - DNA, 4745 bp, Zea Mays
agtttggtgcggcacaccacaaggaagagcacagaaaatcccaaattcccaccacgcaggtcgcaggcgcacccgtctctcccttcttcctcctctccctcttctacacccgacaggcacaggcacaggcacaacgcatcgtccccctccctttccagcgccccaaccacaaggaacagccgaacaggtcggggtcaagccatcggaccttgattccgcttgccctcctgctttatcccgccgccgccgtcgtcgtctcaaccgcccactccttcctctccctgccgctcctgcgaatcgcgaaatcggagacccccggaccgccctccaatgacgaccatgagcgacgatggtgaccgcacctgcccgctctgtgccgaggagatggacatcactgaccagcagctcaagccatgcaaatgcggttatgatatttgtgtttggtgctggcaccacatcatagacatggctgagaaggaggaaacagtgggccgctgccctgcatgccgcacatgctatgacaaggacaggatcgtcaagatggctgccacttgtgacaggacagtggcagagaaaaatgcagagaagaagcacaggacccaaaaggttaagccaaaggcagcaccttcagcagcagcaacatcaactgtagaatctaagaagcatctggctagtgtcagggttatccagagaaatctggtgtatataattgggctacctgcacatttatgcaatgagagcgtacttgagtgtagggagtactttggccaatatgggaaaattttgaaggtttcagtttcccgtccgactgggcctccctctcagcaggcatcagcaaacagcaatattagtgtctatattacttatgccaaagaagaagaggccatccggtgtattcaagctgtacacaattttgtcttggaagggaaagtgttaagggcatgttttggtactacgaagtattgccatgcatggctgcgaaacatgacatgtgggaatccagattgtctctatttgcatgatgtaggcagtcaggaggatagttttactaaagatgagatcatctcagcatatacaaggactagagtccctcagatggcatctggtgtttcgcaaagacgcacaggcactgtgttgcctcctccaggagatgatttctcttacagtgcggtggtttcagccaagcatacatttaagaatggaacactttcagcccagactttcacctccaaacagtagttctgggaggtccacgcttccatcagctgcctcatgggggcagcgtgatttgaatgccaggacaacagctactggagcgacatcgtcacaatctcatacaaaaccaaaatcagaatcacaaagtaatccattttcaagttcttcagtattttcctgtacaaaaacaccctcttcatggaatgatgatacaagtacagcagcaaaaatatctgaaggacagcaactgtcagaaaaagagtctagaaccttgcagccgtataagcctggtatttcaaaggaaacacaagctttatcatcactggagtcatcactggacatagacttctcaacaataccttcagcttggaatgacgatgacattgtagtaccagatgtgatgccaaaaggaagtgatgaaaatcaagttgcaaataaaaatggtgagctaacccatccagcatccaagtcactggttttatctaagaaagacataaaaatgaacattaccagcaaaactccttcagattttgtatcaagtccagcaatatctaaatcagatgtaagtactagtgatggtgaccactcactcaccaatattactcctaaatgccttgcttcaaatgctgtagaatgccaatctagtcatactgctgtggagaaaatgttggaggatattggatccaaggacactgacatggagaagctatctgctcagatatcttcagtaacattaggtggcaacgacgagattcagagtatggcaggaaatcaacaaccagatgtaatgccatgcacatctgttgatgtgctcatggatcagaattttggcagagacctagctcatcccaatcctgacgagctcttattgccttctgaaaataaggatagtattgtttcttgtcaatatagttctgataagcgtcttgattggagtttggagatgcaaaattgtagcgttactcctttaaatgatagaatggactctgcactgctcactgacaaaattcatagtagacagctggatggttcagagcaatcatcatattcatcatttgttgaatttcctagtacagtggatacctcattgtggaatgatacagaaaataacgctgcattgacgattgacaatataacttcttcacagatgcagccagggttttcttcaactgataacacttatgccttgctaaatggaggtcaagatgggctaggtactgtatatacacatgataatgtttctgtatatacacatggcaatgtttctggacatcctggaatgggaagtcatcaccatagagcaatgggttcattaagaaacaatagtataggaagttttgacaagaccataagcgtaaataagtatgaaagaagaataatttctgatacgttgtcagagtttaatccatgggatgattcatattcgactgctaacaattttgctaggatgcttagggaatctaaaaataatgatgtccattgcattgcgccttcatggaaatcaggaaccgggatcaaagagtccagattttcatttgctagacaggataaccaaggaaacttgtttgattcatctctcagaaactgtggtactggtactgagcagaatttcagtttgctaccccagaattctcgaggaaatatttaccagaatggccttgcattccaatctctagagaatgaattttcaaacaataactctcctggtgtattagatatggcaactactggtgagtgctattatacctttttacttctttgcctgactgagcagaatgataagtactgcaatttgaatgaatttactctgtgtgccacacttatttttcattgagcattggtaaagatattctgactcatgcaaatggattgttgatctattggtgcttattatgtattttttcccactgttaaatttattttttatgaagaatttgctttctcaggtacatcgatgtctaaaatatctgcccccccaggattttcggcaccaacaagagtaccccctcctggattttctactgcatttccatcccaggatagtttgaaccccactcctgtgtttccttctggaattttgtgccatggcgggtctatcccccctcctagattctcttcattttcttctggaatttcaactcaggaagtgtctaagcctcctactagaccgccttctccattttcttctagattttcatcacaggacggtcttgacccctcttctagattccctttttcttctggattttcatcacatgatgggtctaatcagtcgtatggctcaacgaacccaggtttgtttcctgcctcttattttcctagaactagtttgatttctcatcatgccttttgtggtgcttcgcagaaaatcttctccggggtactgttcagggtggcaacagtaatcattatcaatctcagtttggaaggcactcaagtgacatggagtttgatgatcctgctatattagccatgggcaaagggctgatgcctggaattggcgattcagggctggagatgaaaaatactcctgcttttcaagcacagttgcaaccagcaagtagtgatccaagatttcagttacatgtacagccaaatgtgcagtctcgtcaaaacatgagattcacagaccctatgcaagatggtttgaaccatatgaacgataattacctggcatccagatttttagctcagaaccagggtcctctatctccttatgtgcagattccgcaacaacccagaaactcgcaggttataaatggtcactgggacgggtggagtgatttgagacaagggaataacgctcctatgtcagacatgtccaggatattatatccaagtgaagtgaacaagttgcatatgctgggttcaaatgatgtccataacagagcctttggaatgtgatcgtctcctgggataatgtgcgactttgagctgacatgttcaacttggggcgttttgtgcaagtaactggttgcacaacacatagtatacctgaggtggttaatggtgttgtgctcatgagctggcacacgactatttattgctgttggagttgaccaaaatgaaccttagttttggtccatccatttggaattaccaggttcattctcgtctatgatttgtgaagcttgaatgaaaagaaagattacgtgcctgagaagaacaaggcagctgaagttgaaatagatagagatatgtctattatgggatgtggtgtgacttgcgagcgaaagagatgaagaagattaggtgggcttggcttgatggcagcttgttttttcttgtgtcttgtacatgatgatattggtcggtggttgtatatgacttgtgatcgacggtggctgcattaacctgtagtggttgcccttgctccttcctgcctgttttgtttgcagctcctcctgttttgcatagtttatgctgattaagggaattggtgaaagtctagtgttacccatggtataataatagggaactggtttctttgttagcattacttcatttgtctaaaaaaaatccgttaaccg

SEQ ID NO: 9154 - DNA, 2624 bp, Zea Mays
atggaaatggcatctctgattgctggtcgagtggttgcgctgcatcggagtttaccgccacccgttgaagggacggtggcggacattattgtcatttcgtctcgtcctgttcttttaaatactcccaaatatcatctcctcggaaagaggagcgaagagagcgaaatccagagcacacggcgtcgcatttggaacgctcctgctcgtcgcacgtacgaagcccacgcgtccgcgcacgtgccagagccgagcccccgcgccggcgccccgccggagaggatgacgcggcggtgctcgcactgcagcaacaacggccacaactcgcgtacctgccccgtccgctccgccggcggcggcagcggcggcggcggggtgaggctgttcggcgtgcggctcacgacggcgccggcgccggcggtgatgaagaagagcgccagcatgagctgcattgtgtcctcgctcggcggcggtttcggcggctcgtcgccgccggtggaaggagtgggtgctggcagaggaggggaagacagtgggaccggctacgtgtccgatgatcccgcgcacgcatcctgctcgacgaatggccgcgccgagcgcaagaaaggtacaccttggactgaagaagagcatagaatgtttctgatgggtctgcagaagcttggtaagggagactggcgcgggatatccagaaactttgttgtttccaggaccccgactcaagttgcaagccatgctcaaaagtactttgttagacagacaaactcatcgagacggaagaggcggtcaagcttatttgacatggtcccagaaatgccaatggatgagtccccagctgctgtggaacaatttactctccaaaatactcaagatgaagatacaagttcaaatcacgtgccaaccttacatcttggacaacggaaggaaacagagtttgctaagcagctacaaacttttcagccagggcaccatgagaaatctgaatacgcagaaccttcattgctgctaccagatttggagatgaaccccagtgtaccattcaagaccataactgatccaacaggaccagcattctacccatcattggtccctgttccactaactctttggcctccaagtgtttcccacgtggaggaagcagccagaacccatgaaatcctaaaaccaactcctttgaatggtaagggggtggttaaggcagatgatgttgttggtatgtctaagctcagcatcgacgaagctagctctggctccatggaacccactgctctttcccttgagcttattggatccacagatacaaggcaatcagcttttcatgtgagtccaccgatgaatagacctgaactaagcaagagaaacagcagtccaattcatgcagtttgaggaagcatgaaacatgcccgctgggtcaagtcttacaaattatactgatggtctcaatacctcagaacgtgaccatgtactttgtaacgactttttagttatcctgtttccagcttatgttccttgccatcgacaaatgtagagagatacatgtgtcaatggaagtagcatgccattagtttcagcactgaattgttgcctgttgggacgccatatgcacctaccttttctggttcatcctccatgcttcaggaaatcgatgtggaaattctgacatgtaaatgcttgaattagatgcctttgaattcttaatttttgatggaatggttttggtgtagaggggttttctatcaactttcaaggatcaaggtatgatggtgcagcggcaaaaatctggctggacatcaaacaagattagaagggttgcagttgtcaacttggtgatcagttcaagatactctattaactgcaaaatgcagggtgatcaagtcagatgtgttgtgccagtacccacgatttcagaggaagaagccggtgccgggatcgccaatgcaaagcaaaatatgacagcatcgagatcacgattcggcttgatctgcaatctcaggatattcagtacgtgacgagagaacactatgactcctgaattgaggtcgtcaatataaataatgcaggatcgctgcaaagattgcactgccgtagagtagtgcgagttaagcagacggccgtgtcaaacaagcaggcaggttcttcatcgatcggcatcatccgagatgtctagctcgatctaatagagtctccagttttgtgcgaagatcttcagctacagcttccttactagctgacgtcttttttttccccaaagatctccaaatgtggaagatcttgcagagagtttgcagccaagatctcttcaaagatcacctgtaccttgccggactgatcttgaagccaataccaactcttccagaacatgtgtgccttaacgaaagcgtggaatatgtgcgggaaaacactagataattttcatcgaaccatatatatagatactacatatacatgagcgttgaagccaacatatcaatacccccttcggctggtcaaggcagatatcgtcaagatgaggagcatgaaggatgtcgcgatgagttcatgagaggtctaggccgtcgcctcccagtcaactatggttgtaggggatcgttgtcttcatataatgtaattatttagttattttgtat

SEQ ID NO: 9155 - DNA, 1804 bp, Zea Mays
gcggacacgaaatcggattctaacgcagctctgagcagcggtgtcctgagtccgtgaacgtgtcctctcccccgcggttcccttcaacgtcgcctccctagagatccgccgcttctctgccctctgctcgtcgattcggcgcctcctctccttcacgcgcccacgctgccgtcgcctcctcctcactgtcgtccatgccgtgtagccgcctacggccatggccgctggagccagcgactatttgacggtggagtaccactccagagactcccctctttcccctccgacgacgagggagccaccggcggcagcggcgtcctcgtacaccacggtgggcacggtgggcgatcttctcatgaagtggtggtagtgcctcgtggacgtcgacggagacgcggcgtgcctgcccctcgtcctcctgctccttgtcttctccgccgccccgtctcctgctcacggctgcgaccgctgcgtgcgccggtccagggccacctattaccaggcctcctcgctcgccctcaacggtggggtcgtccaactggcggttcatgtcgcgggaccacgggccggcgtggagcacggcgcaggcgccgctgtagttccggctggtggtgaccggtggctacgacggcaagtgggtgtgggcggagtcggaggtgctgccgcgccggtgggaggccggccgcgtctatgacgccggggtgcaggtctccgacgtcgcgcaggaagggtgctacctctgcgacacgcgcaagtggcagtgatgctcgcacgagctggattgtacagttttttgttttggtcgggaatgggacgaaagatatgaaatgatgattagcggagccggagagccgaatcaaatctattaaccggtggcgctggaagggagttttttggaacctaagatgtcgttgaagaacatcccgttactccacgccggacttgccgcgcgccgcatgcaaggtgctcgacggtttgctgctgcactgggcaggcatggcagcaggccggggctactgggaggacaggtgcgccggatgttctcgccggagaccaccgtcccggagccgctgcccaacccagactactccttcacgttgaagtacatcgtcggtgtcctccgacctggcagcatctcgggttgctgcagttgatcgccgtgccgcgaggatgacgtcgtcggtgtcctccgatgacaaggaggatgacgtcggcggctccggctccgcgaaggcctcaaggcctgcagcagacttccgcctctcgtccatggcggcctctacggcctgcattgagagcttcacaaacctcatctccatcccaatctcatttgtgctactcgcatcgttcttcggtttctttctttggaggaacaagatggacgacacacacgaggttggctgatgacgctcgacatacgagagcaacaagatgcgcgaagagcaagctgcgacgcgtgctactgtgccagtcgcccactgcctgctctgcggagttcaccatggaggttggcgacgaactcgtgaggttggacaaacaacgtcgggtccgacggtggaggatccatttccgacgaggtagagccgggagccggcaactgggagtgaaacacagaggaatggaagagccgttttgctccatggttacggttgatgcctgtttagagttgttaaaattggagaggatagcaaaagaacaaagagccagctgttataatactactattctaattacaagtttgggaatactatttttaagaagcccagagattgggacaccacggttccaaaaaactcgctggaag

SEQ ID NO: 9156 - DNA, 2036 bp, Zea Mays
atgccgccgcgcctctcccaccgcagcaccgccgccgtacccacgcttctcctcctcctcacccttctcatgctctcccctcctaccaccaccgccgcggcgcagcaccactgccaccgccaccactccacaggcgacggcgtggtgatctcccaggctgactaccagggcctacaagccatcaagcacgacctgtcggacccctacatcttcctgcgctcctggaacgacagcggcgtcacggcctgctcgggcgcgtgggcgggcatcaagtgtgtcctctgcagcgtggtggccatcacgctcccgtggcgaggcctgggggcacgctctccgcgcgcgggctcggccagctcgtccgccttcgctggcgccatcgcgggggccgtcccgtcctcgctcggcttcctcacagacccctgcggcgtctacctcttcaacaaccgcttctccgccgtcgccaactccaccaggctcatccagcttaatcttagtcggaacacgctctctgacgccgtccccgtcgaggtcgtcgcctccgcgtcgctcgtgttcctcgacctctcctacaacaacctctccggtcccatccccgacgccttcgctggctccgacaagtccccgtcgaagctcctcaacaacaacaacaacaacaaggaggccatcaccgggagctaccagctcgtgttcctcagcttggcgcacaacttcctcgacgggcccatcccggcgtccgtcaccaagctgcagcagctcgacctgtacagcaacagcctcaacggcaccatcccgactcagctcgccacgctcgccgacctaaaagtgctcgacctgtccgggaacgcgctatccggcgacatcccgccggggctcgacaacctcaccgccacgtgttggaattgatctccaccagttagcccaacggttaactgggcccttgacctcgcgccctgatcgggggcgtccagcccaagacgaggctggtgggcccctgttgcgtagccctataaatagagaggtgagggtcgacggctgagacaagaggttcacttccgtctacgtttctccacctcaaccttagaccgatctcgagggaaggctgtcagcaacaggaagtccaccaccgtcgatgccgagctcgcttccccgaccgtcgctgctgtagcgcagaacttcaccaacgaacgtgatggcgagcgaatctaagcaaggtacaatatgtgtttgtgctttgatctagtggttaggattattggggagatccaaaagtctatcaatggcatcaagagccaggttagttccctaaatctctagcccagttccgatccagttcttcaggtccgaacaaaagaagaacagatcaaatgacccgttttcgaattgagaaaagcaacgaaagaaaagatcgattgatgaaaatcgaagaaagaaacagaacagcacgcgtgcgtgtgaaagaaatagagaacgagcggtggtctcatctgcacgctatgggagagaggcgtccacgcgcgcaagaaaaacagaggcgggggccgcacgcctgacggcggcgctcgcgtgcacgaaggaaggcgtgcctgctcgctcgcgacgaaaagcggcctcgcccgcatgccacggcagtggctgattccccgtgcgaagcatcgtagcacacgacgtgcgcactcgagagaaaggcgagaaagaaaggccacgcttcgtccatggcggcgcggcgacacggcgcgcctgcgctcgcacgctcggagcagatcgagctgcggcatgcgcggagaagatggccggtggcgagcgcccgagaagggccggcagcagcgtgtccctcctgctgcggcctgcgtagatcgggacgcgcacgcccgcggcagcgacggactcgctcgcccgcctatggccgcggcggtcctgctcgcgcgcgcggtggcatcccgcacaccggcttccgggcgaggagggagaaagggggcgctgaccctgtcttctcggcgcaaagatcgctgctggccaacaggacttggtggtggcgg

SEQ ID NO: 9157 - DNA, 1784 bp, Zea Mays
ttttactagcaatggaaaggagaggagcaaaagagggagccaaaacatagcaaggaaaaggaaaaagaaaatgatcctctctccccagcacttgcgacaggtactagcaggctagcggctgcctcccttgtccccaccggccgccaccaccaccaccacggcaccaccacaccgacccccttcccctcccctctccctgtcgtgcggtgcctcctccgcccaaatccccaaatccgcgcctccgatccgccgccgtccacgatctgccgcagccgttgacccgctaaaaatggcctccgggccgccctcgccatccggcaaaccctactcgcgcaaatctcacgccagctccaaggctcccagcgtcccttccttcgacgcccacaacggccagctcctacccaccgtcaccttttcgctgccctccacgaccaccgcccgccgggagctgcgccgccgcctctcttccgagctctcccaggtgcgcgccgccgtcaagcgcctgaactccctcccggctcccgccccctcctcggcgctctctgccaccgacccctccacgccgcatccgccgtacccgccggcgtccaagcacaagtctaagaagggcggcggagtcccgcagccgcacctctcggcggaggcgcggcgcaagctctacgcgcccgtgttcaagacctgcgccgctctgctctccaggctgatgaagcacaagcacagctgggtgttcaacaagcccgtagatgcgagcgcgcttggcctgcacgactaccatacaatcatcaccaaacccatggacctcggcacagtcaagtcaaagctaggtgccgggcagtacaagtcaccacgggaatttgcaggtgatgtgcgtctgacgttccagaacgccatgacgtacaaccccaagggccaggacgtgcacttcatggccgagcagctgcttaacatgttcgaggagaagtggccggagattgaggctgagatagctcagctatcaccacagcctcctacaccatcctcagcagcacccaaaaagccaaagccaaaggagatagataattctaggccgttagagaggtctgattcgacagttcatgctgccgggatagaagctaccccgaagacacacactggcagaccccaagttttaaagaagcccaaggcaagggagcccaataagagggatatgacattctgggagaagcagcggcttagcaataacctccaggatttgccaccagagaagctagacaatgttgttcagatcataaagaagaggaacttgtcactcagccagcacgacgatgagattgaggttgatatcgatagctttgatgttgaaacattatgggagctcgatagattcgtgacaaactataggaagagtataactaagaataagcggaaggctgagctttctgcggtaaggccggatgaagctgatcctgatcaggagccggagaaggtagaacatgtgaggcagggcaaggcggatcaggatcaaattcctgcagtacaagaaccgattccagaaccagaaacagttgatgttgatccacctaaggaaagtgcagcagatgataatgagagatgtgtgggtgaatcatcacctggtcatttggaagatcagaagggagagaatgctggtagatcaagtagttctggaagctctagcagtgactcgggttcatcctctagtgatacggacacagatagttcatcagcagatggttctgatgctgggcaatcacccagaacgtagcatctataagccagaatttcac

SEQ ID NO: 9158 - DNA, 2470 bp, Zea Mays
cttgctcttgctcttgtattcttgcttatactgtgggccatgctcgggaactagggctgaagattgatgcagtgccattgtgccaataagcaagaaaggcccactaaagggcaattgacgctgggcggcgacggcggggggagactgagcggccgaggagccggtgtggcatcggtgcatcgcagcggcctgaggtcgcgagcagcacagcagggtgcgccaggcgccgacgcggtacggggcaccgcgcgacgcgtgagcgcgtggccggtctcagcaccaagacgcatcaaagccggcgctaggcagggcactatcgcgctgctgcgcagctgtgcctgcgctggtccctggaggattagtgacagcactcaccaatttgtgttttgcagaattgggagaaatcaaataacttcacaacagatcaggaagctttagagcttggcaatggagatgagagcccgggaatctgtaagcatgtcgaaggatctaactggggaaatcacaccttttgccactgccctacatgatgtgttcctccactcccattgctcatcatgcttcaccaagttacttccacaaaccccttgtgtcatgtcttgcatgacatgctgttctcttcgatactgctgttcagagtgcttacgtgcggattcagtggtgcatgtttcctctggtgaatgttgcttttttgtggatcacctcaagagagcctccccttcctatgttactgaaggaacgagtgatttgcgtgctgccctccgccttctgtgtgtgcttgagatacatggtcttgtttcgcctgattcaatcaatcactacagtagaattggtggactttcagcaagtggtattgaggaagctttgaaggaaggtgaggttattgctgagaggatactggaggggagcttattgatgtcatctgctagaaaatcgagggcacagacttgtgttattttttcagacaggcttaaacttgagaagatggcattatgggcagtgattatcaatagcgtcgaggtgcaacttagtgaagggttagctttgggagttgcagtgtatggcccgagtttctcatggttcaaccatagttgctttcccagtgcttcttaccggtttgtactggctccaaggaatgaagactgtgcttcacagaaatcaaaatccagtgtagtccctgctagcaaaggagttgcagctgatgtgtggcatgcttggcaatacgaagatcattctactcatggaagcaagacattcggatttgtggtcaaagtataaatttatttgttcttgcaggcgatgtattgcatcaccagagccatacactgatcttattctgaattgtgatgtgagggacttggataaagcagaagcagagggtactgttacacctccagcaattgagaatttgggtgatgtcctacaacaggcaatatctgagtacacgtcaaatgatgaccctgaagcttgctgtgatatgattgaaaccatgctttccaacaggttggtgagtggtttgaagcaagaggatatttcagggagaaaacatatactacagcctcttcaccatatctgtcttactgcttacatgacacttgcctctgcttaccggtttcgcgccttaagtttagaagaagctgtccgttcagatggagaaaatactgatgaattttttagaatggctaaagcagcagcagcgtattccctggtacttgcagggagtacacaccatttgttcttatcagaatgttctcttatgatccccctgtctcattttttgttaaacactggacagtctctgttatatcttgttgagtctatcaagggaaagacaaggcaaaatatatccgaggccaggctcagcttttcttcatgtccagcaagttctacagacaatgattctccaccgtaccatgtgttcagatcaacctgtgaagcgtttggcaagcaaatgttatccctgtcactgcggtgctggtcatttctagtgcgaggtttaccctgcctggaaaagataaagagccccatggaatttagtatgcccggaacaacaatatttcagtctgtcctttctgaggaagaccatgccaacctttccgcgcacgagccagtaggtttcacggagagacaagcggggtgcatccttagtttggctctatgttgtatcacctactgcaaatatcttgctaccatatgctacggcccacatcattatctggcagaccatgcaaaatatctacttgaaggtatcgatcctgcacaatgaatcttctttcttggcataggtgtgttgtgaaatcttatgctcttatgagttaatgtaaaacgtgtcgtgattatcaaggctgttgagcttattttctatatgattgtatgctgagctcgttatttattattttgtatggaagcaccatttttctaaaaaaatttggtcactgggaagttgtatcactgatcttgcacctttcct

SEQ ID NO: 9159 - DNA, 2895 bp, Zea Mays
tccccatgcccactccttgctcagttgctcttgctcttgctcttgtattcttgcttatactgtgggccatgctcgggaactagggctgaagattgatgcagtgccattgtgccaataagcaagaaaggcccactaaagggcaattgacgctgggcggcgacggcggggggagactgagcggccgaggagccggtgtggcatcggtgcatcgcagcggcctgaggtcgcgagcagcacagcagggtgcgccaggcgccgacgcggtacggggcaccgcgcgacgcgtgagcgcgtggccggtctcagcaccaagacgcatcaaagccggcgctaggcagggcactatcgcgctgctgcgcagctgtgcctgcgctggtccctggaggattagtgacagcactcaccaatttgtgttttgcagaattgggagaaatcaaataacttcacaacagatcaggaagctttagagcttggcaatggagatgagagcccgggaatctgtaagcatgtcgaaggatctaactggggaaatcacaccttttgccactgccctacatgatgtgttcctccactcccattgctcatcatgcttcaccaagttacttccacaaaccccttgtgtcatgtcttgcatgacatgctgttctcttcgatactgctgttcagagtgcttacgtgcggattcagtggtgcatgtttcctctggtgaatgttgcttttttgtggatcacctcaagagagcctccccttcctatgttactgaaggaacgagtgatttgcgtgctgccctccgccttctgtgtgtgcttgagatacatggtcttgtttcgcctgattcaatcaatcactacagtagaattggtggactttcagcaagtggtattgaggaagctttgaaggaaggtgaggttattgctgagaggatactggaggggagcttattgatgtcatctgctagaaaatcgagggcacagacttgtgttattttttcagacaggcttaaacttgagaagatggcattatgggcagtgattatcaatagcgtcgaggtgcaacttagtgaagggttagctttgggagttgcagtgtatggcccgagtttctcatggttcaaccatagttgctttcccagtgcttcttaccggtttgtactggctccaaggaatgaagactgtgcttcacagaaatcaaaatccagtgtagtccctgctagcaaaggagttgcagctgatgtggtaaaggagaataatgaccattttgtttaggacctgctaaaattttgcttgtgtcatacaaagaataagataaaatatttgaatactgttcacaacatactttcattatcataaacaagtgctatttgaatgtttatacataaatggttcctcaaacactttcataggctgaatctaaatattcatgaatatactcattaactcatgtttaaatttcaatagttagacaatatttatatagaatttacttgagagaaaatcattaagcctattattgtgcttgtttttattgcagtggcatgcttggcaatacgaagatcattctactcatgcactgtgcaaatatggcccaagagttgttgttcgttgcataaaaccaattaacaagggagatgaagtgtgcataacatacattgatcttctccagaccagggaagcaagacattcggatttgtggtcaaagtataaatttatttgttcttgcaggcgatgtattgcatcaccagagccatacactgatcttattctgaattgtgatgtgagggacttggataaagcagaagcagagggtactgttacacctccagcaattgagaatttgggtgatgtcctacaacaggcaatatctgagtacacgtcaaatgatgaccctgaagcttgctgtgatatgattgaaaccatgctttccaacaggttggtgagtggtttgaagcaagaggatatttcagggagaaaacatatactacagcctcttcaccatatctgtcttactgcttacatgacacttgcctctgcttaccggtttcgcgccttaagtttagaagaagctgtccgttcagatggagaaaatactgatgaattttttagaatggctaaagcagcagcagcgtattccctggtacttgcagggagtacacaccatttgttcttatcagaatgttctcttatgatccccctgtctcattttttgttaaacactggacagtctctgttatatcttgttgagtctatcaagggaaagacaaggcaaaatatatccgaggccaggctcagcttttcttcatgtccagcaagttctacagacaatgattctccaccgtaccatgtgttcagatcaacctgtgaagcgtttggcaagcaaatgttatccctgtcactgcggtgctggtcatttctagtgcgaggtttaccctgcctggaaaagataaagagccccatggaatttagtatgcccggaacaacaatatttcagtctgtcctttctgaggaagaccatgccaacctttccgcgcacgagccagtaggtttcacggagagacaagcggggtgcatccttagtttggctctatgttgtatcacctactgcaaatatcttgctaccatatgctacggcccacatcattatctggcagaccatgcaaaatatctacttgaaggtatcgatcctgcacaatgaatcttctttcttggcataggtgtgttgtgaaatcttatgctcttatgagttaatgtaaaacgtgtcgtgattatcaaggctgttgagcttattttctatatgattgtatgctgagctcgttatttattattttgtatggaagcaccatttttctaaaaaaatttggtcactgggaagttgtatcactgatcttgcacctttcct

SEQ ID NO: 9160 - DNA, 9447 bp, Zea Mays
gagagtaagatgtaccttgataccatcaccagcagcactgtgtcttctcttggtttacataattcgaagagttgctggcttaaaacagcggtgtgggtcgtgtttcctacttgttttagtcggtgatccgtagaacttctaagggttattcgaagattgaatttgaaagagcagtggactgacttgtcactccactttataactttgtactctctgaggtcaactatatctgaaaatgttcgtgcacaaaatcatttcagaagtatagggggactggaggttctattagatggactgggactgccatcaagcaaattttcagtctcgaagcagtcttttgttcccagtgatgaaaggagtggcattctccagctccagatactatatttggaaattctgagggaagcagtgtatcctgtcccattatttttaagtgcttatcatcagcaaaaaattcttaatgctcaggccatcctgaaagctgataaagaaagcactgggccttcaccaacattggaatctttctcaaatcctgtagatattcttgatacatcagaatggaacgagtattctgtaaaattaagcataacactttgctcatttctccttcctcccaaggagatcaaatactgccctgctccaactgatgttacccaaatttcactatccatctcattggcttactgggagcaatgtgcaaggtggattataaaggttctttcaacagttttcccgtgcatgaaagcttgtgctagtgaaactgatttgcctaaccatataaggattttagcaaataccatgcagcattacatgctttgcacgtttaggaaggttcttatttcagcaccagctctacttaaatcttttcgagaggagggtctctgggatctgatattttcagagaaatttttctactttggatcatctttggactacattcaacagaatgatcaacttattgatgctcccaaatcaatcgattccaaaagtttcagtgaaaccgatgtcaacgttcttcaagcagaagctatttccttcttggagtttgctgcaacactcaatgaaaactcaaataacttgccagaatgcttagcattggtaggtgcacttgaacattgtacctatgatcctggattggccggtggtattgttaagagctttcacgtgatcctacaacttgcaactgaacaaactctagcttctttcaagtcaattgatgtgctcactagagtcctgaaggttgcatgccttcaagcacaagaaataaggaagctgtcccaagatgacttaaatcaaaatggttctcaatccagaaatgctcagacgacttattcagatgagagaattaagaacacttgtgcatttgtgaaactggctttcaaccttttcaaggagtatgccacaatatctgacattggaaggattacagttttatgcaatgctaattgcatcgagtgtttatttgatttgttccaagaagaatacctcaggaaacacatattggagcaagtacttgccttatttaggttaccttcgtcatcagcacaacaccacgcagcaaagatgctactatgctccaaatatcttgagactttcactcgtgcaaaagaaaaggaaaaggcttttgcagaattgtcaattgatctattagtcaatatgagagaggtcataatgatagaccgtgtgtattatcaaaatctgtttcgcaatggggagtgcttcttgcatatagtctctttgctgaatggaacttttgatgaagcagttggggagcaattggttcttaatgtccttcggacactgactgctctacttgctgaaaatgatgagtcaaaggctgccttcagattgctggtcggtgcaggttatcaaacactgcaaagcttgctattggacttctgtaagtggattccaagtcctaaactcctggatgccctacttgacatgcttgtcgatgggacatttgacataaatgaaaaagcaacaataaagaatgaagatgtgattatgctattaataaatgttctgcaaaagagcagcacttcactccagcattatgggcttatggtcttgcaacagttgctcaaggggtccattacaaatagaacttcttgtttcagagcagggttgcttagtttccttcttgattggtttaaagttgagaaagggaatgacattgtaatgaaaatcgcagaaataattcagatcattggtggacacagtatttgtggaaaggatattcgaaaattttttgccctccttcgtgacgaggagattattgcaaagcagcagcacagttcattgcttttgacaagtgttagtcacatgctcaaggaaaagggtcctgaagctttctttgagtttagtggtcatgactctggcattgaaattaaatcatcagttcaatggccttacaataaaggtttatctttctgttgctggctaagggtggaaagtttccctgagaagggtttgatgggtctttactctttcttcactgaaaatggaaaaggatgtttagctatgattgggaataatactctaatctatgagtctgtcaatccaaagcatcagtgtgttttgttatctctaagcctccctatcaagcaatggaaattcctttgtgttactcatacaattgggagaaccttctctggagggagtcagctgagatgctatgtagatggcgatctagtatcaagtgaaaagtgcaggtacacaaaagtaaatgaactaatgactcgctgtagtgttggtacagaattgatgcccatcggtgaagaaccttcttctcttggctttgagaacactcttgcttttactggtcaaatgggccctgtttatgcattttccgatgctctctcccctgaacaaataaggggcatttataacctaggaccaagttacatgtactctttccttggtgatcagaatttgcttacaaatgatgactcacggtacaagggaatacttgatgcaaaggatggcatttcatcgaaaatgatttttggcttgaatgcacaggctagtaacaatcggactttgtttaatgtatcatctgcactggatggtcttgacaagagtaagtttgaggcaaccaccatgggtgggacaaaattatgctcccggcgcctgctgcaagaaataatctattgtgttggtggcgtttctgtatttttccctcttctgatccactttgatgatgctgtggttcagaatggagagtttgccaccagagatcaattggctggtcaagttattgagcttgttgcatctgttctagatggaaatatagcaaatcagcaacagatgcatcttctttctggattttctattttagggttcctgttccagtctgtttcaccgcagctgctaaatatcaagactctttcagcatcgaaatacatgtttactattttgaagacctctagcatgtcagatattctattgagagatgctctttcacagttttacttgaatccacatatctgggcatatgcaacctatcaagtacagagagaactttttttgtttctgatacaatattttgaagctgatgggaaatttttaccagtattatgtgcgctccctaggatcattgatgtcataaaacagttctactcggaaaagctagatccaaggttttctaagcctttgctggtaagcaaaaaggtgactggggagagaccaagcatggaagaaattcgcaagatccgacttctcctgttgagtctggcagaaatgagcttaaagctaaaggtttctcaacatgatatcagagctcttgtttcctttcttgaacgaagtcaagatgttgcatgtgttgaggatatactccatatgattatccgcgccctttcacagaactcgcttgtaccatctttcttggagcaagtaaattcacttggtggttgttacattttcatcaatcttcttaagagggaatttgagccaatccgcctattgggccttcagcttcttggaaagcttttggttggggttccatctgagaaaagagggccaaaaatttttggcctccctgtaggacgacctagatccattgctgaagatataaggaaaggggcaacagcagcacctcaactgtttttttattcaatatctgatagacttttcaaatttccactttcagatcatttatgtgctagtctttttgatgttcttcttggtggagccagtcctaagcaggttttacagaaacgttcccaatctgatgctttaaaagataggagcatggctcctttttttgtccctcagattctggtttgcatttttaaatatattcaatcttgtcgagatgcttcagtgcgtacaaagattttaagtgatcttcttgatttgctggattcaaatcctgtgaatgttgaatcccttatgcttgatgtacttaggaactacaaatcgaattctgtagccaaggctgacggtttggagaccaatgagctgattcttgtgaggaacatgtattcgttggttctctcctattgcatattctctgtgaaaggtggctggcatcaactggaagatacaacaaatttccttctactgaaaattgagcaggggcagttaccaaattcctccatgctccgagacatttttgaagatctcattggaagccttcttgagacatcttctgaagaaagtgttttcaattctcagccatgccgtgataatatcttgtatcttttaaatcttagtcatgaactctttgttgaccaaattggaattaaactcttgtttccttcacctgacatgtctgcacatttgtcatctgatgacatcaactcggcagttctagaaattatgaatactgagggcaatggtctgcttacaagtcttccttggagtaatatattatttaatgatggagaaaagttgactgatgattggtggagcttttttgacaagatatggacgcttctgtgctatttgaatggcaaaggccaaaccagattaacaccaaagggtttaaatacagctggaccatctattgggcaacgggcccgcggattagtagagtccctcaatatcccagctgcagaaatggctgctgtagttgtaacaggaggcatcagtagcgcattaggtggaaagactaacaaagttgctgacaaagctatgatgctaagaggggagagatttccaagaattatcttccatctcatcattatgtatctctgcaaagctggcttagaaaacgcatccaaatgtgttcagcaatttatatcactgctccctaatattatctctgaagatgatcagtgcaaaaatagactgcatttcttgatttggtccttactaagggtaagatcccagtatgggcaacttgatgatggtgcacgtttccatgtcatgtcacacttgattcttgaaactgtgatctatggaaagtctatgcttacaactaatatagtaggcagagatgattctactgaagcaaataacagtaaggaggctgggttcattcttaatcttgtacagaaggaccgggttctcactgcggctactgatgaggcaaagtacatgaaggatgcaattgctgatcgcatgaagctggtccaggaactccattctaaacttgatgaacgctcaattcaagacgttgaacaactgcaaagttttgaggatgatgtacagtttgccaagactgctgctatagctgcggacgacagtagaaaagcagctttccagctagcatttgacgaggatcagcaaattgttgcagacaagtggattcatattctccgtgctctgagtgatgagagggggccatggtctgctgctccttttccaaataatattgtgacatactggaaacttgacaaaactgaagataaatggcggcgccgactgaagctcaagcggaactataagtttgatgagtgcctttgtcatccatcatccatcaaatctagtaacgataatgctgccccaactgttgacccatctgctaatgccaagataacagaaaaaatgaagcacttacttttgaaaggagtgcgtggaattacaggggatatcagttctgaatcatgtgaggatagcaacgacatgattgatcctccccagaatgtcccgccagagaaccacactgttagtgatacttctgattctgcagattcctcagattatcctgctattgttcaaaatagaaaagaaagttcatcaaccagtagtgataatgattatatcgaggtgctatcatcagttcactgtgttcttgtaacccccaaaagaaaactagctgggcaattgactatcacacgaaatgccctacatttttcttttgaatttctagttgaagggactgggggatcatctgttttcgacagatttcatgataaaaaagattcagactccaagaatgagatgggaggtgtggaaaaactgaagggcaatcttgatggaggacgaggcaatgctgctgaatctagcgacactcaaattaaaaatcaatctggtaaaatcaaacaccatagaaggtggaaaataactaggataaaagcagttcattggacacggtacctactacaatatactgccacagagatattctttgatgatgcaaacgcaccagtatttcttaacttttcatcccaaaatgatgctaaaagtgttgggtctcttttagtttccctgaggaatgatgctttgttccccaaaggaacaaccagagacaagaatagtttaatttcctttgttgacagaaaggttgcccttgaaatgtctgagagtgctagggaaagttggagaagaagagaaataagcaactttgagtaccttatgattctcaacactcttgctggacgatcttacaacgatttaactcaatatcctatatttccttggatattggctgactactcttcagaaaagcttgattttaacaaatcatctacattcagggacctttcaaaaccagtaggtgccttggatgcaaagcgctttaaggcttttgaagatagatatcttaattttgttgatccggatataccaagtttttactatggatcccactactctagcatgggaattgttctttattaccttctaaggcttgagccttttactgcgctgcaccgcaatcttcagggtggtaagtttgaccatgcagatcgtctatttcagagcattgaaagcacatacagcaactgcctatcaaatacaagtgatgtcaaagagcttatacctgaattcttttacatgcctgagtttcttgagaattcaaattcatatcaccttggcataaagcaggatggtgaaccattaggtgatgttggtctccctccatgggcaaagggttccccagaagaatttattcatatcagtcgagaagcccttgaaagtgaatatgtaagctctaatctacatcattggattgatctcatatttggttacaagcagcgaggcaagcctgcagttgaggcagcaaacatattttattatctgacatatgagggtgccgttgatttggagaacatggatgatatgttacaaaagtccgctattgaggaccaaattgcaaattttggacaaacaccaattcaaatttttcggaagaaacacccaaggagaggtcctcctataccaattgtgcatccactatattttgcgccacaatcgataacagtgacttctgttgtcccgaccatagtcacccctttatctgtattattcattggtttgttggactcaaacgttgtcatgatgaatgaggggctcatactctctgtaaagctttggctaacaacacagttgcagtctggtggaaacttcacattttctggatcactggaacctttcttcggaattggttctgatgttatttctccgaggaaaattggcacttctttggctgaaaatgttgagtttggaagacaatgcttagcaactgttcaaattcgtggtgacaattacttaattttgtgtggtaattgggagaatagtttccagatcatatctctaagtgatggaaaaattgtgcagagcatccggcagcataaagatgtagttagttgtgtggcagtttcatctgacggaagtgtgattgcaacgggaagctatgacacaactgttatgatctggtatgcatttcaagggagatcaaatgacaaaagatataggaatgcaaattacgatctatcaactaaggatcatgtcatcattgaaagcccttgccatatcttatgtggccatgatgatattatcacatgcttatttgtcagcacggaattagacattgttatcagtgggtcaaaggacgggacttgtatgttccatacactgcgtgaggggacatatgttcgatcgattcgacatccgtcaggtgctggtttgtcaaaaatggtaacatcacagcatggcaggttagtgatatactctgatagtgacctttctttgcatatgtattccataaatggaaagcatattgcttcttcggaatccaattgtcgtctcaattgcatggagctaagttgctgtggagagtttatggtatgtgctggtgatcatggtcaaattgttctccgctccatgcattctcttgatgttgtttggaggtacgagggagctgggaaaacaataacttccttagttgtgactcctgaggagtgcttcttggcgggaaccaaggatggtagcttgattgttttttcaatagaaaaccctttgcttcgtaaaaacgccatgcaacggcacaaggcaaaaccttccattggtggttagaggtgtagatcaaaacagtaccagaacttcttgctgcatttcaaataaaggttatcaatccgcaataattataacagagaagattctataactcctgtataaatgtacatacgtcatcagatcgagtttaccattctgaagagtgcatgtgccgatcacaatcaagaggataattcttctaactgcaaaacacatactatggtaactaaagtagattgatgtttcatgttcaagacaagagcaaggggataggaccttcaatatgatactcttgatatttgtagggtggtagctagttagtaatgggggtgcatttgagtgtaatataaacttattttgtgggggcattcttgctagataagagcgagccacagttttcctagatagaatttttaggtaaataggttgccactgacctgtaactattaatctgaacattgtaaatggaactgatgcgggttcataatagaaggcttgcaactttggaaaagatataattaaatcttatgagccgtctgaatttgtcactgaaaagctactaatgtgttgtatgagtgcacaacttgatgttgatttatcgttcgaacatggtagcgtcaatttcacaagcctaccaatatttcgagataacagttacaaaccgatactaatttttccctatttcccatctcgtcctactatgagctacttctgttcaaaaaaaaa

SEQ ID NO: 9161 - DNA, 1928 bp, Zea Mays
attttatttaaaatgaaaaaaagtttcactcctccatccccattcccgaagtcataaacctccactcgcggacttgccatgacgtccgtaccgctaccacccctctccgccgccctcgcccaatatcgcccctccgcggccgccacccttcgcttccgcaccccctcttccgcgcccggcgtttcggcttcttcgtctacccgggcgcgcaggttctcggttatcgcgtcggcgcgcgagatgccgtggccgcacgtgctgacggtggccggctccgactccagcgccggcgcgggcatccaggcggacatcaaggcgtgcgcggccctaggagcctactgctcctccgtaatcactgctgtcaccgcgcagaacaccgtcggcgtccaggtgaaaacagggatgctcccttcagctggagtagtcaaagttctgtgtgagagtcttaggaagtttccagtcaaagctctagtggtggatccggtcatggtgtccaccagcggtgatactctttcaggaccatctactctcgctacatatagggatgaactattttctatggctgatatagtcactcccaaatgtgaaagaagcatctaagttacttggtgatgtatcattgcatacaatttctgacatgtgcaatgcagctgaatccatttataaacttggtcccaaatatgtgcttgtgaaaggcggggatatgccagattcatcagatgcaattgatgtgttatttgatggtaaggagttcactgagcttcgtggtctgcgtataaagacccgtaacacacatggaactggttgcacattagcttcatgtattgctgctgaattagcaaaaggcgcaacgatgctgcatgctgtccaggctgcgaagaaatttgtggaatctgctctttatcacagcaaagatcttgtgattggaaatggacctcagggcccttttgaccaccacttcgagctcaagtctccatcatacaagatgggatcactgcaaaagttcaatccagatgacctcttcctgtacgcagtgacagactctgggatgaacaagaagtggggtcgttcgataaaagatgccgtgaaagctgccattgaaggtggcgctaccattgtccaactgagagaaaaagacgccgagacacgggagttcttggaagctgccaaggcctgtgtggaaatctgcaagtccagtggagtgccgctactgatcaatgaccgcgtagatgttgctctggcatgcgacgcagatggcgtccacgttggccaatcagacatgccagcatgggaagtacgacggctcctaggacctggaaaaatcatcggcgtctcatgtaaaaccccggcccaggccgagcaggcatggaaggatggcgcagactacatcggctgtggcggtgtcttcccgaccacgacgaaggcaaacaaccctaccttagggttcgagggcttgaggactgtgtgcttagcttcgaagctacctgtggtggccatcggcggcatcaatgctggaaatgcaggctcggtgatggagcttgggctcccaaatctgaaaggtgtggctgtggtctctgctctgtttgaccgggaacgtgtcgcggctgagacaagaaacctcagatccatcctgatgaagaatgcttactcaaggtcttagagcaagttgggatatgccgcctgttcatttactttctttgtttaggcccgaaataagtttgtaatcaatcactttgtcataaggagaaaccaaacaggcgctgcaatcttcaataaaccggagtcattatttctctggaaaagaacaattctgtgacatttccgaagtgtgatacatttcaaaggcactgaactgtgtaataagaaatcaataatgtaccagaactatatttgatgcaagtactaacttggaaataatccacgggctg

SEQ ID NO: 9162 - DNA, 6167 bp, Zea Mays
gtccatccgtcacggcgccaccacctctacctccttccctcaccttccagagcccactgctcctcggcggcggcggagatgagcgtgtggaactacgtcgtcacggcgcacaagcccaccagcgtcagccactcctgcgtaggcaactttaccagccccaaccagctcaaccttattatcgcgaaatgtacccggatcgaaatccatttgcttacccctcagggcctccagccgatgcttgatgtgcctatatatggaagaattgcaacgattgagctcttccggcctcataatgagactcaggactttcttttcattgctacggagaggtacaaattctgtgttctgcaatgggatgcagaaaagtcagagctaatcaccagagccatgggtgatgtttctgatcgcattggccgccctactgacaatggacagattggaatcattgaccctgactgtagactcattggtcttcatctctatgatggcttatttaaggttataccatttgacaacaaagggcagctgaaggaagctttcaatatcagacttgaagaacttcaagtactggacatcaaatttctacatggttgtgctaaacctactattgttgtcctctaccaggataataaagatgtgaggcatgttaagacttatgaagttgcactgaaggacaaagattttgttgagggtccttggtcccagaataatgtagataatggtgctggtttattaataccagtaccagctccacttggcggtgtgataataattggcgaggaacaaatagtttactgcaatgccaattccacatttaaagcgataccaataaaacaatccatcatcagagcttatggacgggttgacccagatggttctcgatatttactcggtgataatactggaattttgcatttacttgtccttacccatgaacgagaaagggttactggtttgaaaattgaatacctgggagagacttcgattgcatcatctatttcgtatcttgataatggtgttgtttacgtcggttcacggtttggcgattcacagctggtgaagctgaacctccaagctgatgcaagcggttcatttgttgaaattcttgaacggtatgttaatcttggaccgattgtggacttctgcgtggttgaccttgataggcagggtcaaggtcaggtggtcacttgttctggggcgtttaaagatggttcccttcgggtggttcgtaatggtatagggattaatgagcaggcttcagtagaactccaaggcataaagggattatggtcattgaaatcttcgatcaatgatccatttgacatgtaccttgtcgtgagctttataagtgagacacgattcttggcaatgaacatggaagatgaactagaagagactgagatagaggggtttgatgcacaaactcaaactctgttttgtcagaatgcgatcaatgatcttcttatacaggttactgctaattctgttcggttagtcagttgcacctcccgggagttagtgaatcaatggaatgcaccagcaggattctcagtcaatgttgcttcagctaatgccagccaggttctgttggcaaccggtggtggccatcttgtttacctggaaattagggatgctaaacttgttgaagtgaagcatgctcagctagaacatgagatttcttgtcttgatttgaacccaattggggagaatccacaatatagttccctagctgctgttgggatgtggacagatataagtgttagaatattttcgcttccagatcttgaattgataaggaaggaaaatttgggtggagaaattgttcctcggtctgttctgctgtgcaccttggagggggtttcgtatttgctttgtgctcttggggatggtaatttgttcagttttctactgaatgcaagtacaggtgaactgactgatagaaagaaggttaccctcgggacccaacccatcagccttcgtaccttctcatcaaagggtaccacccacgtgttcgcttcgtcagataggccaactgtcatctatagcagcaataagaagcttctctacagcaatgtcaatttgaaagaggttaatcatatgtgccctttcaatacagccgcttttccagacagtcttgcaattgctaaagagggtgaactttcaattggaactatcgatgatatacagaagcttcatatccgcacaatcccccttaatgaacaagcacgtcgcatttgtcaccaggagcaatcaaggacactagcattttgcagtttcaagtacaaccagagtgtggaggaaagtgagactcatttaatacgtctgctagatcatcagacgtttgagtccctgtgtgtatatcctctagatcaatatgaatgtggctgctccatcattagctgttcgtttgcggatgatagtaatgtttattactgtgtgggaactgcatatgttatacctgaagaaaatgaaccgacgaagggccggattcttgtatttgcagttgaagatggaagcttgcaattgatcgtggagaaagaaaccaaaggagcagtttattcgctgaatgcattcaatgggaaattgttggctgctatcaaccagaagattcaattgtataagtggatgtcacgcgaggatggttcacatgagctgcagtctgagtgtggccaccatgggcacatacttgccttgtatactcaaacacgtggtgacttcattgtggttggcgatctgatgaaatcaatatccttgctggtgtataagcatgaggaaagcgcgattgaagagcgtgctagggattacaatgcaaactggatgactgcagttgagatgcttgatgatgaagtctacgttggggcggagaatagctataacctattcacggtgcgcaagaacagcgatgcggcgacagatgacgaaagggccaggcttgaggtggtgggagagtaccaccttggggagtttgtgaacagattccgccacggttcactggtgatgcgccttccagactcggatatagggcagatccctacggtcatctttggcacaataaacggggtgattggcattattgcctccctcccgcacgaccaatacatcttcctggagaagctccagtcgacccttgtgaagtacataaagggcgtcggaaacctgagccacgagcaatggcggtccttccataacgacaagaagacggcggaggctcggaacttcctcgacggtgacctgatcgagtctttccttgaccttagccggagcaagatggaggaggtgtccaaggcgatgggcgtccccgtggaggagctgtccaagagggtggaagagctgacgaggcttcactagtgtagatggaacatggaagcgttgcttgtggatacaattctggacaaggagaactttacattggaagagcttcttgatgaggatgaaatcattcaggagtgcaaagcgctgaatacccgactcataaatttcttgcgagataaggcccaagtgtcgcaattacttcgttacattgtggaagaagttcctgaggattcagagaagaaacaatctttcaagtttccttttatcgcttgtgagatttttgcttgtgaaattgacattattttgagaaccttggtagaggatgttgagttaatggatttgcttttttcatttataaaacctgaccatccgcatagcacactgttagctggttacttcagtaaggtggttatatgtttgatgcttcgaaagactgctcctcttatgaattatgttcaggagcatccagatattgttgtccagcttgtcgacctcattggtatcacatcaataatggaggactctcctgaagtgcatgcaaatgctgctgaaattctttctgcggtaactcgatgcgcccctcctgctcttgctgcaaaaatatgcagtccaagttttgttggcaggttgtttcatcatgctcttgacgagtcaagaccaaaatctgttctggttcattcattgtcagtgtgtatatctttattggaccccaaaagactagcatcagtctcataccaagcatttagaagcaacttaactcacgggacgctggttacagccagtccagaaacagttgatggtatactggagagtctaggtgacttgctgaagttactggacattacttcttctcaaaatgtttttcctacaacttatggatgtttgtgtccgcctcttggaaaacaccgtttgaagattgtagaattcatctctgttttgctaacaattggtagcgaaatagctgagaagaagctaataagccaatcagtgataaagcattgcattgatttattttttcagtacccttataataactttttgcatcatcatgttgagaacattattgtttcttgccttgaggttaaaagaaatcaattgattgaccatattcttaatgactgtggtcttgttggtaaagtccttgccgctgaaaaaagttcttctctggcagtggagtctaatgggccaacattaccatcagaagggaaagaacctccaagaattgggaatattgggcacataactcgaatagcgaataagctcattcaatttggaaatagtaacagcatgatccagagtcacttgcaggagaacagtgagtgggctgtatggcaaatagatgtcctgatcaaacgcaatgaggtggagaatgtttaccattgggcatgtggccgtccaacatctctacatgatcgtgggagggatagcgatgacgacgacttccgagacagagactacgatgtggcagcactcactaataatatgagccaggcatttcgatttgggatatacaggaatgatgacattgaagaggcacaaggatcccacgaacgagatgatgaggatgtctactttgatgacgagtcagctgaagtagtaatatcttcattgtgtttgggggatgatcaggacagcagttcactcttcacgaattcaaactggtttacgtttgatggtgatagaggaatcaatgaccgcctagctgcctctgttcctccatcatccccggattctgaagcgatttccttaaacactgagaatactgatgaagcgctaactggtgaaaccactggaggcactgagtcactgcgggaaagtgcatcccttgccaatgaactagcagaagtcgctaacgacaatgatgctgatgccacggacggtgagaaaattttgtgtacagaagaggacagtcaagcctccgaggggcctgtggatgctaaagaggacaagactggaggagcgtctaaagcagcgaatgaatctgtgcctgacaatgccttgcctgaatcccaccacactgattgtcggtgcgctgactcatctgaatcaggaacagaagaagatgtggagattgatgatgagaagaaatctgagactgctatgacaaatgaatgagcgttatgggcttggaatgataggatggcggatcagattcttttgctggtgagcaatgccactcaagcaggggcgccgtacaattttaacagcgctgctttgctattgaggagtctggttgttactgcatactcgggcacgcacgctcttttatcatctcacctcatcaccatcatcccacatggaccaatgtcgtctggcggctcctgattttggtctcttcgaactgtaatatctgcacatcgcttggaggagttggagaaggaaaaaaggcacatatcggcacatagaaactacatgtccttgatctcctgcctcgagagcctcgcaggtcggatctgggagctcaaaattgaatacttctgccgggggatctgtcaggccttcgtcgttgttacgtcccatatcgaaggcggaatcgaactggaggccctaagtgaaggttactgcgatgcctggagtgatacagagcttgccgaaatggtgaaagctgcggagccctttgctcggaaactgggagtcgccctgcttgattgcgctcccccacgaggggttaaggaaaatttgtgtctttgtaatggtttaagggatataactttttttgacatttcttcaattctatgaacatccgtgttggttggcactgggccgagcctaggttggcgttcgcccccttttcctgtgtccgaccccaagaatagttctgaaacatgttttattaataaccatcaaggaattac

SEQ ID NO: 9163 - DNA, 2668 bp, Zea Mays
gtccggtcccacttccaccgcgcaaaaggccaaaggcaaaccacgcgctcacctggctgcctccccctctcctctcccgacgctcccatgccgccgccgccgccgccgagcgtgcggggcttcctggacgcgcacttcgcctcccccgacgacctcgcggcggcgcccgcgctcgcggagctcttgcgccgcgagtgcgacgggctcgacgcctcgctccgccgcgccgaggcgcggctcggtgccgcggccgcgtcctggctcgcgcgctactctgaggcccgcgcaaacctcctccgcgtccggtcacgagggggacgcctcgttgcggaggacgacggcgccgaggcggtgaggacggtgggcctgccggcgctcgtgcgggagatccaacggatcgacaccatccggctctacgcggctggaatctttggttggcaacctggaagatgctgcattttccattgttaggcaggccccaaagtcaaaactgtcatccatacttcgaaaatcgaatgaaactgaatggaagcaagggaagctgctccatgctgttgacgctgtgaaggatattgagcgagaattagtacggatcagcactagtaggccacagtgggccaaccttgtcatggctgttgattctagagtggacaaaactctttccattctgaggcctcaagcactcacggattatcgggctctactagcatcactgggatggccaccttcattgtcttcaccagacacagagaaggataagtacccccaaattccgaatcctctagtcttgatgaatgagggaaataaagcgagatactctcaaagcttccaagcactgtgtgctctccaacatgtgcaggggaaccgtgaatcacgcctgtgtcagacagcaaaagtgactcctgccctggcagatttgaagtatttcactaggaccgcttgcttcgacaatgggctttgggcgattgatgaattagttcaccctattgcttcaaggatggaatatcattttgtcaaatggtctgaacagccggagttcattttcacccttgtttacaagataacaaaagattttatggatggagtggatgatgtactgcagcctttgattgatcaagcaaggctagtaggattaagtgccaaggaatcttgggtaactggaatggtgaaaattcttgtaggataccttgagcggcaaattttcccggcacttgtctgctcttatcaggatcatgctactgttggaaaacctgaagtagattcctcttggttgcacttaaatgacgtaatgatttcttttgataaaagaatgcagcttctagcggattcaggaatccagaaaatgacatcactttctgaaggtctgtctaggtccttgtctgtcttttcaatatatgctgagcaccctgactggcttcagatatgggctgatgttgagctttgttcagcacaggataagctgaaatctgaaatggaagatgagacaagttggtcatgtagtggtcagcatgaccagcgtggtcacatggaaaattcaacgaagtttcttctctctacaagagaagactacaaagctcctccggtgtgtgaatttgttaccaaaactgctttgtcaatggttgaaagaggccgtgttctgccaaacaggggaatgcagatccagtataacagatcctcttcggttaggttcctgaatggcttttttcttgtattgcgcgaacgatgtgaagcattgcaattgtcgaacacggcactagaggatcattctttgtcaaaaacttcgtgtgcaattaacgccgctcgttactgtgaaaacgtgcttcgggaatgggatgaagatactaccttcttggatatgggtcctcaaggatctctgtatacagatgaaatcggctttttagtcaaattagggaccgatcacctggaacagatactgtcttgggttctgcttgagtttgaagatctgtcctgggaatatgttcagagcattggatcatggagtggacagaccatcttagatgatgagatcctggatgaagaaaacacaggagtgtctcctggttttgttcccagtctagatgttctgatggacaggaccgctaagttgaaacgatatcttaactccaaggatttccttgatctgtggaggagtatagcggaaggccttgactactacatctacagcagcatacgatgggccgaaatgcacagtgcttgctggaaacactaatggatgacacgaagagtgacgattgcctaaagcgtgaaggattgcaccatgtaaatgctagccaggctgcaaagatcttaagcagcaggaagtttagtgggtaattttgttcgtacaaagtgtagctgagaatgaccttcagcgaagctcgatgtggagattaacaattccaggccacaacaaagacaggtgccactaaccaaggagccgtcgctattggcatacatggcacgcaacaacagctgctgcctacttggttacttcctggaattctttaggcgatatctaggagagggctgttcaccgagttttacttcgtcttgcaagcacaaagctgccatgtaatcagttcatgctgtttgattaacttgtagtcgcccttgtgcagaatgcctcgtgctttctaattaatccaaacgatgaaaaatttccccgcat

SEQ ID NO: 9164 - DNA, 1121 bp, Zea Mays
cgacgaggagacagattcttctccccccacggccacacccacgcaccgcagcgccgcctcgtctcctctcgccggcgatggaggaggtgggcggggacatgcctctcccgaaacagaagctctccgctgcaccgtacagggacggaggtggcgtcgtgctcgtggccactgggagctttaaccctcccacctacatgcacctgcgcatgtttgagctggcaaaggatgaactcgagctgcgaggttattctgtgttgggcggctacatgtctccggtgaatgatgcatataagaagaaggacctcttaccggctgctcaccgaattcgcttttgtgaacttgcgtccaaaagctcatcttttgtgatggttgatccgtgggaggcaatgcagaatggttatcagcgcactttgaccgttctttcgagaatacgaaactcactatgcaaggatggtgtagctgaccaaggtagcctcaaggtaatgcttttatgtggctctgacttgctcgagtcattcaccactccaggtgtttggatcctagaccaggtcagaaccatatgccaggactttggtgtcgtatgcatacggcgagaaggaaaggatgttggaaaattgatagacaacagcgatatattgcaagaatgcagggataacattatttcggttgatgagattgtgccaaatcagatcagttcatccagagtaagagactgcataagaagatctctatcgataaagtatctcactagtgatgaagtaattgaatacatcagagaacacaagctgtttatggaaggcaatggcggcgacatagcattgctgtaatagaggtatttggagattttcactatcatgcaggttgaagtgagttgcatgttgattaattttgcttttgtgccagaatcaagtgctacatacaacatgaattctgacaaccatataaatgccaaggttattctgacatagcaatcgtggatatagcatcggttagacaaacatatcataaagaattaagcctcatttgcagacagttctgatgtatataagcacagacaaaagatgtctctgtaacggattctattgaacagaacacatgccattatacaactgatcaactgc

SEQ ID NO: 9165 - DNA, 1242 bp, Zea Mays
gattcttctccccccacggccacacccacgcaccgcagcgccgcctcgtctcctctcgccggcgatggaggaggtgggcggggacatgcctctcccgaaacagaagctctccgctgcaccgtacagggacggaggtggcgtcgtgctcgtggccactgggagctttaaccctcccacctacatgcacctgcgcatgtttgagctggcaaaggatgaactcgagctgcgaggttattctgtgttgggcggctacatgtctccggtgaatgatgcatataagaagaaggacctcttaccggctgctcaccgaattcgcttttgtgaacttgcgtccaaaagctcatcttttgtgatggttgatccgtgggaggcaatgcagaatggttatcagcgcactttgaccgttctttcgagaatacgaaactcactatgcaaggatggtgtagctgaccaaggtagcctcaaggtaatgcttttatgtggctctgacttgctcgagtcattcaccactccaggtgtttggatcctagaccaggtcagaaccatatgccaggactttggtgtcgtatgcatacggcgagaaggaaaggatgttggaaaattgatagacaacagcgatatattgcaagaatgcagggataacattatttcggttgatgagattgtgccaaatcagatcagttcatccagagtaagagactgcataagaagatctctatcgataaagtatctcactagtgatgaagtaattgaatacatcagagaacacaagctgtttatggaaggcaatggcggcgacatagcattgctgtaatagaggtaaactctgtaatcgacaaggatcggctgtggacgtctacctcaggagtcaggataccatctggaccgtgcattctgggcaattacttcgcacaaacacagaaataaacggaactggccacttaaattactactatatttttgttaaatttgattctggaggttgaagtgagttgcatgttgattaattttgcttttgtgccagaatcaagtgctacatacaacatgaattctgacaaccatataaatgccaaggttattctgacatagcaatcgtggatatagcatcggttagacaaacatatcataaagaattaagcctcatttgcagacagttctgatgtatataagcacagacaaaagatgtctctgtaacggattctattgaacagaacacatgccattatacaactgatcaactgc

SEQ ID NO: 9166 - DNA, 2503 bp, Zea Mays
cgagcccgatcggcaaaagggcaactcgaacgttgatgttgtttccagttgagttggagcggagtgcgggcaggcaaaggccgcaggacacgccgaccagcagcttcttttccgccgcctcgcctcccacacttttccctctgctgtgctgggtgctccgctttgctctgcttgccgctctccgcctctccccgatctccactcgactcgtgttggcttggcttccacttccaactgactcgactggattcaagcgcccgacatccgcggagacttggccgcgagcctgcgttcgaatcctgaggacgagatcgccagagccgccgggaccgatcgagttccggctgccaatgccggctctgctcttgctgctcctgttggccgcggcgccggcgccggcgcgggcgggagacccgtactcctactacgactgggaggtctcctacatttcggcgcagcccctcggcgtcaagcagaaggtgattggcatcaacggccagttcccgggccctcccctgaacgtgaccaccaactggaacgtggtggtgaacgtccgcaacgcgctggacgagccgctgctgctcacctggaacggcgtgcagcagcgcaagacggcgtggcaggacggcgtgctcggcaccaactgcgccatccccgccgggtggaactggacctacacgttccaggtcaaggaccaggtcggcagcttcttctacttcccctccacgccgctgcaccgcgccgccgggggctacggcgccatcaccatcaacaaccgcgacgtcatacccatcccctttgcctttcccgacggggacatcacgctctttatcggtgactggtataaccgtgggcacagggagctcaggagcgcgctcgacgggggcaccctgctgggcgcccctgatggtgtgctcatcaatggattgggaccctatcagtacaacgaatccgtggttccaccagggattgtctatgagaggatcaatgtcgagccagggaaaacttacaggtttcgggtacacaatgttggggtctcaacaagcctcaatttcaggatccagaaccataacctgctccttgttgagacagaaggctcctacacctcgcagcagaactacaccaacctggacatccatgttggccagtcctactccttcttggtcaccatggaccagaatgccagcactgattactatgttgttgcaagcgcacgctttgttgatgcagctgttgtggataaattgaccggtgttgctattctccattactctaactcccagggtccagcctctggccctcttccagatcctccgaacgatcagtatgacacggcgttctctataaaccaagcaagatccatcagagtagagcacctgagctcatagatggaaaactgcgttctactctcaatgagatttcttacattgcaccctcaacccctttggtgcttgcacaaatatttaatgtccccggagtcttcaaattggattttcctaatcatcctatgaaccgactaccaaaagttgacacatctattataaatggcacttataagggatttatggagattatattccaaaataatgccacaaatgttcagagctaccacttggatggctatgcattctttgttgttgggatggactatggtctatggacagaaaatagtcgcggtacttataacaaatgggatggtgttgcacgctctacaatccaggtattccctggagcttggacagctattcttgtgtttctggacaatgcaggcatatggaacttgcgtgttcagaaccttgacacctggtacttgggtcaagaagtgtacataaatgtggttaacccagaggacagcagcaccactcttccggataacgcaattttctgtggtgcactctcaagcctacagaaagaacaatcacatagattccaatactcaaaagctgccccagttccacaatggggagaaacaatttctctcctggttttgttggcatgctttgccctttggtcgctatgattcaacccccacctaagttgtctattgaggtcagtaggggggcactgctacaatggacatggaaggcagtgtggatgatgttagattattttctgaggactccgattcttgatttggttacgctcgtgtggtttgatgcaactcccaagagtgggagatttgcagaggtggagtaagttttgttttttcccctccagaagtgtaggtaaataatgcgcttggtgttgccgggtgagttgattgttttcgtgttctgtatgtaatttgactggttaattaagaccactatgttgtacttattacacaggttgagtgttgttaggactccgatctggatactagaagcttagaataccatattatcaaatcgagacagtaatgaacttttatattatattatccctatcctgatactataattgagttccatatgattccatgatattgtaatcttgatcctacataatataaatggctttcaaa

SEQ ID NO: 9167 - DNA, 2697 bp, Zea Mays
ataaatagcgaccaactgctgctaaaaatatagtgtgacgaggagagcgaaactcgcatcgcgtcccgtcccatccattccctcaccgtcgccaccgttggagcgtcgcgcggacgatacagagcatgagaggcggagggagcggccgcggccatgggaacgaccaatacagccacaaccaccatcacagctcgttgtgctgcctctctgccgcgccgccgctggctggggacgccaccccgacgctgactccggagccagaggctgccgccgcctcgattgcctcgacggtgtcgacggttgtggtggagggcgtgctgcacaagtggaccaactacggtcgcgggtggcgggagcgctggttctcgctccgcgacggcgtcctgtcctactccaagattcgggccaacgcgggggcgaagacgggggcgggggcgacggacggtgacggggaggttagagtgattggttctagggtggaaggagcgcgccgcacggagaagcctgccggcgtcgtattcctcaaggtttgaatgcctgatgcataatattgcataaggccaagggaagttctacacatttttcatgcgcaaggctgcctagttacaaacatatgggagctgataagttactatgtttctaggtgtcagcatttcgggaaaagtgatgtttcaatttcaactgcaaggcttagagatcgaatgcatcaggagggtttgaatgagagtcttatacaggactgtgaacaaattgtgctttccgagttctcaagctaccggaagcaactgaagtgtcgttacgaggattacttaagcttgtttgggtcctgcagacataattttgaggaattttacatagtgtattacacacatatttgtgcaggaaggtaaagatggaagtataacacaggggacattgacacgaaatgacttctctagttctaggcatggaaattttagcgaatatagcacaacagaatctgatgagcatgagtttgagaaacacgatggaggcgaattgatttgtgaagatgaatctgcattctttgattctatagattacttcacagagtcagacaacaggtcttcaaccatgttaagtggcaaggaagtagtggattcccaaacacatgattccagtaataatatacaagcacaaatcagacgacggagtaggctgcctgaccctattgagaaagagaaagggatcagtctctggtccattattaaagatagcgttggaaaggatttgacacgagtttgtcttccagtttacttcaatgaaccactctcatcccttcagaagtgctttgaggatttggagtattcatacctcttggatcaggcatatcaacatggaaaagtgggggacagcctcatgagaatcctcaaagtagctgcttttgcggcctctggctatgcttcatctgttgcaaggccttgcaaaccattcaatccattgctaggagagacctatgaagctgattaccctgacagaggaattcgtttttttgcagaaaaggcaagggctggaaattctggggcgacagcaatctcaaatccaagttttggggacagtcaattcaagttgaaccagttggcattttgactctagaatttgaggatggtgaaatcttccaatggaataaggttacaacaaccattcacaatctcattcttgggaagttgtactgcagccaccatggaacaatgcatataaaagggaatcgccaatattcatgtaaactgaagttcaaagagccatcacttcttgaccggaatccccatctagtacaaggctttgtagaggacaacaatgggaacaaagcttcgtttttgatagggatgtgggacgaaagcatatattgtagtaactctgatacttccaaggtgaagagcgccgatcaactgaaaggtgcctcgctgctgtgggaaaagaacaaacctgctcctaacccaactcgatacaatttatcttcattcgcgatcacactgaatgagttgaccccagggctgcaggagaaacttccacctactgattcacggctgagaccagaccagcgccacctagagaatggtgaatacgagaaagcgaatgcagagaagctgaggttggaacgacggcaaagaatgtctactaaacttcaagacaatggctggaaatcccggtggttcgagcaagacaccgaggacgggacgtattgctacaaaggtggatactgggaaacaagagagaggggcttctgggatgggtgcctcgacatttttggggagttcgtggagacataagtgccctgttcctgcagtagcagaggttcaagcagccaacacgccacccagaaacaatggagtactgccatctccaatggagcatcctcttgcctctagaagagaagggggaggagccctgtgcgaggagtagagcattcgagatgtgaaggcattgtgccttgaatggtagcatagcatatgattggccacgaataggcattgccaccttgttagtatagtatagttcgatccaatgcaaataagaatgctgacattcattctttggttccttcttgcgttgaacatggatctgttgtcgtggaagaaatttgcttgctcggctaggcaaaagtctgcctacactgtatttgtttgccgatcgaaaaccaaagcaagtcaccatctataactcttcacttccatgaga

SEQ ID NO: 9168 - DNA, 2516 bp, Zea Mays
atggcgcggtggccgggcgcgggcgagggcgcggagggcgggcgccgtcgagggtgcggcgggcaggcgagcaagggcgcgagcacggcaggcaagggcgcggcggacgggagccggcgagggcgcgccggccgggcgaggtcgcggcggcgagcgagccaattcctctacccgttctgcccttctcagtttctccagtacaggatcgaggcttctcctggtagcctctccgtcggagcgctccccgccgcctgcacatctccctggcagtggcggttgcctccaccctcagcgccgcccagatccctcgtcctcacctgttctctatcgcggaccctgatctgtccatgctcaagaatcaatccagagttaagttgtatggatcctgctgatgttccagaagggattgatcccaagagtgcgtgcagagtggaggtcactgtcaattcctacttcactatgcaagatggtagaaaggaatataatcgaggcaagacagtaagctatgttgttgattcagaagaatactcagttattgatttagagaaagatattgcttcagaatttaaatgggggagcgaccaacagcctaatttctgggttctaacaaggggtaatatgacaagcaagttggcttcagatgcacaacttcttgacttgttaagggcatctagagtagtgaagttattaatgatagtgggcaactgtgagcacaatgtaggacatgggcatattcctgctacatggaacatacaagaagagatacctgttgcagtgaacatagaagaagagatgcttgatgcaatggataataatttggaggaagcagatggaggatttgcatgggcagaaatacctgaatatggggaaacaactgcagggccaccaatggctaaagaggaagaaaaggagcactttatcactgttgggtgcgatcctaatggagataagccagctggaataaatgaagaatggaggtactttaaaagtgttgatcatgtagctattgatccactgcaaaatcttaaagttgagggacagaaaagaaagagggcaagacctgttttagaaataagagactttgatactgaagctgttcctgaggatgagactactctgcttgatgtttttattgtgcctcacacatcacatgacagtgagaatccagtcattaaggagggtgacacctttgtagacaagattgcttttgtccacactattaagcaatatgccatcaaaaatgagtttgagactaggattgaacatagtgacaaagaaaggtacagggcaaggtgtgtagatgaaaattgtgattggagagtatatgcaaagaagctacatggtggcaacacatttatgtcaaactatcagaattggatgtgcacacttgttccagtcaaacatctcagaatgcttcaacaattggattaaagattacaaagatctcccagtcgctgatctaatggataagattagggagaaaattatggagaagatttatacaaggcaagagatagccaatcgaatggaagggcgtatcctacaaagtgtgatacatgagttgaacatgaagagcagaggattgcactatgaaatcgtgaagagtggactgttgtcagctgagatatcaggaataacaaaagaagggaagaattggagagttgcagttgacattaagaaaagaacttgtggatgtggacagtggcagatttctggaaaaccttgcactcatgcaatagctctatttgggaaacttagaaaccttaacattgaggactttgtggatgactactattcaattgagaggttcaaaatggcttatcagtttgtggtcgctccgatgggtgacaagactcaatggccaaaaattgaccctgggtttaaaatggttcctccaaagctagaaaggcctgctggtagaccaagaaagaaaagaatcaaggctagtggagaggcaggaaaaagaggcccatatcagtgcaaaaggtgttttcagtttggacatatagagaagggctgtactgctactcaagctgaattagaacaagagcttccaccacctcatccaaagaaaccaaaaaaacaaagctgttgaagtctctatggttgatgtcgagccatctcaaaccgacggtgttccaaaagtgatgtctagcccaggtgtaacaacaagaagcatgtcttctgcttctccaactagtccaggtcctacaacaaggaggaaggcatccatctcaccaggaggaattaatcggaggctcattattagctagatatagtagttgtcattctctattttgtgtgtgggcatggctgtgcaactattttgtgtaactattttgccgctatgcaacactatgtctgatggtggtgcttctatattctgaattgcaagaactcatttaaatgttgcagttatggtactgaaatggcatcaaaattatatatatatatatatatatatatatattgtgtccaaatgtaattgaaatggaggttggactacaactatattg

SEQ ID NO: 9169 - DNA, 6527 bp, Zea Mays
tcccacccatccacccatcatcatctcgacctcttcccccaactcctcgccgccgccacttgccggtagggtttgcgagcccatcccgctccaatcgcccgccgccgccgcgagatcggcggctcccatcccagattcgttcccgcccacgccagcgcgccgcatccgatacccgtcccgttggcccgcgactcgcgaacgaggatgcctcagtagggcgcgcgcgtgtcgagctagggttgtcgcgtccgaggccatggacaccgccgcgggcccggggccccgggacggccccgatcggacgccgcaggggcccggcgcctcccccgaggaggccgccgctgatggcgtgaagacggacatcgcaggtggggcggaagcgcttgcagcggcaggcgcggccggtgaggccgatccgggtggaggcgccgctgcggcggggcgtgggggtgacgcggaggcctcggcgagcgagcccacggcggaggaggttaacgaaggctgcggcggcgccgctgctgctgcgggcggagatcgccccgccgcgcccgaggcggatgcggacggcggcgcgggcaaagggcggtctgctgtgcacgcggtgagtgaggtggagcagggccaaggcattgcgggggcagcgcaggatgtggatcccgcggtgtttgaggtgaagaagatggacgtgagcgagggtggcgacgcaagcaagcagaatcagcactctccgtcttgtacggccagcgaggtggatgtggggatcgttcctgtggcagtgcgagatttggatcctgtggggtctgaagtgatgatggaggtggacgacggccatgtcagggaacaagagcgcgcgggagtggctgtggcgggcagcgagtttaagatggaggaagctgatggaagagtggtgcatcaagggtctgctgccacatctgctgggggccttcaggcgcgagccgaggaagtgggagagtgcttggtcggccgttacattggccgcaacgcgccaatgcaagcggggatccttattgggaaggttgcatcctatgatagcacagctggcatctacagcgtggtgtttgaggatggacataatgaggatttggagcttcctgagctccacgagttcctcatgcccgacaagaatggcacgttaggcatgagtgtgaactgcaggaagaggaagctgggcctgctggttttgtcggggagtgtctcggaggtgaaagagccagcaagtactagacagagggttgacggatgcgagatgcctgccaacactgatgcactgcggtatagtgggtctggctcggatatgtccgaggatatcgaatcttcgagtaattcatccgatttcactaaagaagaaccatctgagccgtgtcctcctgtacaggctgtggagttgcccccgtcatcgggagacattcatgtgccagaagattccataagctatctcttttctgtttataacttcctgagatccttcagtgtgcagctgttcctgagtccgtttggtctggatgattttgttgcagccattaattgcactgttcagaataacttgttggatgccgtacatgtctcgctattgcgtgcactgaggcggtatcttgaatctaaatctgctcaaggatctcagatggcttcaaattgcttgaagtatttggattggacattactagatgcattgacttggccaactttcttactagagtacctgtatgtgatggggtgcattaagaacctaggggggcagagttttgctagaagccttctagccgctgaatactataaactttctgttgccacgaagttgagggtgctgcaaatactctgtgatcatgtccttgaatcacaagaatacaaaactatactggaagatcgagtaggctacaatgaggagatggaatatgagatagattctagcacctttttggaggctggttccagagcagtcttgactagagcctcaaaggcctcagcttacaaaatgctgaatgatttacagaactttgaaagtggtccaaatgtaacaaattcagatgttgctgtagcagatgtttctcaggacggtaatagtgatgattgccgaatatgtggaatggatgggactttggtatgctgtgatggctgcccatgggcatatcattcgagatgtatcggtcaaaataaagctttccttccccagggggactggttctgtccagaatgtgttgtcaacaagcttggaccaacttcatcaagaattgaacgtggtgcaagaggagctcaaatgtttggcattgatatgcacgggaggctattcttaggaacctgcaactatttactggtgatcgaaatatcttcagatgtagagtcttatgcaagatattacaatcattatgatgttgtcaaggtactccagagacttgcactctcagatgcatatgtggatatatgcaggcaaataatggaatactggaaacatttactcggtagagttcagagtgagagatcaacaatattgaaagaagttggtacaagacatactccacaatccagcatgttgagttttactccaacaatgtcaggagatggaagtggctggacaactttaaaagatggtggggacagtaaaacagtagcacttcctcaaacaaatgtgcaacagaaaattttcgctaatcagtatacagtgtgctctgctgaacaaacggagaagaatgttgatgtttgcaagcaagctctgtcagctcagaacaacatacataatgcacctagaaatggagcttctggaccatttgtggcatcccccgtttctcatcagaatggatccattggaacgggtatgtctaacatagcacaagcacagccagctcatagtatatatcgtccagacttatccactgtttctgcaaagtcagaatcatttcgttcatctttgcaaggtaaacttcaccttcagatgtgtactgaaagacctggaaacatgagttgtggcaaggcagcaaagttgtcttcttttaaaccacaagcttacatgaacctctacaatcatggcaacattgcagcatctgctgccgccaatctagctattattgcatccagtgaaggtaaggtttccacatcccaactgtccgcaaaaccaaagaagaaggtggctgcagacaatgctctacagttgaaagcattttcctcagcagtcgcacaatttgtttggccgagtactgaaaagaagcttatggaagttccaagagatagatgtggttggtgccttgcttgcagaagttcagcaagtggaaacaaaaaggcttgttttcttaacatgaccacatcaaacgctgctaaaagttctgctcgagttcttagcacaatgcgcgtaataaagatttctgacagccatttccccagtattgctgcttatttagccaacatggaggaaagtttgcgtggcctgttggttggttcactacaagacatgcagcagagagaacggtggcgtgaacaacttgaagaagcttccaactgcagaactgtaatacccctcttgcttgagttggaaagcaacatccgtggagtagcattttctgcaagctggttcaagccgatagacgattggcctgcggaatctccttgtccatcaacaggggcatctcgtcctgcacaacaccaaaaacgtggggctggcggaaggcgtggcagaagacgtttgttggtgtctgaacccggtactgttactgatgatgacaacagctggacttggtggaccggaggaaatataataaaacgtactttgcagaggggggctcttctacattcaaccataagaaaagctgctcgccaaggtggtaagaaaaggttagcaggtttatcttatcatgaaggttctaattttccaagacgatctcggcaacttttctggagagcatgtgttggactaagccagacttcgtctcaacttgctctgcagatatcttgatgctcacatcagatggaaggagtttatctctccagatcaaattccttcagatggaaaaagttctgacgctgacttttctgcactcagaaatgctgtactctgtgataaaaaaataatcgacaataagataagatacgcactgaagtttcccaaccaaaagcatcttcctgtccgtctgacaaaaaatatcttggaagcagaaagtgatcaggatgaaattagaaaaatgtggttttctgaaaaccacgtgccattgtacatgttacgagaatttgagcagcatgctgaggctagctccttgcctactccaggaattccggaatgttttaccaatttatacccaaggcgagtgaaagcacctgacagagatgttttttcatatctctttcacaagggagaagtctatccctgcgcgtcatgcaagaagggtgttctctacagggatattgttaaatgcagctcttgtcaaggtaattgtcataaagagtgtacatcaagatctgttgttagcaaaggaggcagtactacttccagtttgatatgcaagttatgtctccagaagcgaaatcttatgctcactagttacaatacaaatgcaagttatatccagcatctacagaagaataatggccaacagccagtgaccgctcccagaaatgtctctaaggttagttcttcccattctgctgagcctgcccccaaagtggaagccgagccagtcacaaaggttaaggcacaacgagttggaaatgtggaagctacaacccagccagttctaaatgtgaaagcccagccacccgccaaagtggtaactcagaacatcactagtgtccaaaagacaaaagctaaaaagtcaaagtccgaaaaaccaacgaaggctaaaaaagttcaagcgatcacatatttcggtctcatatggaagaaaaataagaacgacaaggatgatggaagcgagttcagggcgaatgatgtaatccttaaaagcaaggatggtataggttcgtcaataaaaccaaaatgttgtctatgtgacaaagcatattctccggaattcctgtatgtacgctgtgagaggtgcaaaaattggtttcatggtgattccttgcaacttgaagaagataggattggtgagttggttggataccgatgctgtaggtgccggaggagggccatccccccgtgtcctcattcagataattatgtaaagcctgaacccgaatttagtgagcaaacagttgcaacatcatcggtgtcaactatgctatccagtgggaagacttctgcttcagcagatcaggacccactgcttgcttcgtatggaatagttgaaccaatcggggaagagacaggggatgttgatttatcagcgaacacggcaagcattgccccgggaagtagccagaagctgtctataagaagagcactagctaaaacttctggataccttgaccaagctggtaaatctgtgaatgagtattatgtccagaaccagaatacacctccaggcaatggaaacatcaatttcagccacacgaatgagatttccttttcggaggctgacagcgtgggcgcttcaggactactggggtgggatttttcgagaggaaccgcgtatgctgccccacctggtttcacttctaatcgccagcagaaccgcactagccgtggcagctttgtgccggacgagtgtgagcgtgagccccagacttatttctcgttcactgagctgcttgaggctgacgacgcacagcttgatgacaacgcgtttgggatagctactggtctgcaaggtgatgctaacggctccggaagctttgtccaacgaggagttggttttggtggtacgtctttcatggcagaagatggagcttcgaatatgaacgtgccaacaaatggtcccacgcctgaagaggtagcgtgccacaacggcacgaacactcagccgccacctgatcccagatgttctgtccgtgacctccgcacacaccggtagtgctctccctgggaaccgaggcgtgtagagcctgtcgagagcggcaactggagttgtggtggttgccgcgaatggtgatgatgagcctctaaacttcactgccagttgcaatggcaggtaaatccaacggcatcccatatacttaccggatttctcgttaccggtcgctgggttgctgctgtcatgatgtgctactgatttctcggatcatttcattatttgatctaatcttaaccatcatacagttagagtagcgattaccgcttggggtttacactgtacatactgaaaggatgggtcgacgacgacgtaccatttccattctttaggctatttatttttttggggtgggagttttagagctaggatgctgctagcacatagcaacatggtatatgggtcgtctggaaaaaaaaaaccatattattatgtaactgtattaaccttggttgtctcttctcgccttctgagatacaagtgtctcttggtcagagtgggtggccgtttctatgcctatgcagctatgctccagtattgtcgcatttgcctaggtaaaataactaattacatggc

SEQ ID NO: 9170 - DNA, 5166 bp, Zea Mays
tgttacccaaatcgtcagagtgagggggaggcggagggtgaatgtgaacttccggatgtctccaattgcttctgatcctgtccactccattaccaagaatagcactccatgtatcttggagtagagggaggaggagggagctcagccagtcatctatggattggtgccccaaacaacaagaccggccgagagggaagagcggaggccggaggggtcagctcttgcacttgtcaggggaggctagtctaggctaggggatctctgattgcctcctatcctctcctagccctgccctgccgcagcgcaacgactccgaaatctgaatcgccgcctccctccgccattcgcgtcagtgacatctattccttcaattcattcagtcaggcgacagcccatgcccttcacacaatcaaaatcgaatgttggttacacaactggaaaaataacgcacaccccgcaacatactaggcacgtctttatctcggatcagtattcgggagtaagaacgacagcgcattgccaggatagaaatcgtcctgatgttcttcgtaagtctggcatttagaccaggctgacaatgtcagcttccgagttcaggattccataccagcaagtttcaccttcgcagcctgctgagaatgtaaatcagtttaagacctgtcgatgtggggagggagacccgaactccacttctgaaactggtgacagtccaccggcctcttgtcctaattgccaggtccttaagagtggacatttactactttcatctaaaggaattggatggacatcatggaaaaagcgctggtttgttcttacgagggcatccctagtgttcttcagaagcgacccttcactgacaacagcctacaagtttggcattctaataattcctagagttgaaatcagtgtgctgctgtacaatccaagtcattaccagaatgtgccgccacccagaggagctgaaccaattgttacacttggtggaattgacttgaataattctggaagtgtcgtcatcaaagaagaaaggaaacttttgacagtgttctttcctgatggccatggtgaacgaactttcactctgaaggcagaaaccacaggagatctaaatgagtggagaaatgcactggagagtgctatagctcaggcacccagcatagcaaatacaatggggcaaaatccaatattcagcactgatgtagaagcagaatctgctgaatctccagctgaacattcggaggaccgttctgttattggcagacctgcaaaatttgcacttgtagatgctgatggtagtccatcattcttggagaaggccctgaagttcattgaagatcatgggatcaaggtagagggcatcctgcgtcagtctgctgatgttgaagaagtcaaacgcagaattagggattatgaaaaggggaaaaacgagttctctccagaagaggatgctcatgttattggtgactgtattaagtatgttcttcgagagatgccatcatctccagttcctgcatcatgttgcactgctctggttaaagcataccgaagtgacaaggcaagaagacttgatgagattaatagagtgataaatgaagttttcccagaaccaaatcgacaattgttgcagaggactcttaagatgatgcaagttgttgagtcacacaaagctgtgaatagaatgtctcaatctgctttggcagcttgcatggcaccactacttcttcgacctcttcttcttggagaatgtgacatagacaatgaatttagtatgggaggggatagttcattccagctacttcaagctgctgcggctgcgaatcatgcacaggctattgttattattatgatggaggaatttgatcagatatttgatgactcggaagaaggttcctgttcttcagatgcttatacggagtctgaggatgatgttgacaaggaatattccacagataatgacacccatgatgacgatggttcttatgattctggtgaagatgacattgaagaagatttggactactctgatgacagtgaacatgacagtaagatcaacgctaatatcaaggatggcaaggttaaaaacaatatctcagaaactgcagaagttgcacaggcagaggatacctctcctatggatatcaatagtcaatccaaccagaagcaagaatcatgtggaccgaatggatccaaagatcgtatactaagatcaacttctcgttcatcatcttccagagaaaaaactatggagaaatcatgcagttcagcacacaagggcaaaagaaccttatggggccgtacttcagcaagaaaagacctgtcaacagaggagattgaatgctgcagcgatgatgaggcccttgttgagaaacttgagagtaacaagattgatctccaatcaaaaattgcaaaggaggccaaagaaaatgcaatcctatggtcaagtctagaaaaacggaaagaagaactacatgagcgtcgtttagcacttgaaaaagaagttgaaaatttgagggaccagctgaagagggtgatgaatttgcgaagggggcaggtgtcctcgccttcaacaatagacagcaaggtcaggggccagcagctgtgctgtgaatcatgcaaccaacgtctcctaaatacagacaggcttagcggacctgaaagctcatcagtggaagcgtcaccgactgttgggagtgatcctgcatttgacatgggtgatatcgagcaatcaaggaagcaagccgcacagcattcgccttcttcaagagacaagccaagtcacgaggcggtcgggggcatcacccagagggctcctcaaagagggcattcgattgccagggagggccaagatgggtcgtcgtcgttgtcatcctctaattcgaagtggaatcttgcgcagaaacaatattcaaatagcccattgataagagggcttcatgtatccagcagactagaggatttcggtggaagcatatcaccagcagcgtcatcggcattagccaagctgacgaaccggctcaacttcctgaaagaacggagggcgctgctggcaagcgagatgcagagcttggatttgggtcggcccccaacagtgaagtccccaacaccaaaaggccatgaaagcaagaatagttgatgttagtctgttcctgtcgtgctcttctgaatgctagatagccttatgattaaaaccagcagtgtagtttgtgtgcatcccgttctcatccatgtagtgctgtctgtacatgtttccacaaaattctgctgcttcaaacttgcagatacatatagatacagattgaacgtgtcagctgctagtaggctgctttgttgaacacactacacaccaagcactagctgttctcattgctgaatggatcgtggctcaaagcactcttcactgatatacatagagagatggatctagtgatctggacatggtgacacattctaaagctcaaaatggctgtctgtccacataaaaacatggataacattgaaggtacaacaaagtgcagagatagctccctccagcattccaactaggataatagggagtctcaacaaagtgcagagttgtctcaggtctaaacttctcctagacgatagactagtagatatgctgctgctactgatctttcatcgggattcaggcatgatgatcctgacggccttgttcgcagtagccctattctcatcggagatggctccacattctgggagatcaaacttcctgtggctcagtaattctgcttccctggtggctcatggcttcaagctcctctagcatagatttctttgcggtccttaccatggattgaggggcaagcaccaaagatggccagagtccgaggctaatgtgatattatgatttatgcatctacagaaagagcaggtagcatgatttatgcatcatgccaaccaccattcactttcactggttatatggaacccagggataaaatgagatacaagcaggcttttatgaacgaaacagtttagtctgttggcaagtacatgtttagtacaaaagaaggatcagaaggaagttgaggaagaaacagttcgactgattaacatatattctttgtttttctcttgaatatgcaggagagttaaggacaaagaaagttgtgtatcattatattaaaaaaagaagaaagaacaagagcccatacaaacgaacacccactcaactcagaacatacaatgcgcctttaaaaaaacgaccaagaatcaactaggtcctcctgatatcaaacttcctctagaaccatgctgcggccaatctccagagtatgagctcctcaccggctagggacatagctcggtcgatggaaagggagaaaccatcaaacacacacctttttcgattggttccaaagaatccatacccctagaacaactagagaattaaggcattttctaacaggggcatgtgctgcagccagagttctttctcaccatgccaccactcatcaaaattttcttcccctagttttggacttaggttatgcagcctgactttttgtaaaagtctaaaccaaaatactcgagcaaagatgcaggagagaaacaagtgattaatagtttcctcagcttgatcacaaagtgggcacattggtgggtgcaggagtccacactttgcaagccgatgagctgtccaacacctatttctcacgacaagccacataaaaagcgacatttttcaggggcaatgcattccaaattctttcccaaaatctaaaggccacaatcctagaatataggttcttatagctagactttgtagattatttcctgtctggtgaaataaagagactaatatcattgattgtgccattgataaaaaggccaaatcacttgccttggctggtagcgaaataaatatgaagcattatttgaaagaaagacttgcccttttattaagagaagaggagattaagtggtatgaaagagcgaaggttaataacctattacaaggtgacaataatactcgcttttcccatctagttgccaatggtaaacaccgcaacaacacatcttcaaattagaacaggaagggtgagttttcatgggagatgataatttaaaggcatatataaagggttgtttggaccaccagagaataccaatataaccttggtggaagattatattgaagatatc

SEQ ID NO: 9171 - DNA, 3282 bp, Zea Mays
agaagtccgcaccccacctgctcgcgcgacgcgtcacgaaaaacacccgattccgcgggcgacgccggcaggcaagatattttccgcctcgcttcatccacgtgtcatccccgtgctctcggcacgcctcccgcaccgaccacgcctcgccagcgccgcttttaaccgcaggcaggctggcgcagtgcgggacgcgtttgcaatacaactgggcgtgctcccgtccacccacctcacgaccgatcggaaatcccatctcccctgcccacccagagagagagaaaaaaaatcacaccaaatcccctccccccgatccatccatcccctcccgccgccgccgcgcgccgctgcctagatccgccttccctcccccgctccccgccgccatggcgtcctcccgcacctcctgggccgacgtcgccgacgccgagcccgccccgcctcccccggtcgccgcccccgccgccgcatccaacggccccgcgcgttcctcctacgttccgccccacctccgcaaccgcccaccagccgccgccgccgccgcgcccgcctccgccgccccgccgccgcgctccaccgccggcctcctcacccgcaccggcggcggcagcagcttcggtgcgggcggcggcggaggattcggcgggggccgcgcccgcggcggtgcccggtgggaccgcgagccggacccgttcgcggactccgccgccgacgccgaggtcccgttcgacgagcaccagaacacggggatcaacttcgacgcgtacgaggacatcccggtcgagatgtccggccgcgacatcccgccccccgtctccaccttcgccgacattgacctcggcgacgcgctcaacgaaaacatccgccggtgcaagtacgtccgccccacccccgtgcagcgccacgccatcccgatctcgctcgccggccgcgacctcatggcctgcgcgcagacgggctccgggaagaccgccgccttctgcttccccatcatcagcggcatcatgaaggccccgtccgcgggaaggccgcagcggggcggcggcatggggatgaggaccgcttacccgtccgcgctcatcctctccccgactagagagctctctatgcagattcatgaagaggcgaggaagttttcgtatcagactggtgttagggtagttgtcgcttatggaggagcgccaattactcagcagttaagagagcttgagagaggtgttgacattcttgtggctacacctggccgattggttgatttattggaaagggcaagagtatctctacagtcaattagataccttgctcttgatgaggcagatagaatgcttgatatggggtttgaaccacaagttagaagaattgttgagcaaatggacatgccacttccaggtgccaggcagacaatgctgtttagtgcgacgttcccaaaagagatccagaaaatggcatcggatttcctggataactacatcttcctggctgttggaagagttgggtcaagtactgatttgattgcccagcgagttgagtttgtgcaggaggcagataaaagaagccacctgatggatcttcttcatgcacaaagagatacaggaaagcaaactctcacgcttgtctttgtggaaaccaagaggggcgctgattcattggaaagctggttgtgcatgaatgggtttccagctacttctattcatggagatagaaaccagcaggtttgtttttactctgttcaaacagctcattctgcacaggaacggagacatttagctatagttgttcgctgcagtatgtttataccagtgcaatgaaatgcatattaacccttttctgttactatctggttaagtggtgttctggaagctttactttaaatgaggattttgctatatccagatgttattattacaaagcacactcttagatctacattgcacactagaggaatttgctatggctgtctacttgttcatatatcaagtttgaacttccaatgctgctgtattctttaaccatggttggcttgatcttttaaagtctgtggctacttgttataaactaaggtgtttttttaacaacggtctttcatttcataatgtgattgatttactgtttttggcaggaaagagaatatgctctgaggtccttcaagagtgggcaaactcctattttagttgcaactgatgtggcagctcggggcctcgacattcctcatgttgctcatgttgtcaactttgatctccccaatgatattgatgactacgtacacaggattggaagaactggaagagctgggaagagcggacttgccactgccttcttcaatgataataactcatcactggcaagatctcttgctgacctaatgcaagaatctaaccaagaggtacctgcatggctattgcgctatgcagctcgtccttcttatggtggtggtggtggtgggaggaaccggcgatcagggggagggagccgctttggtggccgtgacttccgcaatgattcttcgtcatttggcaaggggggatcccgtggtggtggtgactactatggtggaggcagcagtggtggttatggtggtggcggacacggtggagctggggctccgagtgcctgggattgatgttacagttgctcccaagtagaggggtctgccaagtttaggtcactttttactctagttctatttaggtatacatttttggtaggagctgttatacagcaacaagtacaaggtgaatgtggtcatcccctttcttcttctggttgctactggctgcagtcttaatcttgcagatgttcattacgaagagggtcttgaggacattcaagcacacgagattcctagttaggtgaaattccttggtagggatagtagctaggctctgacaagtagtgcttggtgccctttgctctttttccctttgtcagcgtcgaattttggtggtcggttgtaaagcttgtgttgagggggcttttgcggcttgatttttgtcctggattcgagttttgacaccggaggttgaagaagcggtaggatgatggtagtcctttagatcctgttgtaatgtatttaactgtgaggtgaggctggacacaataaattctgtaggcgtgtttagaggaagaagggggaagttgtgtgtgatggtttcttcagagaagattcctgctactgtgtacttcgaatctgtttttggatggagttaaattgacattatcgatgtcgtccaaatgctgtctcatttactttttgggtgtaatgtttccatgatatgctcgtgc

SEQ ID NO: 9172 - DNA, 1641 bp, Zea Mays
taaaaaccgaagcaacagttgagcgaaagcgaggagacggcgaggtgagttctggagacttggagaggcattccgcatcggtatcccgtatccagcaaaggcggcaagccatggaggagggtctggtatcagtggacaagttctccggtggcagccaggcgtactttctgacgcacctccaccaggaccacacccgtggcctcggcgcggtgggcgggtggcgccacggcccgctctactgctctccgaccacggcgcgcctcctccccatccgcttcccgggaatcgacgcctccctcctccgcccgctagccccaggtgcctctgcctccatctatctgttctctccctcctcgggccagtccctctcccttcacgtcactgccatccccgcgctgcactgccccggatcgctcatgtacctcttccgcggagacctcgggtgcatgctgtacacgggggacttccggtgggagctcggatgcgatgaagcgcggcgagcgaagcaggatttactggacgcgcttgacggggataccattgatgtgctctatctggacaacacctactgccacccatcgctcaacttccctccacgccccgtcgtcgctgagcaggtgattgatattattcggtcacatcctgatcacgaagttatcattggtgttgacactcttggaaaagaagacctcttgcttcatatatctagagcactacaaacgaagatctgggtttggccccagcgcctacagacaatacacctcctagggattgatgaaaaccgtgatatttttaccacacagaccagtttgactaggatccgtgctgttccaaggtacagtgtcaccattgataatcttgaagctctaaacacagtgtgccccactatagggatcttgccttctgctattccttgtctttggaagagcagtgaaggaaaggccaaatccaagggtaggtcatcagtgaagtctatcaggagctcagggagagagctggaggattttatgcatacagtgcgtccatggacagtcagcggcatcgtcagctcatcgttctgctatggcagggataatgataagctgacaccaaagagatggcgaaatggttctgtgactccaaaagaaaggaaggtcaggatctccagttcaagtctgtatagaagcaaagttacaatgaaacggaaggagtgctgcggtgcaaggatcaatgacactgaagaacacattggtgttacctgactttgtcccttcccaagtaatgttatgttttcttttgtaaagattaacaactggatggtggaagtcttgaagcaatgagatgggatatgttgttccaagccaaacttcagcttgctggtattcaggaatctggacgtggtctttggctctctgctatctgttccttagaaccctgtcgtgctagcaagatgcattttggtccagattcggtttgggttgtacagtgctgttccttttgcgatggtgttcagcatttagattgctgaaacctttgatgcatgttagttgctactgatacatctatttgtagtattttcatatgtctgacatgatgtcgctactgcttcaaatatatataatgttcttacaacaatgcactatttggtccattgtttgtccc

SEQ ID NO: 9173 - DNA, 3746 bp, Zea Mays
ggttcatggactttgatgagaccaaaagtatgtgcatcgctgaagcaaaaggttagctgttaaatcttggcggagaaacatgcatggctatctgaaattaaagtgattacacgcaaaaagtgcttccttgacgtactgctgctaacttgctatatgttaatagagaaggtcaaaaattacattaactaccagccattcagaaaaggaacaaacaaaaagataaaggtctatagaccataaacaaaaatggctacaaccaagcaaaaagtatggctcactagaccacatacttcactataatctatagacaatgcactaagaaattcactgtcaagttgaatagtggtgagtgcacataattttaagtcgatactcgatacttaagacttttgtatgatcaatgaacgacagggcatgtttctttgatagtagtacaaaagataaaggtataagctttctgtaatttgacaaagttattacatagactgtataccgggcttgtttggatacaggggctcattgttttcagatcggctgactaatcgcgattagtcgggctgattgtttctctgtgctcgattagggtgttggactcgattagtgtaactgatcgtccatatcatccgatttctcgaagacctcttgtacttttctttgcttatatgactcttcagtcatcatacttgagagcttattgtgttctgaaaatgaaaagtgatgtgactaggatatatccaaatgtcactctctcccttaccagagatttaggactctggtaattattttatgaaaccatacgcaatatgccttactgccatgatgactttctttatccctttgggtttctctctgaaattatgtcctggttgtgaaacaagaaaatgcagacataccgtttcttgttactactaacaccagctggtatgttctttcaaaaaaaagtggtacatagttttactttgaaaagtgagctgcacaatcattattgtaaataggacatatagaagagaacgaaaaacagctctgaaattcaccatgccacgccacacttcgcgcgccgcagttgtggcggccgaatcggccgcgacaccttaggcggggtgtggtgctggacgtcagcgtccaaacaggccctcagtcagtcattgatgtgcaccattttgatggcataagtgatttgtttatgtcttgcatcatagtactataaatctgattcttagaattcagtcatatatcagtcatcatggcctcatatgttctcaacggaagccatttaggagcaacagtaagaaccattgcaattggttcattatgtagtacttgaaatccacgatttctattatgaaaaaatacagccaaatttgagggatagttacacatcgaggctttttgaacgctactcttctggcttcctcctggtatgcccctatccacttcctccattccgcctttcagaggaaagcatttgccttttggccctttgattattgtgtggtttcaaattaatttattcattcatagcttcctaggtcgaaggtaaatagaaagtcgttggtttttgttaaacctggattgttatggctatcgatgttacttggacctctggtactaggctcctcatattccgctcactagatttctgatgttgattcaatttccttccattcaataaaatccatgtgtgtgattgttgtcctatgttaatttgaggccaaggaagtgaatgggtgaaaatgattttgtctattatcacatgatttggttttttacagcatactcttatagcccacctgtaattcatcagcatggattgattatgtgcctctctattttgttgtatcagttatgaagtttaaataaacattgaatccatgttcttgcacactttttgtaatgttcaaccaaaaaatctgcttcaaatatgttcagcaagacagaagttaataggttacattcagctttttcagttggtaatgttcacaacaacaaaaaggatgtattcagttttttcagtccttttctgttcagttcttaaccacttgtagttgcctatttggtaatgtttaagttcccatgaccgatctggcagtgcagttaaatttatgggttcttttagagccatggattagattaatgtacgttgtccacaaactcttaacaccgacaaactatccttcaagaggcgctaggcaaggagatcaaggtagaggatatggatgcgtatgcccctaaagatcttttggttgtcactacaggttcacaaggagagccacgtgcagctttgaatcttgcatcttatgggggaagtcacactcttaaactatcaaaagaggatgtccttctttattcagctaaggttattcctggaaatgagacacgggtaatgaagatgatgaatcgtctcactgatcttggcccaaaaattatcatgggtaaagattctggcctgcatacctctgggcatgcctaccgagaggagctggaggaagttcttcggattgttaaaccacaacatttcttgcctgttcatggagaactcctatttctcaaagaacatgaatcacttggaagatcaactggcatacggcacacaactgtaataaaaaatggagaaatgcttggtgtatcgcatctaagaaacagaagagttttgtccaatgggtttgtttcattagggaaggaggatctttagcatggagatcttccgacctcagaaggaacatggtttagcgcagactggtttgaaaggaaaatttaagattactacaagatgtctatggcttgataatggaagattgttggacgcactctacaaagcagctcatgctgcattgttaagttgtcctatgaattgtccacttagtcacatggagaggatggtagctgaaatcttgaggaaaatggtacggaagtatagtgagaagaggcctgatgtcattgcggttgctatggagaacaccacagcaagtttctcagaacacctcgatgctaaatcatctggaaattttgaaccttcctcagctactagccatctgagcaggagtccagctatgagtcttgaaggcagttataaaacacacccagacaacccagaggtggatgctgaagaagcccttcctgaggccacgagaacagcactggatgatgcaaccacactgttatgcatctatcatgcataatggataatatccgatgttatgtttctttcaccagtggaaatttgctcatgttacattcagtaagccggaatacctccaagatttagatattgtaatgaacagattccatagacctgtttatggaggttgggaacaacaccttggattggagcatacaaccactaccccaaaaaggtcctacttaggcaacaaccagaaccaccattcttttgagaagcctatgaagatttacaactaaagctgggaatactttttacaagtgatgaatggatatgaaggcagccttgttccaaaagcagtcttttggtgatgtacatagagcttttgcatagagtagtttatgtggcagttatctcaagaattttcatctggtggatgtacagggttcgtatagcaacatttccttgtagaaagttgaagttgtatatcgagggtggatttacctgtgtttatcttttcgaccctaagcctctgggaagctgtgaaccatagcctcatgaaatatgcctgttgttgattcagtgtttgtgtttttcttgtttgtcattattttgtactcgcttttaa

SEQ ID NO: 9174 - DNA, 4381 bp, Zea Mays
ggatagggttcatggactttgatgagaccaaaagtatgtgcatcgctgaagcaaaaggttagctgttaaatcttggcggagaaacatgcatggctatctgaaattaaagtgattacacgcaaaaagtgcttccttgacgtactgctgctaacttgctatatgttaatagagaaggtcaaaaattacattaactaccagccattcagaaaaggaacaaacaaaaagataaaggtctatagaccataaacaaaaatggctacaaccaagcaaaaagtatggctcactagaccacatacttcactataatctatagacaatgcactaagaaattcactgtcaagttgaatagtggtgagtgcacataattttaagtcgatactcgatacttaagacttttgtatgatcaatgaacgacagggcatgtttctttgatagtagtacaaaagataaaggtataagctttctgtaatttgacaaagttattacatagactgtataccgggcttgtttggatacaggggctcattgttttcagatcggctgactaatcgcgattagtcgggctgattgtttctctgtgctcgattagggtgttggactcgattagtgtaactgatcgtccatatcatccgatttctcgaagacctcttgtacttttctttgcttatatgactcttcagtcatcatacttgagagcttattgtgttctgaaaatgaaaagtgatgtgactaggatatatccaaatgtcactctctcccttaccagagatttaggactctggtaattattttatgaaaccatacgcaatatgccttactgccatgatgactttctttatccctttgggtttctctctgaaattatgtcctggttgtgaaacaagaaaatgcagacataccgtttcttgttactactaacaccagctggtatgttctttcaaaaaaaagtggtacatagttttactttgaaaagtgagctgcacaatcattattgtaaataggacatatagaagagaacgaaaaacagctctgaaattcaccatgccacgccacacttcgcgcgccgcagttgtggcggccgaatcggccgcgacaccttaggcggggtgtggtgctggacgtcagcgtccaaacaggccctcagtcagtcattgatgtgcaccattttgatggcataagtgatttgtttatgtcttgcatcatagtactataaatctgattcttagaattcagtcatatatcagtcatcatggcctcatatgttctcaacggaagccatttaggagcaacagtaagaaccattgcaattggttcattatgtagtacttgaaatccacgatttctattatgaaaaaatacagccaaatttgagggatagttacacatcgaggctttttgaacgctactcttctggcttcctcctggtatgcccctatccacttcctccattccgcctttcagaggaaagcatttgccttttggccctttgattattgtgtggtttcaaattaatttattcattcatagcttcctaggtcgaaggtaaatagaaagtcgttggtttttgttaaacctggattgttatggctatcgatgttacttggacctctggtactaggctcctcatattccgctcactagatttctgatgttgattcaatttccttccattcaataaaatccatgtgtgtgattgttgtcctatgttaatttgaggccaaggaagtgaatgggtgaaaatgattttgtctattatcacatgatttggttttttacagcatactcttatagcccacctgtaattcatcagcatggattgattatgtgcctctctattttgttgtatcagttatgaagtttaaataaacattgaatccatgttcttgcacactttttgtaatgttcaaccaaaaaatctgcttcaaatatgttcagcaagacagaagttaataggttacattcagctttttcagttggtaatgttcacaacaacaaaaaggatgtattcagttttttcagtccttttctgttcagttcttaaccacttgtagttgcctatttggtaatgtttaagttcccatgaccgatctggcagtgcagttaaatttatgggttcttttagagccatggattagattaatgtacgttgtccacaaactcttaacaccgacaaactatccttcaagaggcgctaggcaaggaggtgagtaatacctattacctcgtgctccatccaaatcccaaaagtgtaactcctctacagctagcaccaacacatgattgttttgtgcaaatgtttaggtgtgttaaatgattatgagcaatagtctgatttgatggttgagttattttcagatattaagatagtttaccttttaacgttatcaacacattgatatgctacatgatctctgtccgtgcaatcttttgatatgttacagaatgcactattcctaattgcttagttgaagcatcctgcagatcaaggtagaggatatggatgcgtatgcccctaaagatcttttggttgtcactacaggttcacaaggagagccacgtgcagctttgaatcttgcatcttatgggggaagtcacactcttaaactatcaaaagaggatgtccttctttattcagctaaggttattcctggaaatgagacacgggtaatgaagatgatgaatcgtctcactgatcttggcccaaaaattatcatgggtaaagattctggcctgcatacctctgggcatgcctaccgagaggagctggaggaagttcttcggattgttaaaccacaacatttcttgcctgttcatggagaactcctatttctcaaagaacatgaatcacttggaagatcaactggcatacggcacacaactgtaataaaaaatggagaaatgcttggtgtatcgcatctaagaaacagaagagttttgtccaatgggtttgtttcattagggaaggaggatctttaggtgaaccatttattttacacgtcgtttttttatgtcttttgcagttatgatatctaacatgatatatgatattacagctcatgtatagtgatggtgataaggcttttggtacatccactgatctctgcattgacgagagactaagaatcgcatctgatggcattatttttgtcaagtagcttcttgtacagttttggagtattttctaggtttatcttcagcaaaaatttctcctcgcatgtgaaatgatagtgatttatgtcgaaccttgtgatagtcaaaatggtaaaccatatatagtattgttcggtgcacctaaacattttacatgttactcctttgcagcatggagatcttccgacctcagaaggaacatggtttagcgcagactggtttgaaaggaaaatttaagattactacaagatgtctatggcttgataatggaagattgttggacgcactctacaaagcagctcatgctgcattgttaagttgtcctatgaattgtccacttagtcacatggagaggatggtagctgaaatcttgaggaaaatggtacggaagtatagtgagaagaggcctgatgtcattgcggttgctatggagaacaccacagcaagtttctcagaacacctcgatgctaaatcatctggaaattttgaaccttcctcagctactagccatctgagcaggagtccagctatgagtcttgaaggcagttataaaacacacccagacaacccagaggtggatgctgaagaagcccttcctgaggccacgagaacagcactggatgatgcaaccacactgttatgcatctatcatgcataatggataatatccgatgttatgtttctttcaccagtggaaatttgctcatgttacattcagtaagccggaatacctccaagatttagatattgtaatgaacagattccataaacagagacctgtttatggaggttgggaacaacaccttggattggagcatacaaccactaccccaaaaaggtcctacttaggcaacaaccagaaccaccattcttttgagaagcctatgaagatttacaactaaagctgggaatactttttacaagtgatgaatggatatgaaggcagccttgttccaaaagcagtcttttggtgatgtacatagagcttttgcatagagtagtttatgtggcagttatctcaagaattttcatctggtggatgtacagggttcgtatagcaacatttccttgtagaaagttgaagttgtatatcgagggtggatttacctgtgtttatcttttcgaccctaagcctctgggaagctgtgaaccatagcctcatgaaatatgcctgttgttgattcagtgtttgtgtttttcttgtttgtcattattttgtactcgcttttaa

SEQ ID NO: 9175 - DNA, 2732 bp, Zea Mays
gcccccctccaagggtcacaccctccaagacatcccaaatctgaagaatatgtatagaaaggcagctgcactttgggttgaactgcgtgttgaactcctatcagccattgaatattatgcagaagataaagtcaattcagctcaaatttggcggctatactggcgtttctttaggcatatgtgtatgtctgcaaaggtacctgctgtcgtgagattggcaaaagaagccttagcagaagaaaaatgtgtggtgattggtcttcagagcactggagaagctcgaacagaggaagctgttgctaaatatggcattgaattggaagatttcgtttctggtcctagagagcttcttcttaagctggtagaagataattatcctttgcctccaaagcctgattgttttgagcaaggtgaagaaaaagtccaggagtttcagcacaagcggcattatggatctgacatgtccttaaaaggacgagttagtaaacttggaaaaaaggaagacgtgagtgaagatgggggtgatgagtatcctccacattcagatcatgaatcaacagaatctgatgaggacttctatatgtgtcagatttgcaacactgaagaggagaaaaactcattgttttgttgctgtatttgtgcttcacgggttcaccctggttgcctcactccaccttcgactgacatcgtgaatgatgattggtcatgttatggttgcaaggagaaagtaaaaagctacttaaaagaaagagatgcttacttgactgaactctcaaagaggtatgatgctgcattggacagaaagtcaaaaattcttgacataatccgttccttggatttacctagtaatcctttagatgatatcatcgatcagcttggtggtcctgacaatgttgcagaaataactggacgacgtggtatgctaataagagcatcagatggaaaaggtgttatttaccaggcgcgaaacacgaaagaagttgcattggacatgatcaatatgcatgaaaagcagcaattcatggatggagaaaagaatgttgccataatatcagaagcaggatcagctggcgtttctctacatgctgatcgaagggcaaaaaatcagaggagaagagtgcacataacactagagcttccttggagtgcagaccgtgcgattcagcagtttgggagaacccatcgttctaatcaaacttctgcacctgaatataggcttcttttcacaaaccttggtggtgaaaagcgatttgcatcaatcgtggcaaagagactggagtctcttggagctttaacgcaaggagatcgaagggctggaccatcacttagcgccttcaactatgacagtaattatggaaagaaagccctgacaatgatgtacagaggaataatggaacaggttaatagttaatatttgattttcatttggaaggaagacagggtcatttcaaaatgcatgcattgttctaaagcattttatttcaaggttaccaggatgcctttcctgttgtgcctttcgaatgctctgagaatcaagctacccttgaagagttcatcactaaagcaaaagctgctttagtgtcagttggaattattagggaccctataatgtgcaatggtaaaaatggtggaaagcttactggtaggattattgattctgatatgcatgatgttgcccgtttccttaatcgtattctgggattgtttccagacattcagaatagattatttgaccttttcacaagcatacttgatatagtcattcagaatgcacgaattgaaggacaacttgattctggtattgttgatatcaaagctaaaagtgtcgaaatgaaagaatcaccaaagactgttcatgttgatactgtgtccggtgctagtacaatattatatacttttacagttgaccgtggagtttcttgggaggtaactttcatattgaagccattatctgtttctcctaagaacttgtgtgacatgaaatgtatttatatttcagttttgttctacattacctttttttctcgaaacgcaggagagctgtgcatcatattataaaagaggaaaattaggggaaaagaatcccttacaattgtagaacatgaaggtgcttgatatatttgatagatggggtacaatatatagactcacaaccctaaccctaatgggccggcagcccaacagtggtgccggcccacgcacacacacacaatctaacatctccccgcagtcgcaacgggggcaccacacatgatgagactagagtagaagcagaaggtaggagccaacgggttgaaatccccttgtagtcacaacgtcgtaagggtgcgaatgttgcggctggagtagagaccggtgtgtgctccaaggagacgatagcccgtagatgccaaggtagttgaagtcgaggtggccgcagtcgggagacacgtagcatgagcctgttcgttgggaggggtcgacgttcgagcgtcaacgaatggtgagggcgacacaacaaaagagcaccagcaacctcagagccttcttacttcgttccacgatcgatcgtcgaggagcctcgccagggaggccggcgacagcgcacgcatctgcgccagtcagggtgggtcgcgcccgcggcagaaaagaaggggtatcggcggatccggtcggaaaagccacgacagcgatggatccagccatgaagacgacgatctagacaaagggatggcggatctagtcgggagggc

SEQ ID NO: 9176 - DNA, 2960 bp, Zea Mays
cgcccaccaatcgcgaagatgctaatcttcgccggtcgccactcgcccgtctcggagctactgccgctggccaaccatttcacctgttgcggctctcgcccctccatcgaaatcgccatgccgcatggtcacgccgcagccgtggtggaccggctgctgcgcaggctggggtccgccgcttgccggctggaggtgcccccgaatatagacggggacctagcgcatgtgtggacaactctggcgaggttgcaagatatgctggttagcctggagatccgtccggagctgcaagaatggatgggggatatcaagcaggtcgcgtacgatgttgaggatctggtcgatgaattggaagaccacaatagcatggaatctcagatgagcggctgcgttgcagttggagaggaaacaagatggtgctgttcatgttcgtttctcatgcatagtacaagagcggacagaatgaagacaatcaaaagaaggttggactttttagtaaaagattctgtcatcttcagtttgatgcagtacccttttcctgatgttgagagatttgataatgaagcatttgatagagctgcagtcgttggaagagataatgacaaagcaaagataaaggacatgatcttgcaaagtaatgcacaaaagttctcaatcattcccattcttggcctcgtggggttggggaaaacaactcttgctagattaattttccttgaccagggagaaggttgggattttgatcttcgtatctggatatccttaaataggaaactaaacataaaaatgattgctagtgatataatctcgcaatgtaatcatagagaagaaaagcttttagatgttcgtacggacatggagatccaggaaaactttcagttgctaaagaggtgtttgcaagaggcactccatgaaaaacattgtctgattgtcttggatgacctttctagcacagataaaaaccagttggatgaattgaaggaaatgctgaagggtacaaatgagtctatcaaggttttagtgacgacctccagcgaaataactgcagaactactgcacaccattccaccgtacaagttgtgtcctttatctgaagacgacagttggaaaatattttctcaaaaggcttttgggaattgtgatggtgataacactgaccttaagaaaatcggaaaggaaatagtaaaaaggtgtgagggaataccattattgactcattctcttggtttagttgtacaaaatgaagtcacaaatgtgtggttagctgcaagggatgaagagatatggaaactagaaagaagagttgccactaaaatagaattgttttcaccattatatcaaatatacaatgacttctcctcaactattaaattgtgctttctatatttatccatatttcctaaagggtctacaatagataaggaaaaactgatccaacagtggattgcactcgagattattggatcaaaacatgactccttgcctccttatgtgaatggagagatgtgcatccaggactttttgtcaatatattttctccaagttcgagatacacactcagatggtgcccttaaagctattggtatcgacaactcaacaatcaaacatattccaaggtttaacaccacttctgaactctcagtggatactatttcatcctctaaagtaagcacaccatccaaggagatcccatcaactttacgccgtccggacaagtcaaaaatgcctgcactaatacctggagatggatctttaaacttaagccttaagcaggttcagaaggttactcataatttctcacctttatttgagttaggtgaagggggaacctgggcagtttacagggctgtattatcagataaccaggttgttatcatccggagagctaaaaagggccacgttcaagaggcaaaacatcttatggaagtgaagctccttacaaaaattaatcactggagtttggtgagattcttaggttttattgatgaaaaagatgagtgtattcggatcacagagtatgttccaaatggcactcttagggaacacctacatggggacgctttaatctgttacaacttgaggacgtcaaacatcctactgacagagagctaccgagccaaagtgtgctgttctgaactgtcaaaaagtggtaatatcgtgctattaaagggaacagggggctacattgatccagagtacttggagacctcagagctcactgccaaatctgatgtctactcttttggaataatactcttagaaatcatatcttctcatgggccacaagactgggatgtattgatgaaccaccggcaaagcagtgttgtacaatgggctcttgagaaattctatgacgacctcatgaatgagatattggattaccgtatggaggatcgcgtggatggagatgtggtcagggacttgctcagcttagcgttgagttgtgtggtttcgcgtggcgctgatcgcccaagcatcgtagttgtcggggagcgactgtggaaaatatggcaagatcatcgaagaaacgtaggggaacagcacgagtaccaaggaagctgggcagaatttatcgaacaagagggaatcctgaggcatcacaagtgtgtgctcaagagaagttgggagccttcaacaacgcagcaggattggtctgtgtatgttaggcagattgaattagttcaagaagcttacgataccccatggggagaggaaattttttcggggtctgtttcattggacgatatcacagtatattctcggtagaaagcttcaatacgattatattactcctgttttctccgcggtattacatgtgtagattggaggacaataacctatttgttctatttctgtttcattggacgataaatcatagtgtctcctcggtatgaactcttgaaagtttcaactcgttgttttcctcactctatttattcagtgatattgctgttagaaaa

SEQ ID NO: 9177 - DNA, 3441 bp, Zea Mays
cgcgaagatgctaatcttcgccggtcgccactcgcccgtctcggagctactgccgctggccaaccatttcacctgttgcggctctcgcccctccatcgaaatcgccatgccgcatggtcacgccgcagccgtggtggaccggctgctgcgcaggctggggtccgccgcttgccggctggaggtgcccccgaatatagacggggacctagcgcatgtgtggacaactctggcgaggttgcaagatatgctggttagcctggagatccgtccggagctgcaagaatggatgggggatatcaagcaggtcgcgtacgatgttgaggatctggtcgatgaattggaagaccacaatagcatggaatctcagatgagcggctgcgttgcagttggagaggaaacaagatggtgctgttcatgttcgtttctcatgcatagtacaagagcggacagaatgaagacaatcaaaagaaggttggactttttagtaaaagattctgtcatcttcagtttgatgcagtacccttttcctgatgttgagagatttgataatgaagcatttgatagagctgcagtcgttggaagagataatgacaaagcaaagataaaggacatgatcttgcaaagtaatgcacaaaagttctcaatcattcccattcttggcctcgtggggttggggaaaacaactcttgctagattaattttccttgaccagggagaaggttgggattttgatcttcgtatctggatatccttaaataggaaactaaacataaaaatgattgctagtgatataatctcgcaatgtaatcatagagaagaaaagcttttagatgttcgtacggacatggagatccaggaaaactttcagttgctaaagaggtgtttgcaagaggcactccatgaaaaacattgtctgattgtcttggatgacctttctagcacagataaaaaccagttggatgaattgaaggaaatgctgaagggtacaaatgagtctatcaaggttttagtgacgacctccagcgaaataactgcagaactactgcacaccattccaccgtacaagttgtgtcctttatctgaagacgacagttggaaaatattttctcaaaaggcttttgggaattgtgatggtgataacactgaccttaagaaaatcggaaaggaaatagtaaaaaggtgtgagggaataccattattgactcattctcttggtttagttgtacaaaatgaagtcacaaatgtgtggttagctgcaagggatgaagagatatggaaactagaaagaagagttgccactaaaatagaattgttttcaccattatatcaaatatacaatgacttctcctcaactattaaattgtgctttctatatttatccatatttcctaaagggtctacaatagataaggaaaaactgatccaacagtggattgcactcgagattattggatcaaaacatgactccttgcctccttatgtgaatggagagatgtgcatccaggactttttgtcaatatattttctccaagttcgagatacacactcagtttatggaatggataacagagtagttcctacaacattctacattcataactttgtccatgaatttgcaagacatgttgcttgtgatgatattataattttcgatggtaccaaaatgcaaaagggctgtgcaaaaagacaaaccttccaatatgcactcttgacatgttaccgggtgcagtcaacattttcccactcaacgctgacaaggacaagggcattgcatatcatgaactctgaggcgataacatttcctcgtgaagcatttgaattactgaagcacttgcgtgttttgaatcttagtggatgttgcattgaagaattaccagcctctataggttgtctaaagcgtctaaaatatcttgatgtttctggtgtgcagatacaaacattgccattcccggatggtgcccttaaagctattggtatcgacaactcaacaatcaaacatattccaaggtttaacaccacttctgaactctcagtggatactatttcatcctctaaagtaagcacaccatccaaggagatcccatcaactttacgccgtccggacaagtcaaaaatgcctgcactaatacctggagatggatctttaaacttaagccttaagcaggttcagaaggttactcataatttctcacctttatttgagttaggtgaagggggaacctgggcagtttacagggctgtattatcagataaccaggttgttatcatccggagagctaaaaagggccacgttcaagaggcaaaacatcttatggaagtgaagctccttacaaaaattaatcactggagtttggtgagattcttaggttttattgatgaaaaagatgagtgtattcggatcacagagtatgttccaaatggcactcttagggaacacctacatgaccaacgtaagagaatcctgaattttaatcaacgtatagtgattgcccttgatgttgctattgcattgacttatctccatttgtgttctggggacgctttaatctgttacaacttgaggacgtcaaacatcctactgacagagagctaccgagccaaagtgtgctgttctgaactgtcaaaaagtggtaatatcgtgctattaaagggaacagggggctacattgatccagagtacttggagacctcagagctcactgccaaatctgatgtctactcttttggaataatactcttagaaatcatatcttctcatgggccacaagactgggatgtattgatgaaccaccggcaaagcagtgttgtacaatgggctcttgagaaattctatgacgacctcatgaatgagatattggattaccgtatggaggatcgcgtggatggagatgtggtcagggacttgctcagcttagcgttgagttgtgtggtttcgcgtggcgctgatcgcccaagcatcgtagttgtcggggagcgactgtggaaaatatggcaagatcatcgaagaaacgtaggggaacagcacgagtaccaaggaagctgggcagaatttatcgaacaagagggaatcctgaggcatcacaagtgtgtgctcaagagaagttgggagccttcaacaacgcagcaggattggtctgtgtatgttaggcagattgaattagttcaagaagcttacgataccccatggggagaggaaattttttcggggtctgtttcattggacgatatcacagtatattctcggtagaaagcttcaatacgattatattactcctgttttctccgcggtattacatgtgtagattggaggacaataacctatttgttctatttctgtttcattggacgataaatcatagtgtctcctcggtatgaactcttgaaagtttcaactcgttgttttcctcactctatttattcagtgatattgctgttagaaaa

SEQ ID NO: 9178 - DNA, 3808 bp, Zea Mays
cgcgaagatgctaatcttcgccggtcgccactcgcccgtctcggagctactgccgctggccaaccatttcacctgttgcggctctcgcccctccatcgaaatcgccatgccgcatggtcacgccgcagccgtggtggaccggctgctgcgcaggctggggtccgccgcttgccggctggaggtgcccccgaatatagacggggacctagcgcatgtgtggacaactctggcgaggttgcaagatatgctggttagcctggagatccgtccggagctgcaagaatggatgggggatatcaagcaggtcgcgtacgatgttgaggatctggtcgatgaattggaagaccacaatagcatggaatctcagatgagcggctgcgttgcagttggagaggaaacaagatggtgctgttcatgttcgtttctcatgcatagtacaagagcggacagaatgaagacaatcaaaagaaggtttatggaatggataacagagtagttcctacaacattctacattcataactttgtccatgaatttgcaagacatgttgcttgtgatgatattataattttcgatggtaccaaaatgcaaaagggctgtgcaaaaagacaaaccttccaatatgcactcttgacatgttaccgggtgcagtcaacattttcccactcaacgctgacaaggacaagggcattgcatatcatgaactctgaggcgataacatttcctcgtgaagcatttgaattactgaagcacttgcgtgttttgaatcttagtggatgttgcattgaagaattaccagcctctataggttgtctaaagcgtctaaaatatcttgatgtttctggtgtgcagatacaaacattgccattcccggtgagtaggttgacaaaccttgaggtactggatctatcaaaaacatgtatgaaggaattaccctctttcattggtaatttacagaacctaaaatatttaaacatgcaaggttgtgataaacttcaaaacctacctttatcccttggtcatctacaacgacttgagcaacttcgactgtcatgctgcagatgcattgctatgctaccagactctttgtgcaaccttatcaatcttcgaattttggatttatcaagatgcactatgctgcgacacttacctgctttatttggtaacttagtgaacttggaggatctaagcctatctagttgtttcaaccttaagcagttaccagaatcttttggtaacctttattttcttaggttcctgaacctatcaagctgctatgaacttcagcagtttcctgaatctgttacaaacctcgagaaactggaagttcttatactccggagatgttgtagacttcgaattctccccccctcctttgcaatgattaagtaccttcgaattcttgatctggctggctgtgaagcacttcatgtatattagcaaaaattacaagtctcaagtctgtgctgacgatggacccagtattagcggcctctcttcaaggacacaccgagtgctctgctgactatgattatcactcactcacaacaaccgatgagcttgttattaaagagatcacaggcggttcccgaggccttcgtattgctgagcagttgaatctgcagaatcgactggaggtttgtttccttaagctggaatgggttcctaggtcccaatcagctcaagatcaactattggaatatacagatgaggaagtgctggagaagttccaaccaaatgagactctggagcattttatgctagttaaatatacaggcaatgtgtttcctacatggatgatgaacaaactgacttcactcccataccttgtcaatctttgtttgttccacctgcataactgcagtgctctccctccaattggccatctacaaaatctgcgttacttgcatattaaagatatgcccaacctcacaaatctagagatgggtctttctggggggcctgtgtccttggggaaattgactcacctcaaactggaagcactgaatttagaagagctgtctatactcttgtcagccaacaatgagagtccctgtttcatgtttcccaatcttgaggagttatctgttctatcatgctctaagcttgtcttcaaaccatctgtgcctaagtgtgcgaaatatgtaataaaagagagtaacatggttctgtcatgttggcagcctctggggccattctcatctccaccaatagaaaaagtagagataagtgggtgtgtgatgccttctggttggttgcaatggcttagatccatacagactcttgagaaagtagtgatagatggtgaagctctttcatcttttgagctccagaagatatatgcatttcaagaagcatctggtagtaagatttcaaaggaaactgtaagttcatctaggacaaatatgtcacgtgagttgaccactgaggatggtgcccttaaagctattggtatcgacaactcaacaatcaaacatattccaaggtttaacaccacttctgaactctcagtggatactatttcatcctctaaagtaagcacaccatccaaggagatcccatcaactttacgccgtccggacaagtcaaaaatgcctgcactaatacctggagatggatctttaaacttaagccttaagcaggttcagaaggttactcataatttctcacctttatttgagttaggtgaagggggaacctgggcagtttacagggctgtattatcagataaccaggttgttatcatccggagagctaaaaagggccacgttcaagaggcaaaacatcttatggaagtgaagctccttacaaaaattaatcactggagtttggtgagattcttaggttttattgatgaaaaagatgagtgtattcggatcacagagtatgttccaaatggcactcttagggaacacctacatgaccaacgtaagagaatcctgaattttaatcaacgtatagtgattgcccttgatgttgctattgcattgacttatctccatttgtgttctggggacgctttaatctgttacaacttgaggacgtcaaacatcctactgacagagagctaccgagccaaagtgtgctgttctgaactgtcaaaaagtgaaatcatatcttctcatgggccacaagactgggatgtattgatgaaccaccggcaaagcagtgttgtacaatgggctcttgagaaattctatgacgacctcatgaatgagatattggattaccgtatggaggatcgcgtggatggagatgtggtcagggacttgctcagcttagcgttgagttgtgtggtttcgcgtggcgctgatcgcccaagcatcgtagttgtcggggagcgactgtggaaaatatggcaagatcatcgaagaaacgtaggggaacagcacgagtaccaaggaagctgggcagaatttatcgaacaagagggaatcctgaggcatcacaagtgtgtgctcaagagaagttgggagccttcaacaacgcagcaggattggtctgtgtatgttaggcagattgaattagttcaagaagcttacgataccccatggggagaggaaattttttcggggtctgtttcattggacgatatcacagtatattctcggtagaaagcttcaatacgattatattactcctgttttctccgcggtattacatgtgtagattggaggacaataacctatttgttctatttctgtttcattggacgataaatcatagtgtctcctcggtatgaactcttgaaagtttcaactcgttgttttcctcactctatttattcagtgatattgctgttagaaaa

SEQ ID NO: 9179 - DNA, 5266 bp, Zea Mays
cgcgaagatgctaatcttcgccggtcgccactcgcccgtctcggagctactgccgctggccaaccatttcacctgttgcggctctcgcccctccatcgaaatcgccatgccgcatggtcacgccgcagccgtggtggaccggctgctgcgcaggctggggtccgccgcttgccggctggaggtgcccccgaatatagacggggacctagcgcatgtgtggacaactctggcgaggttgcaagatatgctggttagcctggagatccgtccggagctgcaagaatggatgggggatatcaagcaggtcgcgtacgatgttgaggatctggtcgatgaattggaagaccacaatagcatggaatctcagatgagcggctgcgttgcagttggagaggaaacaagatggtgctgttcatgttcgtttctcatgcatagtacaagagcggacagaatgaagacaatcaaaagaaggttggactttttagtaaaagattctgtcatcttcagtttgatgcagtacccttttcctgatgttgagagatttgataatgaagcatttgatagagctgcagtcgttggaagagataatgacaaagcaaagataaaggacatgatcttgcaaagtaatgcacaaaagttctcaatcattcccattcttggcctcgtggggttggggaaaacaactcttgctagattaattttccttgaccagggagaaggttgggattttgatcttcgtatctggatatccttaaataggaaactaaacataaaaatgattgctagtgatataatctcgcaatgtaatcatagagaagaaaagcttttagatgttcgtacggacatggagatccaggaaaactttcagttgctaaagaggtgtttgcaagaggcactccatgaaaaacattgtctgattgtcttggatgacctttctagcacagataaaaaccagttggatgaattgaaggaaatgctgaagggtacaaatgagtctatcaaggttttagtgacgacctccagcgaaataactgcagaactactgcacaccattccaccgtacaagttgtgtcctttatctgaagacgacagttggaaaatattttctcaaaaggcttttgggaattgtgatggtgataacactgaccttaagaaaatcggaaaggaaatagtaaaaaggtgtgagggaataccattattgactcattctcttggtttagttgtacaaaatgaagtcacaaatgtgtggttagctgcaagggatgaagagatatggaaactagaaagaagagttgccactaaaatagaattgttttcaccattatatcaaatatacaatgacttctcctcaactattaaattgtgctttctatatttatccatatttcctaaagggtctacaatagataaggaaaaactgatccaacagtggattgcactcgagattattggatcaaaacatgactccttgcctccttatgtgaatggagagatgtgcatccaggactttttgtcaatatattttctccaagttcgagatacacactcagtttatggaatggataacagagtagttcctacaacattctacattcataactttgtccatgaatttgcaagacatgttgcttgtgatgatattataattttcgatggtaccaaaatgcaaaagggctgtgcaaaaagacaaaccttccaatatgcactcttgacatgttaccgggtgcagtcaacattttcccactcaacgctgacaaggacaagggcattgcatatcatgaactctgaggcgataacatttcctcgtgaagcatttgaattactgaagcacttgcgtgttttgaatcttagtggatgttgcattgaagaattaccagcctctataggttgtctaaagcgtctaaaatatcttgatgtttctggtgtgcagatacaaacattgccattcccggtgagtaggttgacaaaccttgaggtactggatctatcaaaaacatgtatgaaggaattaccctctttcattggtaatttacagaacctaaaatatttaaacatgcaaggttgtgataaacttcaaaacctacctttatcccttggtcatctacaacgacttgagcaacttcgactgtcatgctgcagatgcattgctatgctaccagactctttgtgcaaccttatcaatcttcgaattttggatttatcaagatgcactatgctgcgacacttacctgctttatttggtaacttagtgaacttggaggatctaagcctatctagttgtttcaaccttaagcagttaccagaatcttttggtaacctttattttcttaggttcctgaacctatcaagctgctatgaacttcagcagtttcctgaatctgttacaaacctcgagaaactggaagttcttatactccggagatgttgtagacttcgaattctccccccctcctttgcaatgattaagtaccttcgaattcttgatctggctggctgtgaagcacttcatgtaagtactgagatgctaacaaccaatttggagtatctgaacctacaacggtgcctaaatcttcagactcagccatactatttcgaaaacttcaataagttgaagtttttgaatctttcccattgcctccctaccgttgattgcctggaatctattagttacttgttcaacttagaatatctagatctgtcagaaacttcccttgacatacctatgtcttttgcaaggcttcagaagttgcacacactgaacctcactggttgtgctccaatgcatccatcctctaatgtacaccaaacatggccaggtatattagcaaaaattacaagtctcaagtctgtgctgacgatggacccagtattagcggcctctcttcaaggacacaccgagtgctctgctgactatgattatcactcactcacaacaaccgatgagcttgttattaaagagatcacaggcggttcccgaggccttcgtattgctgagcagttgaatctgcagaatcgactggaggtttgtttccttaagctggaatgggttcctaggtcccaatcagctcaagatcaactattggaatatacagatgaggaagtgctggagaagttccaaccaaatgagactctggagcattttatgctagttaaatatacaggcaatgtgtttcctacatggatgatgaacaaactgacttcactcccataccttgtcaatctttgtttgttccacctgcataactgcagtgctctccctccaattggccatctacaaaatctgcgttacttgcatattaaagatatgcccaacctcacaaatctagagatgggtctttctggggggcctgtgtccttggggaaattgactcacctcaaactggaagcactgaatttagaagagctgtctatactcttgtcagccaacaatgagagtccctgtttcatgtttcccaatcttgaggagttatctgttctatcatgctctaagcttgtcttcaaaccatctgtgcctaagtgtgcgaaatatgtaataaaagagagtaacatggttctgtcatgttggcagcctctggggccattctcatctccaccaatagaaaaagtagagataagtgggtgtgtgatgccttctggttggttgcaatggcttagatccatacagactcttgagaaagtagtgatagatggtgaagctctttcatcttttgagctccagaagatatatgcatttcaagaagcatctggtagtaagatttcaaaggaaactgtaagttcatctaggacaaatatgtcacgtgagttgaccactgaggatggtgcccttaaagctattggtatcgacaactcaacaatcaaacatattccaaggtttaacaccacttctgaactctcagtggatactatttcatcctctaaagtaagcacaccatccaaggagatcccatcaactttacgccgtccggacaagtcaaaaatgcctgcactaatacctggagatggatctttaaacttaagccttaagcaggttcagaaggttactcataatttctcacctttatttgagttaggtgaagggggaacctgggcagtttacagggctgtattatcagataaccaggttgttatcatccggagagctaaaaagggccacgttcaagaggcaaaacatcttatggaagtgaagctccttacaaaaattaatcactggagtttggtgagattcttaggttttattgatgaaaaagatgagtgtattcggatcacagaaccaacgtaagagaatcctgaattttaatcaacgtatagtgattgcccttgatgttgctattgcattgacttatctccatttgtgttctggggacgctttaatctgttacaacttgaggacgtcaaacatcctactgacagagagctaccgagccaaagtgtgctgttctgaactgtcaaaaagtggtaatatcgtgctattaaagggaacagggggctacattgatccagagtacttggagacctcagagctcactgccaaatctgatgtctactcttttggaataatactcttagaaatcatatcttctcatgggccacaagactgggatgtattgatgaaccaccggcaaagcagtgttgtacaatgggctcttgagaaattctatgacgacctcatgaatgagatattggattaccgtatggaggatcgcgtggatggagatgtggtcagggacttgctcagcttagcgttgagttgtgtggtttcgcgtggcgctgatcgcccaagcatcgtagttgtcggggagcgactgtggaaaatatggcaagatcatcgaagaaacgtaggggaacagcacgagtaccaaggaagctgggcagaatttatcgaacaagagggaatcctgaggcatcacaagtgtgtgctcaagagaagttgggagccttcaacaacgcagcaggattggtctgtgtatgttaggcagattgaattagttcaagaagcttacgataccccatggggagaggaaattttttcggggtctgtttcattggacgatatcacagtatattctcggtagaaagcttcaatacgattatattactcctgttttctccgcggtattacatgtgtagattggaggacaataacctatttgttctatttctgtttcattggacgataaatcatagtgtctcctcggtatgaactcttgaaagtttcaactcgttgttttcctcactctatttattcagtgatattgctgttagaaaa

SEQ ID NO: 9180 - DNA, 2934 bp, Zea Mays
  misc_feature (2933)..(2934): n is a, c, g, or t
aaatattcctaccccgctgctccaccccctgcgtctgacgggcatggcccacctgcagctctcagcggtcgccggcgcccggccggccgccgcgggcgggcgcggcgacgagatggaggacgtcgcgctgctcgactcgtacgacgaggagatggggctgccgctgccgggtgcatcgggcgccgaggctgcggaggcgcacgtgcgcgtcaccggcatgacgtgctccgcctgcaccagcgccgtcgaggccgccgtctccgcgcgccgcggagtgaggcgcgtcgccgtgtcgttgctccagaaccgcgcccacgtcatgttcgatcccgcgctggccaaggtgcttaccggtgctcctctcctcgctttggtgtggcgtatttcgacgggcgatgcgatccttgcgtactcgcaaccgttgagtggacgcgaggctcgtgcggttccgtgggaagttgggagctctcccgtagaggatataattgaagcgatagaagatgctggatttgaagcagaaattatccctgaatctgctgtctctcagcctaaatcacagaagactttatcagcacaattcaggatagggggaatgacatgtgccaattgtgtaaattcggttgagggtatcttaaaaaagctacctggtgttaaaggagcagtcgttgccttggcaacctcattaggggaagttgagtatattccttctgccattagcaaagatgaaattgttcaggccatcgaggatgctgggtttgaagcagcattcttgcagagtactgagcaagataaggttttgctgggactgattggtttgcacacagagagggatgtagaactattaagtgatattcttaagaaaatagatggcttgcgacaatttggtgtaaatagtgttctctcagaagttgagattgtattcgatccagaagctgttggtctcagatcaatcgtggatacaattgagatgacaagcaatgggagtttgaaagctcatgttcagaatccatacactcgaggggcttcaaatgatgcacaggaggcctccaaaatgcttaaccttctacgttctagcttgttcctcagcattcctgtatttttcatacgtatggtttgccccagtataccatttttaagtacactactaagcatgcactgtggaccatttctcatgggggatttactgaagtggatattggtaagcattgtacagtttgttgttggcaaacggttctatgttgcggcttatagggctgtgaggcatggctctacaaacatggatgtgctagtggttcttggcaccactgcatcatatgcatactctgtctgtgcactactatacggagcatttactggatatcatcctcccatatattttgagacaagtgcaatgataattacatttgtgttgctcgggaagtatctcgaggtgcttgcaaaagggaagacatcggatgcaattaagaagcttgtagaactggtcccttctactgctgttttggttctgaaagacaaagaagggaaacatgttggtgagagggagattgatgcacggttggtccaacctggtgatgtcttaaaagtgcttcctggttcaaagattccagctgatggtgttgtcgtttggggaacaagtcatgtgaatgaaagtatgataactggtgaatcagcacccattcctaaagaagtatcaagtgtggtaattggggggacgataaacttacatggtatccttcatatacaagcaacaaaagtaggatctggtacagttttgagtcagataatctctctggttgaaactgctcagatgtccaaagctcctattcagaaattcgctgattatgtggctagcatttttgttccaattgtcatcacattgtctatagtaacattttctgcgtgggacactaacacaaggaaaggctgttgtaacagctgcaaaggttttctcgggaatggacctaggagatttcctcacactggttgcatcagcagaggcaagcagtgagcatcctcttgccaaagctattttggactatgcattgcatttccatttctttggcaagcttccttcatcaaaagatggcattgagcaacgaaaagacaaggtattatcccagtggctgcttgaagctgaagacttctctgcagtacctggcaaaggagttcagtgctcgatcaatgggaagcatgttttggtcggaaaccgttctttgatgactgaaaacggtgtgaccattcccccagaagcagaaactttcttgatagacctggaatcgaatgcaaaaacaggcatacttgtggcatatgatggcgattttgtgggtttgatgggcataaccgaccccctgaaacgggaggctgctgttgtagtggaaggactaaaaaagttgggtgtccatccagtgatgctcacaggagataattggaggaccgcgcaagctgttgctaaggaggttggtattgaggacgtgagagcagaggtgatgccagccggaaaagctgacgttgttcgctccctccagaaggacgggggcaccgtcgccatggttggcgatggcatcaacgactccccagccctggcagcagccgacgtcgggatggccatcggcgggggaacggacattgccatcgaggccgcggactacgtgctggtgcggaacaacctggaagacgtgatcaccgcgatcgacctatccaggaagacgttcagccggatccggtggaactacttcttcgcgatggcctacaacgtcgtggccatccctattgccgcgggcgcgctgttcccgtttaccgggctccagatgccgccgtggctggccggcgcctgcatggccttctcgtccgtaagtgtagtgtgctcgtcgctactgttgaggaggtacagaaaacccaggctgacgactgtgctgcagataactgtagagtgnn

SEQ ID NO: 9181 - DNA, 1784 bp, Zea Mays
atggacatcaaggagcggatccgccgctcgccgccgtcgtcgccgcaggctgtgggggaggcggcggcgtccgcgcccggacacccgcgcgggaggaaggcccgggtcgcggtgcttcccctgtcagtcgcctgcggggtcacgctgttgttgctcgcgggcgtctccgccgcgaggaggggtgcccaattctccggcgcggatcctaccactctctccggcaacgacgatcgtggcggctttgaacaggccgggccgcgcgatggagagcatgcaactacggtgtcttccaaagttcaaagggacaaactaattggtggcttgttagctcctggttttgatgaacagtcatgtctaagtagataccaatcagcattgtatcgtaaagagtcgccccatttagtatcaacctaccttttggaaagactgagagaacatgaggttctccagaagaaatgtggcccatatacagactcatacaagaaagctattgagcaactgaattctggtcaggatataatggttggagattgcaactatttggtgtgggtatcttatagtggtcttggtaacaggatcttgactattgcctcagcatttctctatgccatccttacaaacagagttctacttgtagatggagataaaggcactgcagatcttttctgtgaaccattccctgaaacttcatgggtattaccgccggatttccctattactaaatttaagaacttcagtattggctcccctgagagttacggaaacatggcgaaaactgaagctattcattctgatggttcttttaagggtcctaaacctgcctttctatatcttcacctggctcatgactatgatgatcatgataagctttttttctgtgaacatagtcagcaacatctccagaagatcccatggctgatcttaagatccgataattactttgtaccttcgctttttctgatctcatcataccaagaggagctcacgaggctgtttccgcagaaagatgttgtcttccatcacttgggacgttacttgttccaccctaccaatgctgtgtggggcttgattacaaggtactatgattcttatcttgccagagctgacgagaagttaggtatccagatcagagtcttcgatactgaaaccggtccatttcagcatgtcttggatcaggtccttcattgcacactgaaggaaaaattactaccagagatcaacgcgcaacagccaattatctcgacagggaacatcaagtctaaagttgttctgattacttctttgaactcaggatactacgaaaggatcaggaacatgtactgggaacatccgactgagaatggtgagatgattagcttccatcagccaagccacgaggagcaccaggattcagacaagacaatgcataacatgaaagcatgggcagagatttatctgctgagcttatctgatgctatggtaacaagtgcatggtcaacttttggatatgtagctcagggtctgagtggttcgaagacgtggcttctgttcaagcctgaaaatcgcactgcgcctaatccaccttgccgtcaggtcatgtctatagaaccgtgctttcatgctccgcctttctatgattgcaaaactaggaagggaactgacacagggaagcttgttccacatgtaagacactgtgaagatatgagctgggggctcaagctagttgatacaggtacataggttcaggtttgtatttatattgaaggcaaggtttgagcgacacagttaatacaaaatggcatagg

SEQ ID NO: 9182 - DNA, 3760 bp, Zea Mays
aaaatgacattttttaatttgtttttacagaaccacgtagattgttacagcgcacaggaccattcattaattgccacttaatccggtcggtgttcaactggactcagctcaaaaatgggagggaaaaaaacatccctgcaaaattctctcgattctagtttatcgtccaaactcatgcaaatatctgaattctgcatcaactcccttatcatacactcttatttttaaaaggaaaagcaactagtaaagatcaccgataattgtcggatacacaagcacggcagctacccttgctacttccgtgatcatccatcgcacagcaccaccccggcatcaactccactttgttcaagtaaatcagcacctctctgtattcatctgatgctcccacagctcaccaaattcaccgttaatcctcaattagcctgttgttcagctgcacctcgaaccggagccaagactcggctcgcatttctgtgttcatcatatcactctctggtgcgggatagtagtcctcccgtaactgcatgtccctcagatttggcaccttcaagaaaaaggtcaggaaatgctcatgcgtggtgccatggacgaagagcttcctgagtccaacgcagccctggagcagccccacggcgggcagtgttaggctacgctggttcacttccttgtcttggggaggccaataatccagctcatacaaagtcattagtgaatctataccctgcaaataaaatcgctcccacagagagagatccatttgacctgctggtgcagtaagagcatagccaactgcctcactcagatccaacttcatcttggccagcactgggaaacctgcaagatcactcaggccaaataatgggccagggcgtgcacatgtccggcaatcaccctccactttaattgagatctcctctagaacagggcagctatcaagcccagcagagatgagtggggagagtacctcaccggcagggaaccagagggagagtgaacgcagcatctcccagctgactagatcatccaattccatgtacctacatttcttcgaagcagactcatatgatacttcaccaccgagatcgtcatcttcatgattgcatccggctatgccgttggccacactctcaggctgttcaacttccttccagacacagctgatctcaagactctcaatgcgatcacggatcggacttagagcagtgaggcatgctgccgtgtccagaagccggcagtttaagatactgacttctttgattgtgggccgaagagcagttgctagtctcctgatcccagctggtgtgacaagatcacagccatggatggcaaacttagcaagcctcccgcacccacggcctatggcagcaaggctggcgtcagtgagatccaaacagcccttgatgcatagcgactccagcgaaccgcacacagcaactccgtcgaggtgcagccaagatgccttgcacaagccctggaagccccccagcgtcaagaacttgatccgtgggcacctgcgggcaagcgcctccatcgccggcgctgtctcaagcacattatgccgcatgtcaagcgtgaaatcctccagcgccggtagtgcagcgaagaaggaaaccagccctgcgacggtgattgccgcgtcctctcgttggccggtggccgccggctcgaaaggttcccggagccgcaggatcgccagcttggggcacctggcggcgatggtgagaagcgcgtcgtcgctgacgaagtcaatataccgagggttgaacacacagggcgccacgagcttctggagactggggcaggatccggcgatggcctccagctcggcggcgtggaacccgtccgtggcgcccgcgaggccgaggtcgagctccgtgagcgccgcggcggctgccgggtgcgctgcaagcgccggctcgatgtcctccgtccagcagtagaactcggagaggtcgagcgtcctgagcgcggggcagtcctcgaggagaggctcgagatccgcgcctgcgtcgaggccgggcgggcgctggtgccagcgcacgagcttgacactgcggaggccggacctccagtgcggggtgaggctggcgagcgtggtggggtcgcggcaatagacggcgagcgaggacacggcggggaagcagtaggcgaggcgcgccgcgatgaaggcgttctgctctgcgacctcctccgccgtcacggacggtgcgacggcgtcggcggacggcgccgcggaggagaggaacgggtggccccacggcgacaccagcgagaggtcgagccgctccagcgccgggaagcagaaagtcggcctgaggaagagaaacgcgttcgaccgtgggtccccgcgcagcgagagcgcggcgcgcgtggcccgctccgccgcgaggagccggtggcacgccagcgcggcgcggtgccgggaccgcgcgtcgtcgaggaagcccaggatgtggagcagcagaggctctggcaggtctaggatgggagagcccgccgcggccgccgcgtcttcctcagccatgcgatgcgacgcggcgcggcgatgaggggtgggggtgggacgggatgggatgggggatgcaccgccgcgtccggcaaagtcgtctaccccttttttcctttcccttgcgcgggcgggggggcagttgggggagaggagagggaggaagggagggggatgtggcctgcgggtgaaggggcgggcggagtggggacgggaagctgcacagcgaagtgatatactagtcgacagctctatctttttttcctttttatttttgtctgtatatataatgatgaataattatcttatcctatccgcatcgacctattttttttcccttttggattggaaatataaataatcccccctttctctttccgtcgctctcctatgctctctggcctctgcgtatgcgcctaggcgagcccgtgcgctggttggcctcccggacgcggccgcggcgggcgatggggtcgtcggcgccggtgagggcggcgggaggcacaagggatcccggcgagaacccggcggtggggaggctgcgggagctcttcacaggcgacgcggcagatgggtgggagaagtcctgggagtttggtgtgaccccatgggatttgggaaagccaacacctgtcattgaacatcttgctagatcaggaacactcccaaaagggagagctttggttcctggatgtggaatgggatacgatgtggtcgctcttgcaagccctgaacgttttgttgttggcttggatatttctgatatggctgttaagaaggctaagcagtggtcatcctctttgcccaatgcagattattttacttttctggctgaagatttcttcaagtggataccaagtgaacaattcgaccttatatttgattacacgttcttttgtgcacttgacccgagcttaagggtggcttgggcagagacagttaatcggcttctaaaaccagatggagagcttcttaccttgatttatctgataagtgatcaagagggaggaccaccgtacaataatacagttgctgactatcagaaggtactggaaccactgggtttgaagtctgttcttatggaagacaatgagctagccattaaaccacggaagggatgtgagaaaattgggcggtggaagagatgcgcacaccaatcatctctgtgagagaaagcagtgattttgcaagcgatcgtccttctctctctctctctgggcaacataagcgatcgtctaattgggcatgaaa

SEQ ID NO: 9183 - DNA, 3963 bp, Zea Mays
aaaatgacattttttaatttgtttttacagaaccacgtagattgttacagcgcacaggaccattcattaattgccacttaatccggtcggtgttcaactggactcagctcaaaaatgggagggaaaaaaacatccctgcaaaattctctcgattctagtttatcgtccaaactcatgcaaatatctgaattctgcatcaactcccttatcatacactcttatttttaaaaggaaaagcaactagtaaagatcaccgataattgtcggatacacaagcacggcagctacccttgctacttccgtgatcatccatcgcacagcaccaccccggcatcaactccactttgttcaagtaaatcagcacctctctgtattcatctgatgctcccacagctcaccaaattcaccgttaatcctcaattagcctgttgttcagctgcacctcgaaccggagccaagactcggctcgcatttctgtgttcatcatatcactctctggtgcgggatagtagtcctcccgtaactgcatgtccctcagatttggcaccttcaagaaaaaggtcaggaaatgctcatgcgtggtgccatggacgaagagcttcctgagtccaacgcagccctggagcagccccacggcgggcagtgttaggctacgctggttcacttccttgtcttggggaggccaataatccagctcatacaaagtcattagtgaatctataccctgcaaataaaatcgctcccacagagagagatccatttgacctgctggtgcagtaagagcatagccaactgcctcactcagatccaacttcatcttggccagcactgggaaacctgcaagatcactcaggccaaataatgggccagggcgtgcacatgtccggcaatcaccctccactttaattgagatctcctctagaacagggcagctatcaagcccagcagagatgagtggggagagtacctcaccggcagggaaccagagggagagtgaacgcagcatctcccagctgactagatcatccaattccatgtacctacatttcttcgaagcagactcatatgatacttcaccaccgagatcgtcatcttcatgattgcatccggctatgccgttggccacactctcaggctgttcaacttccttccagacacagctgatctcaagactctcaatgcgatcacggatcggacttagagcagtgaggcatgctgccgtgtccagaagccggcagtttaagatactgacttctttgattgtgggccgaagagcagttgctagtctcctgatcccagctggtgtgacaagatcacagccatggatggcaaacttagcaagcctcccgcacccacggcctatggcagcaaggctggcgtcagtgagatccaaacagcccttgatgcatagcgactccagcgaaccgcacacagcaactccgtcgaggtgcagccaagatgccttgcacaagccctggaagccccccagcgtcaagaacttgatccgtgggcacctgcgggcaagcgcctccatcgccggcgctgtctcaagcacattatgccgcatgtcaagcgtgaaatcctccagcgccggtagtgcagcgaagaaggaaaccagccctgcgacggtgattgccgcgtcctctcgttggccggtggccgccggctcgaaaggttcccggagccgcaggatcgccagcttggggcacctggcggcgatggtgagaagcgcgtcgtcgctgacgaagtcaatataccgagggttgaacacacagggcgccacgagcttctggagactggggcaggatccggcgatggcctccagctcggcggcgtggaacccgtccgtggcgcccgcgaggccgaggtcgagctccgtgagcgccgcggcggctgccgggtgcgctgcaagcgccggctcgatgtcctccgtccagcagtagaactcggagaggtcgagcgtcctgagcgcggggcagtcctcgaggagaggctcgagatccgcgcctgcgtcgaggccgggcgggcgctggtgccagcgcacgagcttgacactgcggaggccggacctccagtgcggggtgaggctggcgagcgtggtggggtcgcggcaatagacggcgagcgaggacacggcggggaagcagtaggcgaggcgcgccgcgatgaaggcgttctgctctgcgacctcctccgccgtcacggacggtgcgacggcgtcggcggacggcgccgcggaggagaggaacgggtggccccacggcgacaccagcgagaggtcgagccgctccagcgccgggaagcagaaagtcggcctgaggaagagaaacgcgttcgaccgtgggtccccgcgcagcgagagcgcggcgcgcgtggcccgctccgccgcgaggagccggtggcacgccagcgcggcgcggtgccgggaccgcgcgtcgtcgaggaagcccaggatgtggagcagcagaggctctggcaggtctaggatgggagagcccgccgcggccgccgcgtcttcctcagccatgcgatgcgacgcggcgcggcgatgaggggtgggggtgggacgggatgggatgggggatgcaccgccgcgtccggcaaagtcgtctaccccttttttcctttcccttgcgcgggcgggggggcagttgggggagaggagagggaggaagggagggggatgtggcctgcgggtgaaggggcgggcggagtggggacgggaagctgcacagcgaagtgatatactagtcgacagctctatctttttttcctttttatttttgtctgtatatataatgatgaataattatcttatcctatccgcatcgacctattttttttcccttttggattggaaatataaataatcccccctttctctttccgtcgctctcctatgctctctggcctctgcgtatgcgcctaggcgagcccgtgcgctggttggcctcccggacgcggccgcggcgggcgatggggtcgtcggcgccggtgagggcggcgggaggcacaagggatcccggcgagaacccggcggtggggaggctgcgggagctcttcacaggcgacgcggcagggatacgatgtggtcgctcttgcaagccctgaacgttttgttgttggcttggatatttctgatatggctgttaagaaggctaagcagtggtcatcctctttgcccaatgcagattattttacttttctggctgaagatttcttcaagtggataccaagtgaacaattcgaccttatatttgattacacgttcttttgtgcacttgacccgagcttaagggtggcttgggcagagacagttaatcggcttctaaaaccagatggagagcttcttaccttgatttatctgataagtgatcaagagggaggaccaccgtacaataatacagttgctgactatcagaaggtactggaaccactgggtttgaagtctgttcttatggaagacaatgagctagccattaaaccacggaagggatgtgagaaaattgggcggtggaagagatgcgcacaccaatcatctctgtgagagaaagcagtggtattttcctaaacaaagaaataaaagaagaatagaccatgtagctgcctcaattatcggatacttcggtgctcctgctccgtcacctttagtcgtcaatgaaattctagcttcaattggggagatgcatagagatctcagttgcctagaggtgtcgcctttagtggctacctgagtacctgtgccactacattcattgcttttaatatggttcagtcgtgaattgtttggatgtaattgcttaattatgaattctgtttgatcgagtagttttgcatggattgtgctggttttggtaagccttgtgcttactaataccatttgaccttcttttctcttctcttgatgaaaaacatgtgttacgggaaaaaaagaatatatggaaggatcaacttcttacattt

SEQ ID NO: 9184 - DNA, 2374 bp, Zea Mays
cccgcactcaccaacagaaagggaaaagaccatcctacccacgccagctccggagttccgacgcaacttcccattccgatccacatcagccccgtcgctgtctctccaggatctggagaccctacccgcctgagccctcagccggccgcgcggtgcggcaccgcaccaccgccaccgagccacgaacccgccggagtaccgacccgcctgcgccctccgctggccgtgcggcgtggcagcgcaccacctacggcgggctgcggcaccgccccggccctcgcaccagttccgcggcgacgtggtccagcagcaccgccaggccgcctacggccatttcactcgcggcttctgagcatctacctgcacttcttcaattacctgcagctttcatcgtatttcctttgcattgcataccgtgcagccacctctgcacatgatgtttcggatgttatcttattattaaaaaactagatttactcatgtttttcttcctctgtcattattgctgatttggtaactaatctttctgtggggtttatgcactgttaatttttccctgtcattttaggtctaatttgtattcgacactctcatcgtagtaactgcctcataggttttgtgccctctgtatacatctctatcggctccatgtccaaggcactgcaccacccttttgttatcaggttttaaaccggcttttggaattgtacacatggatcaatttgtgggagtggaaattagagcagatttctgtgcttttttttttccagcacatctgccagactagtatcatcagcaattgtccatcgcagcataggattggtgctcacgtcgcgacatccaaagccagccacaagataggcacacagcgctgctccgcaccaagaatgacgccaagtgtcacgccctggattcctctggcacccaccctcctattagtactctgcactggacttgcagcgctgcgtcctcgacgaggacgtcgccgggagaggaggcagggaagggagctgcccgccagcatgggccagggcgtgcgacgggtgccgcgcagcccccagcgtggtgtactgccatgcggacaccgcgtacctgtgcgcgtcatgcaactcgcgggtgcatgccgccaatcgcgtggcctcgcgccatgagcgcgtgcgcgtctgcgaggcctgcgagtgcgcccccgcggtgctcgcgtgccgcgccgacgcggcggcgctctgcgctgcctgcgacgcgcaggtccactccgccaacccgcttgcggggaggcaccagcgcgtgcccgtcctgccgctcccggccgccgccgtcccggctgcctctgtgctcgccgaggcagctgccaccgccgcggccgttgctggtgacaaggacgaggaggtcgactcctggctgctgctcaccaaggacccagacgacgacgacaagaaccacaactgcagtagcaacaacaacaacatcagcagcaacaccagcacgttctacgcagacgttgacgagtacttcgatctggtcgggtacagttcctactgtgacaaccacatcaatagcaacacgaaacagtacgggatgcaagagcagcagctcctgctgcacaaggagtttggagacaaggagggaagcgagtacgtggtgccttcacaggtcgggcagcagcagagtggctatcacagagttattgggacggagcaggctgcctccatgactcccggggtcagtgcttacacagattccatcagcaacagcatctctttctcatcgtcaatggaggtgggtatagtaccagacaacatggcaacgacagacatgccaagctccggcatcctgctgacgcctgctggggccatcagcctgttctcgtcgggtcctccgctccagatgccgcttcacttggcctccatggacagggaggccagggtgctgaggtacagggagaagaagaagagcaggaagtttgagaagaccatacggtatgcaacgaggaagacgtacgcagaagcacggccgaggatcaagggacgcttcgcgaaaagatcgtctgatatggatgtcgaagtggatcagatgttctcagctgcggctctgtcgtctgatggtagctatggtaccgttccatggttctgaaggaactttagtgagacattatatgtatcatacagtataataattgtaacatgcgttgaccatatatagtggtaaggtcaagtacaagtagttctaggaaaccgatggtaatgagtgatattgtgtttgttttgaaagataaatgaacaaatatcttagcatttgagttttggtttgtaattgcatgcacatatcaggtctatacagaattttcagtcacttaaacatttttcactgaacagat

SEQ ID NO: 9185 - DNA, 2143 bp, Zea Mays
catgtaccctagatctgactagtcagtcaatccgagattgcaattctcccgtcccgtggtctctacctccattccatgccacaaccaccaccaccactgcattctcaaacgagcagtgcctgaacccaagtgcagtgcagcagccatgggagcagcagcaggtggccacgcgctgcgcgccgtcggcgacgtcgtctcgttccccgcgaccgtcgccgccttcgtggaggcgctgctccagggctgggccgaggccagggccgggctgctggtgccgctgctccgcgccgcggtgctgctgtgcacggccatgtcgctgatcgtgctggccgagaaggtgttcctgggcgcggtcagctccgtggcgaagctgcggcgccggcgtccggggcgggtgtgcaggtgcgaccccgacgaggaggcggctgcggcatcccaggcctatcccatggtgctcgtccagatccccatgtacaacgagagggaggtttaccagctatcaatagaggcagcctgcaggctcacatggccggtagatcgactaatagtgcaggtgctggacgactccaccgactccgtcatcaaggagctggtgaagggcgagtgcgagcggtgggccacggaggaggggatcaacgtcaagtacgagacgcgcaaggacagggccgggtacaaggccggcaacctcaaggaggggatgcgccacgcctacgtgcgcgcctgcgagttcgtcgccatgttcgacgcagacttccagccgccgccggacttcctcgtcagaaccgtcccgttcctcgtccacaaccccagcctcgcgctcgtgcagacacgctggaagttcgtgaatgccaacgactgcttgctgacgagaatgcaggagatgtccatggactaccatttcaaggtggagcaggaagctggctcttccttatgcaacttctttggatacaacggaaccgctggagtatggagaacgcaagcgatcgtcgagtccgggggctgggaggaccgaaccactgctgaggacatggacttggcgctgagagcagggctcctgggctgggagttcgtctacgttggaagcataaaggttaagagtgagctgccgagcactctcaaggcgtaccggtcccagcagcaccgctggtcatgcggacctgccctcctgttcaagaaaatgttctggcaaattctcgctgccgagagagtgtcggtctggaagaagtggtacatggtctatgacttcttcattgcccggagaatcattcctgtgtgggagctcatctatatccccatagctatcactcttctcaactctgttgggactccaaggtctatccatctggtcatactgtgggtcttgttcgagaacgtaatggcgttgcatcggtttaaagccatcttgatagggtttctcgaagctgacagggccaacgaatggatcgtgacgcaaaagctggggaatctgcagaagctgaaatcgatcgccagacttacaggaagctaccgtttcaaagacaggttccatttcctggaggtgttcattgggctgttccttttggcctctgcgtgctttgactacttatacagagatgactatgtttacctctttgttcttccccaatcgatcatgtatttcgcgattgggtttcagttcgttggtctcaatgtctctgaagactgaccaattgcaagacaactgaacgttttggttgcgatattatgattgctcgggtcaaggttcttgtatcgatggtctacagaagggcaggtttgtgtgcgatctagtagatacgtcatacttcaggagaggataagcacacgctggaggttgagacgaatctattataatccagtaggtgccaaaaaaatgcatctaaaacctgttgatgtgtctggaaaacacaaccagtgtatttagatataagagttgtgtaccgacgatcagatcttgctggtagtatgcttgaagggaaaatactgagtacagccacactttcgatggaattaggcctaatgagtggctacagttctgctcatagacattgagaaagattttggctcctgggtcctgaacgtgatgcggaattagggttgagacgggcttggcagcgaaggcccgtgtacatgacgtggaatgtca

SEQ ID NO: 9186 - DNA, 1225 bp, Zea Mays
  misc_feature (1225)..(1225): n is a, c, g, or t
cgtgaacagaatggatagtgataatggatattttgtcatccctttttctggcgatcgaatccaacagaaggcaaggaaaggagaagaggcttcaccatccatgcggcgtgtgtagagagagagagagagagagagagaggggtagcagtagcaagcaagggcaggccaggccattgcaggaccagcaccagcgtccggttcgctgcaccactctggagccagcactgcaggtgggcgccgtgggtgtggttggggtgagagagagagagagggagggcgtctgcgtctggccctttcaccttctcgcgtagtccgtagagatagagtgccgccgccgccgcctgcatcctgctaccacgggtcgagacgggtagatgaggaggaggaggagaacagctcgtcactgacgctgaccaggacccagacctggagctgatgctgatgcctcctccacgcataatgccaatgccactccccactctcagcctccaagagctttcactgattggagcgcgtccaacagtgcctttgccgcacagcccgcccctgctaccaccaatacacccttccactacaacctctcccagtcttatgccctatggacccattacatgctcaacaagaatgtatcctactctacttactctacaccacatgagccgttgcgccatacccacatcccggataagtattcaggttgtgcattcagccttgggtttgactctttcactacgatgtcccttggaccaaatatttgtgccaacatgacgcccatggaaagatctatatctgccaaagaacctgagaattcagaggatttgcctacagtagttagaagcagtgatgaaatggacactagaaacagtggcgacgttcgtcgtgacacagttgacactcttcctgagtcgaagcagagccatgaaagttgcgcttctgttagtaacaagttcgactctggagagtaccaagtcattttgcgcaaggagttgactaagagtgacgttgcaaattccgggcgaattgtgcttcccaagaaggatgctgaggctggtcttccaccattggtgcaaggagatcctctgatactacagatggatgacatggtgcttccgattatatggaaatttaagtatagattttggccaaacaacaaaagcagaatgtatattctggaagctgcaggtgaattcgtgaagacacatggccttcaggcaggggatacacn

SEQ ID NO: 9187 - DNA, 1539 bp, Zea Mays
attcttactgacaaccttgaggaggaagacatccgatgcccgatgccgagcccaaacccgcgagtcagcgtgcggcagcgctccaatccgacttcatccctgctcggctggccgctacattgctgctgaaccctagccgccgcgccgctacctgctaccatcgctccacccgccgtccgccgcgacgccgcccatcgcgtcaccatcgtccggaaactgggcaataggggttgcggccgcccgttgccaccaggtcctctgcgcctgctgctacgggctgtccgcggcaccgcgcgtcacagtcgtcggaggcgcgttgggcggccgcctggttggccagccggcgactgcgtgtctctgtgctccgtggtccctttccttctgcgagaattgcagagcaattggggtacacagcacaggcacatgaatacaacacaacagtttgctctctgattcgatcgatccaactagcctccaagcatggtgttcggccggagcaaatcaacttcgtcgacgacgccatccgcgccctcaaaggcggcggctgcgtgctccgagctgcgcaccgcgtaccacgactgcttcaaccggtggtacgcggagaaattcgctaaggggcagtggcagagggacgactgcgccgaccactggcacaagtaccgcgcctgcctcgaggaacatctggaagacaagcatctgaggcaaatcctactggatgcagaaacttctgcattttatgccatgcctgaggccaaccctcccacaggacaaggaactacaaaatgacaatccacctgattggttacccgcacggccgcaccatctcatcttggatcacccctgcgcatggacgcgcagccatccaatcaggctgatatctccttcaccatatgccatatcggacttcattcaatcaggatatatagaaccttggtagatgaattagaaactccttggatcttgacaattgttaggcccctggatcatgtaacacttaacaagcaaaatttgcgtgtgtcagaatggtgtgtgccctgctatctggaaaccttgcaacagttgagaatagaatcagctgtagagctgtacatgttgaagaacgttgtgtttcaactgtggcttagcttttagcagagtttgttgagtaatatgtttcggacatggtattggtttcaatacattagtttctgatgttgttaaggtttcatgaatcctgacagtgacgtggtcactcaccctgtggcgggtgctctgtgcttggaggagcagcaggcagcagctaagtgtgaaaaactttgcgctgggtaatccaacttccagactacacgacatgttcaggtgctatgataactgtttttgcttgtcggatttcatgcctagctttgtcttgttttggagctcatgtacagacttgtgaaacaccaaattccgtaatgaatgtaatatattgctttttttcagactccgtatgtgatagtattgtcaatgacttctatcgggtaccataattagggatatctagattacatctctaaatgt

SEQ ID NO: 9188 - DNA, 2418 bp, Zea Mays
catccgtccgccattagccaaggttgcactgtgtacatgatttgtagctgatcattcattcatatagagctagctgagcaggcttgcttggttggcttggctgtccacaatttttgcttcggatagcatttctaccaggcgactgcaaagctccaagcacactcgatcttgctgtgataattctgagaggaagggcagagggagcaatggcgccggtcagtttgcctcctggtttcaggttccaccccactgacgaggaactcatcatctactaccttaagaggaagatcaacgggagacagattgagctcgaaatcattccggaggttgatctttacaagtgcgagccatgggatttgccagaaaaatcatttcttccaagcaaagaccttgaatggtacttcttcagcccccgggaccgcaagtacccgaatgggtcaaggacaaaccgtgcaacaaaatctgggtactggaaggcaaccggcaaggaccgaaaagtgaactcgcataggcgtgcagttggtatgaagaagaccctggtgtactatcggggccgagctccacatggttctcgcaccgattgggtcatgcacgagtaccgcctcgacgagagggaatgcgagactgacacgggcttacaggatgcatacgctttatgccgagtgttcaagaagacagcgcctgggccaaaaatcatagagcattatggcgcagtgcaccatcccatcgaacaccctcagtggatggcagaggcaggcagtgttgaccgccactccccaacgctggacttgtccagtgacgctagaggtgacgacttcgagagcagcagcttctcgttcccgacggaggcgcccagcatggactccatgcacgggatgcagatgagcgcaccccacgaggatggcaaatggatgcagttcctgagcgaagacgccttcaacgccaccaataaccctttcttcatgaacccaccttcttcttcaagcttcccatgcctcccgtccaaggtggatgtcgcactggagtgtgcaaggattcagcacaggctctcgttgcctcccctggaggtggaggacttcccacaggacgtcagcctcgacaccaaggcgagcgtgctccgcagcaaccccaacgaggtcgacatcctccaagagttcctctccgtggcgtcggcctcacaggagctcatcaatggcgccaccagcagctgctacgctgcagagttgtggccatcaggcgcgggcacaagcagcaccagcacccactacgtcaacgaactgtcttccctcgttgagctcggggtgaaggccaaagaggaggcagacaacttctactatatggactgcattgttggaacatctgtagggttctcatccaagtcgtcggtccaagtcgatgaacaggccgttaggttggttgagatcgctgacatcgaggggttgaagcaggaagagaagaggcaggtagagaaccttagaggtgtgcggcttcacaacaatgacctaggagagattgttgtacaaggagatgaaagcaatccaacggactgcatcacacaataccccatatcagattattctgctgacaatttaggagaagccggtcacctggccgatcccactgacgttggcggcggcctagccactgcacccatcttctcgcaatctcagcctgacgacttcgctattgggttcggtgacgtcgacgtcaaccctaatgcatctttcgacctgtacgagagggtcgacgtcaagcatgggctcttcgtctcaacggccggtgcgccgaagacattcttccaccacgttgagccatcgaagaagggacaaattcctggtggggaagacgcctccatcatgccgccggaggtccttaggcagcaaagaaatagcggcagccccacgacgatgaataccgagcaagagttggtcaagaaggcgaagaaggtgatgaagccggggcatggtggtggtgatggaaaccaagcatgtcttcttcttccactctccaagaggagcaaaggcatttccagcatgttcttctcggtgagaaatgggcataatttctgacatccgcgctcagggcgcaatcactggaaggtctttctgatcatgactcgtgcaaaaaagtaagggtcgtcttgtgctactaggcaactagtatcgggtgcctgcatgctgctggtgcatggagatgcatagtctttctcgtgcatcagtcagttaactggtgtgtataactggagaaatgtaataatccgtatttaattttttactcgtccgtacgtgtattaacacgtctgaagaaattgtacatggaaacattgtaagtgcaaatacacatgtgacatgttcatccatatacacggttacgttatatttggtgtaactggttagggactcgtgcgttacaatggta

SEQ ID NO: 9189 - DNA, 3092 bp, Zea Mays
ttttcgaacccgatggaatccctgcgaaaccccatgtttcggacgtggaaacgacccacgaatgcgtagtcgtggaactcctcccggcctcctgggtatggaagcgacggcggcgacgcgcgattcagagtagcgacgacggcgacgcatggtccctcccgccacccgccaccatcgtcgacagcgaccttttccccgattgtacctgcaccggttagagttggagaagaccaacccccgccgtcttgggacccggtaccatccccgagaggtacttcttgggacccggtacccccattttttttgcaatgagtatggggttaatggagcgcattaggaagagaagacaggaggatgatgatgatatgatgatgttcttccttcccgcattacatttgttgcgttctagttctcttaaagggaggagggttaagaagcgacgacacacatccaagctaagtggcgaggagcatgttttagagttgcttgaagggcatgtcaagaactgccgagtagcattcagaatggaacctgaaatttttagagccctagccagctatcttaggaaggaaaggttggtacgtgacacaaggataaaagttgaggagaagctcggcttctttctatacatgataagccataacgcttcatttgaagatctgcaagaagagttcgggcatagtagtgacacattccaccatcatataaaacatttttttgacatagttgtcccttccctcgccaaacgatttttgaagcctccttctccaatgcaagtacattcgaaaattgaaaggaatcctaggttctatccttacttcaagaactgcatcggtgcaattgatggcactcatgtgcccattacaatttcacctgacaaagctgctccttttagaaacaggaaggggactctcagccaaaacgtgatggtagcttgtgatttcgacctaaatatcactttcatgtctactggatgggagggatccgctacagatgctagagttcttcgatctgcaatgaacaatggattccatgtacctccaggaaagttctatttggttgatggtgggtatgctaacaccacgtcattccttgcaccttatcgtggagttagataccatctaaaggaatatgggcaaggtcaccgtagacctcagaactacaaggagttatttaaccatcgccatgccatactgaggaatcatgttgaaaggactttgggggttgtgaagaagcgctttcccatcctaaaagctgccacatttcacaaaataaggaatcaagtgaagataccagtagcagctgttgtacttcacaatattattcggtcactcaaaggggatgaggaatggttagataatcaaccagataatatttcgccacaaaactttgttgatctaccggatggcgatcaaggcaacgatcaagtaaatgtccaaggaaatagaccatatgttgctctgttctacattttatttactgtcacattgttacctctcttaatatttggtttaatccatttctcattgtttagtatcctgaaacataatatcatctaactgttttcataatagaaattttctttgttcctttagttccaatttcagaatagaaatttcagctaactgttttcagcatagaaatttggtttaatactgtgttatataatattagttaacatgtttggaaggggttctccaagaatcaacatgctcttatcaaaaagtgcaacaaagaagccttctcctaaagctggtgatccaaaaaagcatggaggttctccaaaagagaaattaagagccgcttggaactcaactctagagaaaactcttgtggacctcttgcatgagcacaaaacagctgattataggggtcaaaatggatggacaacagaagcatggaacaaaattgtcaaggaatttcatcagagggaacaatatgtctatttcacaaagacacaaatacaagataaggaaagagagctgaaaagggactacaggttgctaaaggatgcaaagaatcaaagtggagctcattttgatgagaagatagggaggattacggctgacccagctttatggaaaaatatactaacttctcatcctaaggctaaaaagttccgcaacaagtcttttcctctatatgaggccttgggggagctttatgatgggcaaacagctgaagggacctacaactacacctccacccaacttccagatcttactcaagtaggaaatggagatgaatttctcaacatagaacatgaacaagatgaattggaagaaatcttgcctgcacatgaagaagatgatgtcaatgtagttaaggcaggagatgcaaccggtgaaaggcatgatccgacgccacagagaaggactactgctgcaagagggaacaatgaggaaacgaggacaaagaggcataaaaagggcgataacctagaaggaataatgggaagatacattgacatgagaatgaagcaagctgaggaagaagccacacatctagcaaaagagagggaggaaaaggaagtgagtcaagctgcagacttctcaatcaagaagtgcatatccattcttggtacaatggaagttacaaaggaggaaaaagcaaaagcctacaatgccttcaaagaccttgacaataggcaaattttcttgagtgcctacgatgatgatgctgagtctgcactgatttggttgagaaacgagatggcttagctgaaattacaacaaggactgcagagaaatccagaatcgcttccttttgatgagatactctactgtaacattggaaatctccattccattggccaacagccagttacctatttcagaactagatcattggataactgcattttgttcatgctttaaactgctttaaactgaaatacgttacagctagaactagatcagctgtacatgcttctgcattgaactacattttgttgaacgtggactgcattttgcaaaaaacatgaactttactatactagagtgaagcgaacatggactacattttgcaaaaaaaatatggacttcactgtactagtgtctaagcgaacatggactgcattttttaaaaaaaac

SEQ ID NO: 9190 - DNA, 5046 bp, Zea Mays
cccaaatctcgcgtgctgcctccgtcctgcccccagcgcgtgcgctccgatccgccgggtttcagcgctgcggctgtcgatttacgcgatttgtctggcagaatacagttcagagcctcgagcgctgcagatcgaggacctggtcgtcggattcgggcgccgcgggtgagacctaggcgccggagtttttgtgacggagttttggcgtggttggtggagggggggaggaaggagcggtctcatatgcgcgtgacggtcacgcccaaggacgaggaaaggctggttgacttgatggcgcgcgagcagccgcggtcggcggtggttgcggcgggcggagatttggtcactgctgccgggggcgggggcgaggggtcggatagggactcttcggggtccatagaggagattacggctgacgacttcaagaaggactcgtcgtcggcgttgggcggcgcggcggcggcggcggggccgagatctaggtcttgggtggccccgcccgccgtgggttacatggcccggaactttcgctatgccttcaatagctttgcgtggtcgcaggccgtgcggaataagccgctggggctacaaccgcctgccccagacgacgacgaggtggagcacgccgtggacgtctccgacggagagaaggaagagggcgagattgaggagggggaggctgtggaggccttggcctcgcctgctcctgcgcagcctgagaccatcgatttggactccgacgccccggagaagtcagagtcggtggctatcgatggaagtgccagtgttgtgcctgtcccagctgctgaggaagaggaggtgaaccttgatcagcgtgtggggagtatactggaggagctcgagatggtctccattgaggaagctgagaagtatatgggcatatgcttcatgtttttccttgaacaaaggctttgtttcaggtcgttcgagggtgcatgcgcacgactgcatacctgcttcgagaacctgaagcctctgttccaggaactggagaacgggagcccgatggctatccttgaacccctcatgcagcaggcgtttattggaattgacacactcaccactgtggcgaatttgtataacttgccgaggagggagcagaataagacaacacttttgaagttgttgttccacataaaaaacagatattcggacatgctgacgcctgagcagcgagaagagatggacagccgcgtgaggaagttagtttttggagagaaagacaatgtcagtgacccaagtaccagttgtggcaccagtgcgataaatgtttcagctccatctgggcaggtttcaaacacaggaggactgccatttgaatcaggtgcagcaaatctatttagtagcttgccaaggttggaagtacctgccaaaaggaatagtcccttgttgaatcttcatgcagattatgatgagaacagcttaccctcgccaacccgggacaatgcaccgccttttcctgcgctaaagcctattggttttggagcatttccaatgaagtatgggcagaaatctgtatatccaagtgatgatctaccaagtccaactccatctggtgatgagggtaaacctgcagataaaggtggtgatatatttagtgatgtttccagcttccctgttccaaagagtattgtattaccaagtacaagtcagatgcctgcttctcaacctagcacagtcagcagcagcagtattagttatgcttcaagtacaagtcagatggctgcttctcaacctatcacagtcagcagtagcggtattagttatgcgtctggtccacctggttttgctaaacaaattgagcagtcgactgcaggtccgaatcatgcaataaaggcagcatccaaaagtagagatccgaggctcagatttttgaaccgtgattctgctggtgctacagatgtaaattggcgtgcaaatttttcagaactgaaggatgggaacttgggtggagtttcagttggtaaccgtaaacagaaagcagttgatgatcctcaggtggatgacaatgcgttaaaaagatttaggggcggaattgcgaatcagagagacatgcagcctacggggaaccccaatcagcttatgaacatcagggctcctacacatagtagcagtatcaatatgaaaactttgcaacctcctcaaactactgctccacatgtcagtgcggctcctgctgtcccattgcctcctatgttgttaaaggacattgctgtgaacccagcattgcttatgcatttgatccaaatggaacatcaaaagaagtcagcatcagaaagtcagggtggcatgtctagtgggatgaccaacaatggaattgcaggcatggttttcacacctggcaatgctccgaagatcacagaagctgcacaagtcccatctgttaggccacaggttccagtgcagacacctcctttgaactcacaaaatgatggtggaatcgttcgcatgaagccccgtgatccacggcgcatcctacacaataacatagcacagaaatctgatgcaatgagcttggagcaagtgaaaaataatggaactacacagccagactctcagggcaccaaggaccagactactccagtgccttctcaaccagccttgccgtctagcattgcaaggccattcagcagcgcaaaacatgttgatcctgtctctaattcacagttagctgctacagctattatggctccgacacaagctttgagtagcgtaaataaggtggatccaagactagcagttgaacagaatggacaaaatgctgatgcaacaacaaatggtgcttctgcaacaacacttgaagctacacagcctgttagtccatggggtgatgttgatcatctccttgatggatatgatgaccagcaaaaggctctgatacagaaggaaagggcaagacgaataacagaacaacacaaaatgttctcagcacggaagctatgcttggtgcttgatttggatcacacccttcttaattctgcaaagtttatagaagtggaaccaattcatgaagagatgttacggaagaaagaggagcaagacaggactttgcctgaacgtcatctctaccgttttcatcatatgaatatgtggacgaagctgaggccaggaatatggaactttcttcagaaggctagtaacctgtttgagttgcatttatacactatgggaaacaaactgtatgctactgagatggccaaggttcttgatcctactgggaccttgttcgctggacgagtcatatcaagaggtgatgatggtgatccttttgacagtgatgaacgagtgccaaaaagtaaagatctggatggggtactgggtatggaatctgcagttgtgatcatagatgattctgtaagagtctggcctcataacaggcacaatttgatagttgtagagagatacacctatttcccctgcagcaggcgtcaatttggccttcctggaccatcacttctagagattgacagagatgagaggcctgaggatggtacccttgcttcttcacttgcggtcattgagagaatccaccacaattttttttcacatcctaacctcaatgaggctgacgtgcggagcatactagcatctgagcagcgaaggatacttactggttgccgtattgtctttagccgggttttcccggttggagacgccagccctcacttgcatcctctgtggcagactgcagaacagtttggtgcagtctgcacaaacctggttgatgatcgggtcactcatattgttgcaaactcccctgggacagacaaggtgaattgggcattatccaaaggcaaattcgtagtgcatccaggatgggtagaagcttcagctctgttgtaccggcgcgccaacgaacatgactttgcagtcaaataacaccctccctgagcccgaattcatcatataggcttcggggaagaattcttctcagggatggaatgtgttcatggtaacctaacatgattaaaaaaaaaccataacaacatatctaaaatgggaccatggtaagaaggaaaaccaccacccaaagaatttcaggccttaaaatgaatggtaacgaagaaaacgctttatgatagcctggaagaggagactgggtctgttgtggatgtcattacctaggtggtgggtggtcaagattcctttttagaaagccagcaaagatgcgcgaaaaaagtgatgatgagcagatgctcaccgcctcatcctttgtaacatgtagtagtaaaagtggtgcagttttggtaagggtcctaggttcagaaatgttgcttctggccaagggaacttgggggattttgccgttttggtagctgccgctggtcgcctgtcgaaagtgtggcctcagctgaacggcgtcatgaatcattggtgcagcgcatttaataggatgggtttgctatgtcagtgtttgtgttaggagtagcttgagtataaagctggttcaaaggcacgggacacctggtgctttgcctgctgctgctcgaaacgtactcgtcccccttccgaaactttaaggcagaaaaacgttttgttcagttgggtcaggtaaaggggttgagttgatggcatcagagtcagagaagaaccagctgattcaggttaacgggttgaagatttcatgccgtcagtgaacgcgttggttgctatatggaaggttggtattccaaaaaagaaacgcgtgacatgtcttctaactgaaaaggaaaaaaaccgttataatttaactgttttcgcgagaattggttcttttgggatgatgcggccggtttttttagtgtttgttttccgaacaagcttttgtttgcggccttactgacaaggatgttttggccattttggttgtttcaactttcgatgggatttggagaatgatgatccgtggtcaaactttccttgcagcttgcaacttccaagttaatacgtcaaaaataccatgtatcttatgaacgacataaagacgtttttcttgttgagtacaataaaaatgctattttcagaaaaaaaatcattgactctagg

SEQ ID NO: 9191 - DNA, 546 bp, Zea Mays
aagatctacattgccgaatgatcatgacattggtgtagggtttagtgtacttaccatataggggagccgatgatcctcttggccataatcgtggcgccatctttcttcgccactcccaccaagcgaggaagtagtatgcttcctggggttggggcttcttcaacggatctccgcctcctctgatcgccgctatgtgtaccggccaccgtcgccagcgatgaagtcgaggagatgggcaacagaggaggaaatctttaatccgcaactgggacgcacccaggacctgcactggatgcgcgatttcgggggcggctgcaactggcgcagcgcttcacttcgttgctgcgaatctcaagcagcgactgcggcgggaggtcgcggccgtgggcgacgtgtggcggcgcctggcggctggtcagagtttggtgctttaaactcgcgcggcgtcagtaatcctccaatgccaagcatgacgatgttgggggcacgatgtgggcacaagaaaaccaggtgagagagcatgccaaattgaaaccaaaaaaaaat

SEQ ID NO: 9192 - DNA, 3901 bp, Zea Mays
  misc_feature (3900)..(3901): n is a, c, g, or t
aagcaagctgcgggcgccgcccagatgggaatcgggttccgacttccgacacgcacacgcccccacatcgcgccgcgatggctgcttcgccctcgccgtcgaccgcgaccgcgaccgcttctccctcagcgtcagcggcggcggtcttggctgtaaacggggagcgggttgagctccgcgagggggacgtgaaccccggcaccacgctcctcgagttcctccgcacccgcacccgcttcaccgggcccaagctcggctgcggcgaaggcacgtcaccccgccctcctcctccctctccccgcgctcttccgtttcgcggatgcggcgcgtgcgtggtgctcctctccgcctacgacgcggcttcgggcgcggtgtcgcacgcggcggcgagctcctgcctcacgctggtgcacggccttcatcaccgcgccgtgaccaccaccgaggggctcgggggcggcggccgcctccacgccgtgcacgagcggctcgcggggttccacgcctcgcagtgcggcttctgcacgcccggggtgtgcatgtccctcgccgccgcgctcgcgggggccgaggccgaggccaaggccaaggcggggaggaggcccgccccacccgaggggttcgcgaggctcacggcggctgaggcggagtgggccgtggcgggaaatctctgccgttgcacggggtaccgcccgatcgccgacgcctgcaagagcttcgcggctgacgtggatttggaggacctgggcctcaactccttctggaggaagggggacgcccatgcttccaagctgccgcggtacgacgaggggagcatcggtgtgttcccggagttcctcaaggctgagatcagagcttcttctggggttgaccagtacacaccgccggcattgctgggaagtgccaccacttggcaccggcctcggagcgtggaggagtactataagctggtagattctgagttgtttgaccaaagtaaaacaaaggtggttgtggggaacacagcttcaggcgtttacagagaaacagaggtgtatgataggtacatcgacctcagatgcatcccggagctgaattcggttagtaaggaagccaatggtgttcaaattggagctgcagtaacgatttctcaggcaattgagattttaagagtagaagctggtggctgcaatgatgtaatcttctgtaagattgctgatcatatggaaaaggtggcgtctccatttgtccggaacactgcaagtttgggtggaaatttggtgatggcacagagggaccagtttgcctctgacatcgcaacgatccttcttgctgctgggtcatcgatatgcatccaggcatcatcaaaaaggttgactgtcatgatggaggacttccttcagatgccaccttgcgatcacaagacactgctattaagcatttgcattcctcgttggactcctattggtggcctattttctggtgataaaaccatggctgggacagaaagtaagacaggaacttctgtgctgtttgagacgtaccgagctgctccacgccctcttggcaatgcagttgcatatcttaattctgctttcttggctcaggtctcttcagatggaacttcaagcagattaatattgagagagatatgtctggcttttggtgcatatgggagccaacatgccatcagggctaggaatgttgagaaactgttagtgggtaaacctattactacatcggtgctacttgaagcatgtagacgtctcaaggaaacaattgttcctaaagaaggcacaaggcatgctgcttataggtcaagcttggcagttgcctttctgtttacttttctttacccagtaactgaaggaactttgaagactgtaaaggaagttcatcttaatggctatgcaacttttggcaccaatggaaatccaaattgtggacccgatgcacatgttgatgtttcacttaaaaaggtcattgatgtgaactccggttcatgtaccaatgaacgcattcttgaatattcaaatcagattattgaaatcaataaagactatttccccgttggcataccaaccaagaaggttggagcagaactccaagcctctgattgcagaaacacaaagatttgccaatatagctgcaaaaaaagctgttgttaactacagtactgagaacttagatgctccaattttatccatagaggaggctgttaaaaggtgcagttatttcgaaaccccgccgtttcttcttcccctgaaaattggtgatttctcaaaaggaatggcagaagcagatcagaaaatctattctgaggttaaactcaattctcagtactacttttacatggaaacacaagctgctctggcaatacccgatgaggataactgcatggtagtgtatagctcaagccaatgccctgagacagcacagaatgtcattgcaaagtgccttggtttaccttgtcacaacgttcgtgttattaccagaagagttggtggtggatttggaggaaaggctgttagatcattacctcatttaagttgcaccgtcctgtccgtatgtatcttgaccgcaagactgacatgatagtgactggaggtcggcatcccatgaaaatatgctattcagtgggattcaaaccagatgggaaaatcactgctttgcatataggtctgcagaacaaaccttgctacaaagtctgcgatgcgggggcctggagaagtacaaggttcttatgttgccgaagctataattgagcatgttgcttccacgctctccgctgatgctaatttggttagacgtaaaaatcttcacacggttgagagccttgctttgtttcacagtgagtgcactgaagatgccatgggttatacacttcactctatatgtgatcaagtgactgcatcagaaaactatcagcatcggcttgaaataatccagtctttcaacaaaaacaacaaatggaaaaagaggggcctctcttttgtgccaatagtacacaaagtattatctcgaccgacacctggaaaagtgtctattcttaatgatggatctgttgctgttgaagttggaggcattgagttaggccaggggctttggacaaaagtgaagcagatgacagcttttggtcttggacaactctgtcctaatcgaagtcaagagctgttggagagaataagagttattcaagcggatacattaagtaacgtacagggagggtggaccactgggagtaccacatcagaatctagttgtgaagcagttcgtctcgcatgcaatgtcttggtcaacaggctgaagccagtcaaggagcaatctcaagaaaagcaagacaatgtttcatgggatgaacttatttccaaggttattagtcaatttctttcttacaaactatcttttgaaatgactggtgtgatacgagggtgtcctcctgattgaattgtagggaattacgtgttgactctataggatctttagcttgtaacgctagccacaagagcgggaaaaactagggctataccattgggattggaggaccccatagggacgaggaggtatcagcgaatgttggttcgcatgccagccttttccccttctattgtacgcaatgtgaaagggtcgcaaccagaaggttgtttccccctcgatcagggcgtgaggtggagtcgggctcagtcctctgaccaagttcgacatgagataaacctaacattctccccctgttctcatacttactcgcttatgtttagaacttgttagactatgtgtgtgtgagtgtgtgtgggccggcaccactgttgggctgccagcccattagggttagggtttcctgtctctatatattgtaaccccatctattatcaatacaacacttaatcttccaacagaacttactctctccatcccataaann

SEQ ID NO: 9193 - DNA, 3974 bp, Zea Mays
  misc_feature (3973)..(3974): n is a, c, g, or t
ttccgacttccgacacgcacacgcccccacatcgcgccgcgatggctgcttcgccctcgccgtcgaccgcgaccgcgaccgcttctccctcagcgtcagcggcggcggtcttggctgtaaacggggagcgggttgagctccgcgagggggacgtgaaccccggcaccacgctcctcgagttcctccgcacccgcacccgcttcaccgggcccaagctcggctgcggcgaaggcacgtcaccccgccctcctcctccctctccccgcgctcttccgtttcgcggatgcggcgcgtgcgtggtgctcctctccgcctacgacgcggcttcgggcgcggtgtcgcacgcggcggcgagctcctgcctcacgctggtgcacggccttcatcaccgcgccgtgaccaccaccgaggggctcgggggcggcggccgcctccacgccgtgcacgagcggctcgcggggttccacgcctcgcagtgcggcttctgcacgcccggggtgtgcatgtccctcgccgccgcgctcgcgggggccgaggccgaggccaaggccaaggcggggaggaggcccgccccacccgaggggttcgcgaggctcacggcggctgaggcggagtgggccgtggcgggaaatctctgccgttgcacggggtaccgcccgatcgccgacgcctgcaagagcttcgcggctgacgtggatttggaggacctgggcctcaactccttctggaggaagggggacgcccatgcttccaagctgccgcggtacgacgaggggagcatcggtgtgttcccggagttcctcaaggctgagatcagagcttcttctggggttgaccagtacacaccgccggcattgctgggaagtgccaccacttggcaccggcctcggagcgtggaggagtactataagctggtagattctgagttgtttgaccaaagtaaaacaaaggtggttgtggggaacacagcttcaggcgtttacagagaaacagaggtgtatgataggtacatcgacctcagatgcatcccggagctgaattcggttagtaaggaagccaatggtgttcaaattggagctgcagtaacgatttctcaggcaattgagattttaagagtagaagctggtggctgcaatgatgtaatcttctgtaagattgctgatcatatggaaaaggtggcgtctccatttgtccggaacactgcaagtttgggtggaaatttggtgatggcacagagggaccagtttgcctctgacatcgcaacgatccttcttgctgctgggtcatcgatatgcatccaggcatcatcaaaaaggttgactgtcatgatggaggacttccttcagatgccaccttgcgatcacaagacactgctattaagcatttgcattcctcgttggactcctattggtggcctattttctggtgataaaaccatggctgggacagaaagtaagacaggaacttctgtgctgtttgagacgtaccgagctgctccacgccctcttggcaatgcagttgcatatcttaattctgctttcttggctcaggtctcttcagatggaacttcaagcagattaatattgagagagatatgtctggcttttggtgcatatgggagccaacatgccatcagggctaggaatgttgagaaactgttagtgggtaaacctattactacatcggtgctacttgaagcatgtagacgtctcaaggaaacaattgttcctaaagaaggcacaaggcatgctgcttataggtcaagcttggcagttgcctttctgtttacttttctttacccagtaactgaaggaactttgaagactgtaaaggaagttcatcttaatggctatgcaacttttggcaccaatggaaatccaaattgtggacccgatgcacatgttgatgtttcacttaaaaaggtcattgatgtgaactccggttcatgtaccaatgaacgcattcttgaatattcaaatcagattattgaaatcaataaagactatttccccgttggcataccaaccaagaaggttggagcagaactccaagcctctggtgaggctgtatttgtggatgacatccccgctcccaaggattgtgtttatggagcatttatatatagcacaaaacctttagcccatgtgaagagcatagaactcgacctttcactcaagcagcttaaaacgctgggagtagttactgttaaggatattccagaatgtggcagcaatgttggggccaacactatatttggacctgaacctctgtttggtgatccagttactcagtgtgcaggggaacctcttggtgttgtgattgcagaaacacaaagatttgccaatatagctgcaaaaaaagctgttgttaactacagtactgagaacttagatgctccaattttatccatagaggaggctgttaaaaggtgcagttatttcgaaaccccgccgtttcttcttcccctgaaaattggtgatttctcaaaaggaatggcagaagcagatcagaaaatctattctgaggttaaactcaattctcagtactacttttacatggaaacacaagctgctctggcaatacccgatgaggataactgcatggtagtgtatagctcaagccaatgccctgagacagcacagaatgtcattgcaaagtgccttggtttaccttgtcacaacgttcgtgttattaccagaagagttggtggtggatttggaggaaaggctgttagatcattacctgtggcaactgcttgtgcacttgcagcatttaagttgcaccgtcctgtccgtatgtatcttgaccgcaagactgacatgatagtgactggaggtcggcatcccatgaaaatatgctattcagtgggattcaaaccagatgggaaaatcactgctttgcatatagcaaaggtctgcagaacaaaccttgctacaaagtctgcgatgcgggggcctggagaagtacaaggttcttatgttgccgaagctataattgagcatgttgcttccacgctctccgctgatgctaatttggttagacgtaaaaatcttcacacggttgagagccttgctttgtttcacagtgagtgcactgaagatgccatgggttatacacttcactctatatgtgatcaagtgactgcatcagaaaactatcagcatcggcttgaaataatccagtctttcaacaaaaacaacaaatggaaaaagaggggcctctcttttgtgccaatagtacacaaagtattatctcgaccgacacctggaaaagtgtctattcttaatgatggatctgttgctgttgaagttggaggcattgagttaggccaggggctttggacaaaagtgaagcagatgacagcttttggtcttggacaactctgtcctaatcgaagtcaagagctgttggagagaataagagttattcaagcggatacattaagtaacgtacagggagggtggaccactgggagtaccacatcagaatctagttgtgaagcagttcgtctcgcatgcaatgtcttggtcaacaggctgaagccagtcaaggagcaatctcaagaaaagcaagacaatgtttcatgggatgaacttatttccaagggacgaggaggtatcagcgaatgttggttcgcatgccagccttttccccttctattgtacgcaatgtgaaagggtcgcaaccagaaggttgtttccccctcgatcagggcgtgaggtggagtcgggctcagtcctctgaccaagttcgacatgagataaacctaacattctccccctgttctcatacttactcgcttatgtttagaacttgttagactatgtgtgtgtgagtgtgtgtgggccggcaccactgttgggctgccagcccattagggttagggtttcctgtctctatatattgtaaccccatctattatcaatacaacacttaatcttccaacagaacttactctctccatcccataaann

SEQ ID NO: 9194 - DNA, 4175 bp, Zea Mays
  misc_feature (4174)..(4175): n is a, c, g, or t
cgcgggccccgcatgtcagcggcagcggcgagccgtcgcctcacgccgcgtcaccctcgtggcgctcggcgagcgcgcgacacgccggcacgccgccctcccgtgatgcccgttctctctccgttttggaatttctcggcgacagcgaccctgcttgcgatttgcgaagctgcgagagtggcggtgctagtagtctagtagagtactcccagtagataagcaagctgcgggcgccgcccagatgggaatcgggttccgacttccgacacgcacacgcccccacatcgcgccgcgatggctgcttcgccctcgccgtcgaccgcgaccgcgaccgcttctccctcagcgtcagcggcggcggtcttggctgtaaacggggagcgggttgagctccgcgagggggacgtgaaccccggcaccacgctcctcgagttcctccgcacccgcacccgcttcaccgggcccaagctcggctgcggcgaaggcggatgcggcgcgtgcgtggtgctcctctccgcctacgacgcggcttcgggcgcggtgtcgcacgcggcggcgagctcctgcctcacgctggtgcacggccttcatcaccgcgccgtgaccaccaccgaggggctcgggggcggcggccgcctccacgccgtgcacgagcggctcgcggggttccacgcctcgcagtgcggcttctgcacgcccggggtgtgcatgtccctcgccgccgcgctcgcgggggccgaggccgaggccaaggccaaggcggggaggaggcccgccccacccgaggggttcgcgaggctcacggcggctgaggcggagtgggccgtggcgggaaatctctgccgttgcacggggtaccgcccgatcgccgacgcctgcaagagcttcgcggctgacgtggatttggaggacctgggcctcaactccttctggaggaagggggacgcccatgcttccaagctgccgcggtacgacgaggggagcatcggtgtgttcccggagttcctcaaggctgagatcagagcttcttctggggttgaccagtacacaccgccggcattgctgggaagtgccaccacttggcaccggcctcggagcgtggaggagtactataagctggtagattctgagttgtttgaccaaagtaaaacaaaggtggttgtggggaacacagcttcaggcgtttacagagaaacagaggtgtatgataggtacatcgacctcagatgcatcccggagctgaattcggttagtaaggaagccaatggtgttcaaattggagctgcagtaacgatttctcaggcaattgagattttaagagtagaagctggtggctgcaatgatgtaatcttctgtaagattgctgatcatatggaaaaggtggcgtctccatttgtccggaacactgcaagtttgggtggaaatttggtgatggcacagagggaccagtttgcctctgacatcgcaacgatccttcttgctgctgggtcatcgatatgcatccaggcatcatcaaaaaggttgactgtcatgatggaggacttccttcagatgccaccttgcgatcacaagacactgctattaagcatttgcattcctcgttggactcctattggtggcctattttctggtgataaaaccatggctgggacagaaagtctcttcagatggaacttcaagcagattaatattgagagagatatgtctggcttttggtgcatatgggagccaacatgccatcagggctaggaatgttgagaaactgttagtgggtaaacctattactacatcggtgctacttgaagcatgtagacgtctcaaggaaacaattgttcctaaagaaggcacaaggcatgctgcttataggtcaagcttggcagttgcctttctgtttacttttctttacccagtaactgaaggaactttgaagactgtaaaggaagttcatcttaatggctatgcaacttttggcaccaatggaaatccaaattgtggacccgatgcacatgttgatgtttcacttaaaaaggtcattgatgtgaactccggttcatgtaccaatgaacgcattcttgaatattcaaatcagattattgaaatcaataaagactatttccccgttggcataccaaccaagaaggttggagcagaactccaagcctctggtgaggctgtatttgtggatgacatccccgctcccaaggattgtgtttatggagcatttatatatagcacaaaacctttagcccatgtgaagagcatagaactcgacctttcactcaagcagcttaaaacgctgggagtagttactgttaaggatattccagaatgtggcagcaatgttggggccaacactatatttggacctgaacctctgtttggtgatccagttactcagtgtgcaggggaacctcttggtgttgtgattgcagaaacacaaagatttgccaatatagctgcaaaaaaagctgttgttaactacagtactgagaacttagatgctccaattttatccatagaggaggctgttaaaaggtgcagttatttcgaaaccccgccgtttcttcttcccctgaaaattggtgatttctcaaaaggaatggcagaagcagatcagaaaatctattctgaggttaaactcaattctcagtactacttttacatggaaacacaagctgctctggcaatacccgatgaggataactgcatggtagtgtatagctcaagccaatgccctgagacagcacagaatgtcattgcaaagtgccttggtttaccttgtcacaacgttcgtgttattaccagaagagttggtggtggatttggaggaaaggctgttagatcattacctgtggcaactgcttgtgcacttgcagcatttaagttgcaccgtcctgtccgtatgtatcttgaccgcaagactgacatgatagtgactggaggtcggcatcccatgaaaatatgctattcagtgggattcaaaccagatgggaaaatcactgctttgcatataggtctgcagaacaaaccttgctacaaagtctgcgatgcgggggcctggagaagtacaaggttcttatgttgccgaagctataattgagcatgttgcttccacgctctccgctgatgctaatttggttagacgtaaaaatcttcacacggttgagagccttgctttgtttcacagtgagtgcactgaagatgccatgggttatacacttcactctatatgtgatcaagtgactgcatcagaaaactatcagcatcggcttgaaataatccagtctttcaacaaaaacaacaaatggaaaaagaggggcctctcttttgtgccaatagtacacaaagtattatctcgaccgacacctggaaaagtgtctattcttaatgatggatctgttgctgttgaagttggaggcattgagttaggccaggggctttggacaaaagtgaagcagatgacagcttttggtcttggacaactctgtcctaatcgaagtcaagagctgttggagagaataagagttattcaagcggatacattaagtaacgtacagggagggtggaccactgggagtaccacatcagaatctagttgtgaagcagttcgtctcgcatgcaatgtcttggtcaacaggctgaagccagtcaaggagcaatctcaagaaaagcaagacaatgtttcatgggatgaacttatttccaagggaattacgtgttgactctataggatctttagcttgtaacgctagccacaagagcgggaaaaactagggctataccattgggattggaggaccccatagggacgaggaggtatcagcgaatgttggttcgcatgccagccttttccccttctattgtacgcaatgtgaaagggtcgcaaccagaaggttgtttccccctcgatcagggcgtgaggtggagtcgggctcagtcctctgaccaagttcgacatgagataaacctaacattctccccctgttctcatacttactcgcttatgtttagaacttgttagactatgtgtgtgtgagtgtgtgtgggccggcaccactgttgggctgccagcccattagggttagggtttcctgtctctatatattgtaaccccatctattatcaatacaacacttaatcttccaacagaacttactctctccatcccataaann

SEQ ID NO: 9195 - DNA, 2494 bp, Zea Mays
tgcaacttacaagagcaagacaagtctacggacgaagtctgttttgggctatgacgatcagcatgagagggaccgacagttttcatgcttttgaaaagtaagtcagaacaggaacgtcgtttgctcacagctcttgttaacaaacttggtgatcctgaaaggagagcagcatcaagtgctgcatatctgttaacatgtctcttggctgctcaccctaatatgaagatggtggtgatagatgaggtggattcttttctcttcagaccacatgttggacttagggccaagtaccaggctgtcaatttcttgagccagattcttcttacaaacaagggagatgggcctaaaattgcaaaacggttggtggatgtctacattgcacttttcaaggtactaatgagctctggtgataccaaaggagatacatatagcaaggacagcaagaaaaaggtaggaaaaatagagggaggaaataacaagatggactccagatccaagggaaacaatgaagtgggttcaacagcaggatcagatttggagctggactccagaatcctttctgcgcttttaactggtgtaaatagggcattaccatatgttgcaagctcagaagttgacgatattgtggaagtgcagacacctattcttttcagattggttcacgctgaaaatttcaatgttggtgttcaggcattgatgcttttgttccaaatatctataaagaataatatagcaagtgatcgtttgtaccgtgcattatactcaaaactcttgagtccttctgctgttacttcctcaaagccagagttatttcttgggctgttggtgaaagcgatgaagaatgatgtaatgttgaagagagttgctgctttctcaaagcggctgctgcaggtggctcttcaacggcctcctcaatatgcttgcggatgccttttcattctgtcagaagtccttaaggcaaagccaccattatgggggattgtgctccagaatgaatctgttgatgatggtgatgaacactttgaagacattttagagattcccgaggactcttctgttgcctcagcagtgctacataaacataatgaaaaagtagctgcacatgagaaacacaaccttgatgctgctgatggaattgatagtgtaaaacaagtaaatttggtagatgagaacaatgcatcaactgactcgtccagacaacatgcattctatgatccacgacacagagagccttcttactgcaatgcagatcgtgtcagttggtgggagttaacagtattggcttcacatgtgcacccttcagtttctactatggctagaacattgctatctggcaacaatattgtttacagtggtgatccgctgacagacctatcacttcctgctttccttgacaaattcatggaaaagaaaccaaaagggaaccgcatagctgaaggaagatggcatggtggatcacaaattgctccggctaaaaagcttaatctgaatcatcatctcatcggagaggagcttctagaattggcagaaaatgaagtgcctcctgaagatattgttttccaccgtttctatttgaacaagaccggcactgttaagcgtaagacaaagcagaaggactcagttcttgatgaagatgcgggggaactcttagctgataatgacgctgatgaggctagtgacgagagtggagatgagatactggatctgggagatgggttggcagatgatggagaatatgactatgacgaccttgactcaaatgcatttgaagaggaaaaagatttacttagagatgacagtgatgtggaatttgatgacgtttcagatgatactgcatctggggatgaagggtcagaaaatgacgatgacattcctattctcgcgggcgattcagatggcaacttaagtgatgacgagatggttgatgctggtaagggcggtgtctcttacacaaagaaaaggagggcagggaagaagagtgggttgtctccatttgcaagcctggatgattatgagcacctaatggttggggatgctgatgcaacaacagcaaagcggaagcacatggcaacagggagagctggtggtgagaagaaaccaaagttgagaccacgaaagaaaaggtcgcggagttcagaatgagaaacatgccttttacccttaactcttttaaaatgttcaccacaatggtgttcattacatttttgtacttctggaaggcacaggattgggtaacgctattgttgagccgagaatgtattgagattagattatacaggtgctctcatatagtagtccttatcccacacaacgcatttatacgggctaagtttaagaccaactcaaagagttgtttttcttattgagtcaaattttagattttctgagtaagaaattattctccaacaggtattctatctagagttgtagattagctagcaaaggcatatcgtcctttccacttgctaagccagtcctaattttcctgtctcag

SEQ ID NO: 9196 - DNA, 2675 bp, Zea Mays
aacccttgctgttcgctcgctgttcgccccccagccgccaccgccagttcttccattcctccgcgctctttgagccttcgtctcccagtctcctcaactcagcaacccgcgctcccgccgcatctattcatggcggagccgacccccaagtcgaagcgcaccaagaaagcgaagaagccctcggcccgggaaggtgatggagaggacatggatacgctcaagtctgacgtcgccacattcgcctcctccctcggcctcctccctggcgctggcgactccaacggcggcttcgatgactccgacttccgcaagtccggccccatgtataaatcctcaaaatttccttccaaacaaccccatcaaaaacctgataacacggcaaacccccatctaaaccctagacctaccaagaagccacaccctctcgagctacgtgactcctatgctgccaccaaacctggtgctgtcaacactaattaccccctgatgaaggcggcagcactctcagggcagtggtacactgatgctgatgagctggaggcgagggtcctaggcggtcgtaagcaggtgcctccagctgtggggcttcaggagatgcagggaatagtggagagaaaacgagagctggcagagaagctcatgttgcagtatgcgagggaatacgatgccgtgaggcgagggcatggtgacctgaagctcctggacatatcagcaaagtctggtacatcagctgacaaggtgtcagcatttacatgtcttgtcgaggacaatccaattgcaaacatgaaggcactcgattccctccttggtatgataacatcaaaagttggtaagaggtatgcgttcacaggattcgatgcaattaaggagttatttctcatgaggttattgcctgaccgtaagctgaaaagtcttatccaacgcccgctagacattttacctgaaacaaaagatgggtactcacttctgctcttctggcattgggaggactgcttaaaacagagatacgaaaggtttgttatggcattggaggatgcggtaaaagatatgctgccaaatcttaaggacaaagcaatgaaggtggctcttcaacggcctcctcaatatgcttgcggatgccttttcattctgtcagaagtccttaaggcaaagccaccattatgggggattgtgctccagaatgaatctgttgatgatggtgatgaacactttgaagacattttagagattcccgaggactcttctgttgcctcagcagtgctacataaacataatgaaaaagtagctgcacatgagaaacacaaccttgatgctgctgatggaattgatagtgtaaaacaagtaaatttggtagatgagaacaatgcatcaactgactcgtccagacaacatgcattctatgatccacgacacagagagccttcttactgatcgtgtcagttggtgggagttaacagtattggcttcacatgtgcacccttcagtttctactatggctagaacattgctatctggcaacaatattgtttacagtggtgatccgctgacagacctatcacttcctgctttccttgacaaattcatggaaaagaaaccaaaagggaaccgcatagctgaaggaagatggcatggtggatcacaaattgctccggctaaaaagcttaatctgaatcatcatctcatcggagaggagcttctagaattggcagaaaatgaagtgcctcctgaagatattgttttccaccgtttctatttgaacaagaccggcactgttaagcgtaagacaaagcagaaggactcagttcttgatgaagatgcgggggaactcttagctgataatgacgctgatgaggctagtgacgagagtggagatgagatactggatctgggagatgggttggcagatgatggagaatatgactatgacgaccttgactcaaatgcatttgaagaggaaaaagatttacttagagatgacagtgatgtggaatttgatgacgtttcagatgatactgcatctggggatgaagggtcagaaaatgacgatgacattcctattctcgcgggcgattcagatggcaacttaagtgatgacgagatggttgatgctggtaagggcggtgtctcttacacaaagaaaaggagggcagggaagaagagtgggttgtctccatttgcaagcctggatgattatgagcacctaatggttggggatgctgatgcaacaacagcaaagcggaagcacatggcaacagggagagctggtggtgagaagaaaccaaagttgagaccacgaaagaaaaggtcgcggagttcagaatgagaaacatgccttttacccttaactcttttaaaatgttcaccacaatggtgttcattacatttttgtacttctggaaggcacaggattgggtaacgctattgttgagccgagaatgtattgagattagattatacaggtgctctcatatagtagtccttatcccacacaacgcatttatacgggctaagtttaagaccaactcaaagagttgtttttcttattgagtcaaattttagattttctgagtaagaaattattctccaacaggtattctatctagagttgtagattagctagcaaaggcatatcgtcctttccacttgctaagccagtcctaattttcctgtctcag

SEQ ID NO: 9197 - DNA, 1270 bp, Zea Mays
cgtggatctaaggaagaagacgcggatccaagggttgactgctgaggaagaagacgctactcctcgtcttcgatctgcagagctgatggctacatcagagccagtacaagagagtttggtggtgcactactcacaacctagtaggccccgggtcctccttgctgcttcaggaagtgtagccgctataaaatttgaaagcctttgccgtagcttctctgagtgggcggatgtccgagctgtggccaccacgtcatccttgcacttcgttgatagatcatctctaccaagtggcatcgttctttacactgatgacgatgaatggtctacctggaagaagataggagatgaagtcttacacatcgagctgcggaaatgggcagacgttatggtgattgctccattgtcagcaaataccctggctaagatcgccggtgggttatgcgacaacctcttgacctgcatcgtgagagcgtgggactacagcaaaccgctctttgttgccccagccatgaacacgttaatgtggaacaacccattcacggagcggcatcttcacacaatcaaccaactgggcatagccttgatccccccagttaccaaaaggctggcctgtggcgattacgggaacggcgcaatggccgaaacctcgcagatccatacttccgtgaggctcgcgtgcaagacgcaaccgcacgatgcgagcagttcactcgcgggtcctgtcagtaataaccggccatctagctgatgcagcggttggccacttgattgtcaagcttaggaatttgttttatctgcagtgtgcatctggagtgttgtaccagattttttttcaactagagtttgtgtgtattgaattagggggaaaggttgttgtcacatgataacaataacttccaatgatgactctattcagtttgtaattgtctgtgggagtacaattatgcagctgtattgtctgctacaatattgtttgtttgtgtgtgtgggagtggggggtgctgttgccacagagatagattcctccctgcccagtaatggtagtgattattcagtttgtagttgttagtggaagtgtccagcaaacttttctacccttcgatattcctggtacaaatgttgaaacgactgtcccgaccatttgagtgatttgctttccacctgccattgatgtgcgcatgtcgcttcttcattctcggattcttgcctatctgtttttactggtgtagctgtccgaaatctggatgttgtcgatgcatatctttacgac

SEQ ID NO: 9198 - DNA, 1339 bp, Zea Mays
cagccaccaccgccttcacccatcgcctccgccattgacacctgcctcacccaccgcctcggaagaagaagacgtggatctaaggaagaagacgcggatccaagggttgactgctgaggaagaagacgctactcctcgtcttcgatctgagctgatggctacatcagagccagtacaagagagtttggtggtgcactactcacaacctagtaggccccgggtcctccttgctgcttcaggaagtgtagccgctataaaatttgaaagcctttgccgtagcttctctgagtgggcggatgtccgagctgtggccaccacgtcatccttgcacttcgttgatagatcatctctaccaagtggcatcgttctttacactgatgacgatgaatggtctacctggaagaagataggagatgaagtcttacacatcgagctgcggaaatgggcagacgttatggtgattgctccattgtcagcaaataccctggctaagatcgccggtgggttatgcgacaacctcttgacctgcatcgtgagagcgtgggactacagcaaaccgctctttgttgccccagccatgaacacgttaatgtggaacaacccattcacggagcggcatcttcacacaatcaaccaactgggcatagccttgatccccccagttaccaaaaggctggcctgtggcgattacgggaacggcgcaatggccgaaacctcgcagatccatacttccgtgaggctcgcgtgcaagacgcaaccgcacgatgcgagcagttcactcgcgggtcctgtcagtaataaccggccatctagctgatgcagcggttggccacttgattgtcaagcttaggaatttgttttatctgcagtgtgcatctggagtgttgtaccagattttttttcaactagagtttgtgtgtattgaattagggggaaaggttgttgtcacatgataacaataacttccaatgatgactctattcagtttgtaattgtctgtgggagtacaattatgcagctgtattgtctgctacaatattgtttgtttgtgtgtgtgggagtggggggtgctgttgccacagagatagattcctccctgcccagtaatggtagtgattattcagtttgtagttgttagtggaagtgtccagcaaacttttctacccttcgatattcctggtacaaatgttgaaacgactgtcccgaccatttgagtgatttgctttccacctgccattgatgtgcgcatgtcgcttcttcattctcggattcttgcctatctgtttttactggtgtagctgtccgaaatctggatgttgtcgatgcatatctttacgac

SEQ ID NO: 9199 - DNA, 1249 bp, Zea Mays
cgagagttctatacgacaaacgagcgtgtggtggggaaaatgaatagagagtgagatagagagggtcggaggggtgggcagtgcgtcacgggatgggcgcaggggcgaggctacgcacgatggcacgagcgagggtgatgttgagcgtgatggcaggagcgagttgcgcgcgagagcgaattggcggagcaggcgaggacgcaagggcgaggacgcgcctacgacctacgcaagagcgagctgtggacagtgctcgtgggctgtccagcgggcggtgcgcgggtgttgtgcagcgagcggtgcacagtggttgtgcgacgacgatagcgaagtctggttggggcactcgagcactcgcggtgccttatttctatttgattttgcgcagtttatatgctccagaaccaggaggctcatgctgcagagggtcccactgaaataacaaatggatactcagatctgcaactttcctatgcggccttcactcgataatgtgatcatttcatgccaatgcaatgcagcaggcagtggcgctgagaggctccgggatctaccaccgccccgggatctaccaccgccctgagcagtcatcacattcttgtcaagatctggcttggcctttctctttgcttctgcaattacgccatccttgggaacaacagacaaaagcgttgggtttattaccttcgagcaatcatggaggacttgaaaggtaacataagctaagaatggttggacttgagacattcaagaaatgcaaggaggaacaacatactgcgtagaaaaattagtccagaattcctttctcaagtcgtctggatgcaacactaagaaacaagtgcaagctgccactaagtgcaaaagccattctggagctcacagccataaaaatgaataaccagtatgtatggcagcagccttgatgagcaactcaaaaggcgagatgattggtggaggcaacaagtatcgtcagtataattcaacgagattgaagcacacagcattatccacagcaccgccattgtttgtttgaatgaaatagctagcaaaatcgtatagaccaacatcacaaatgtgaacgacggggatcaatttttccttctctactattcattacaatagatgagctctttcttatctccaagaacatttttttgtaacacaatggcaggagctctggagcccagcatccgcgactttgtggggtagctcggtgccgccgccgctggggagcctactgctcccgagt

SEQ ID NO: 9200 - DNA, 1993 bp, Zea Mays
gcccgatcgcgctgcgcgcacaagtggactgactactgagcaagcaaccaagttccaaccatacatcgcgcgcgcgcgcggccgaatgcagtcgacggcggccatgcggagcggcggcggcggcaataagcgcagcctgctgctgctgctgtcggcgtggtggctactcctcggcagcctcgtcgcccagctcccggcggcccgcggcggcagcggccacgtcgtcacgcgcatgcccgggttcgacgggcccctcccgttccacctcgagacagggtacgtggaggtggacgagcagctcggcgtgcagctcttctactacttcgtgcggtcggagaaggacgaccccggcgaggacccgctgctgctgtggctgtccggcggccctggctgctccggcctctccggcctcgcctacgagatagggcccttccattttgatgctcgagggtacaggggcgggtttcctacccttctctaccgacccgagacgtggaccaaggtgagcaacatcatatttatggattctccggtggggactgggttctcgtacgccacgtcggatgaggggctcaagtccagtgacactcaggctgtcaggcagctagccatttttctcagaaagtggcttgaagagcatcccgagttcctgccgaacccgctctacatcggtggagattcatacggcggcatgattgttcctgctcttgcactacaaatacacacaagtacagaactcggtgaaaacccatccttcaacctcaagggctacgttactggcaacccggtgacggatagccagttcgacacggacggcgtggttccgttccttcacggcatgggactgataccatacgagttttatgagaacgctcgcgagatgtgtggtggaaagtacagtgatgcagccagtgttgcgtgcgcggaggtcacccgagctatagccaacatcacgtcggctgtcaaccgggaacacgtcctggagcctgcttgcccggacgacgacgacgacgagctgttcggccccaaaactaccatggcggagacagatggcggcacgagtcgtaggctgatgctgcagtcggcagactatttcctgccagctgggttcaaatgtagaagagcttcgtacgtcctatcccgcgtctgggcaaacgacgaaacggttcaggagagcctcggtgtccgcaaggggacaatcggagcgtggaaacgatgcaaccaggacatactttacaaccagaacgtccaaagtgtagtgccgtaccattcgaggctagccgcgaaagggtacagggcgctgatatacagcggcgatcacgatcgtatcgtacccttcgttggcacacaagcatggattaggtatctcaacttgaccgttgtagatgactggcgaccatggtatgttggtggccaagttgccggattcacaaggaactcaggcaacctaatatatgcaactgtgaagggcgctgggcatactgcaccggagtacaagcccacggagtgccaaacgatgtttaggaaatgggtttcacgggatcctctctgatattacgtcgtctgagagaattacgtacgtgtcgctcctatgagtgtaggccggacgtacgtggtatgccctactgcaggccggagatcaaaataaaggagattttccattttcatgtagaaaaaatgagtgtccatggtgtctacttgttccctgtattaaaaataaatgcaatttttatactgcatgtagccactctgtcggagaagaaatctccccggccaggtggcggattgcacccgccctagatcctaaaaagaggaggggtctaaacgttttgtttgttacgagactggtggatcagcacacgggagcatgcaagggtttagagtggttcgagccgccggagcgtaataccctactccactgtgtgatgtattgctttgggagcttgtatgaacttgtgagtgtgtgcctaagattgtctgtcttataacgccg

SEQ ID NO: 9201 - DNA, 3231 bp, Zea Mays
ctgacacctgccacgattcacactcacacacaggtccactgcaggctgcagtgctgcacaccgccgcctggaacgaagcccctcttcggaatccacctacacgccccgtcggcggtccctcgcccgcatcgctagttcggcacacggagtttataaacccctctgcagtctgcacgaataatccccaacccggctctcggctcctctagtccttttctcgcattgcatttactgcggcatctttgcgtcggattcggttcccctcgattcctctcccgttgattgcctcgccgggtccggggtcaccggccggcgggggttgattgggtcggcggttatggggaaaggggcgaggaggcgcagccgtgcgtctggcgccggcgggggtggacacgggagcaagcgcccgcggcgggccgaggaggaggaacaggaggaagaggaaatggaaccgctggtgggggaggaggaggaggtggcggcgctggagggggaggactattgcttcgtctgcaaggacggcggtgacctccgcgtctgcgatttcaggggctgccagaaagcttaccatcctgcttgcgtggggaaagatagcggcttcctcaattcagatgaagaattcatctgtgaatggcatacttgctttatttgtaaagggcgttcacgttattattgcttttgctgtccgtggcaagccttttgtcaaaattgcgtgaaacaagcagaattcgtcccagtcttgaggaagacaaagggattctgcaccaactgtttaaggatggcaatcatgattgagaagaatgttgatgttgactccgatggggagagggttgatttcaatgacagggcaacttatgaatttttattcaaggagtattgggaggagatagttaaaggcaaggagagcatgactctggataagcttgaaaaagcatatgcttttctgaaagaaaaactaaactgcaaacaagatctagatttagaaaaggttcatgatgaagaacacagttcagatgatgattttgtgggcaatagtgatgacgacgatgacaacaagccatcttccacaaccaaatttaatggaacatcgaatacaatgaaattcttcctgagggaagataggccaatgaagaatggctatgtgggctggggttcaaaagagctcatggagttcctttcctctataggcaaagatacattgaattccctagatcaacatggtgctactgaagttgtgaaggtgtacattcaacaaaaaggtctcttagcaagagataagaaaaaacttgtcatatgtgatgacaagctcaagattttgtttaggagatcaaaagtgaggtacaacaggatatatagcttgttaggtaagcatattgctgtgaatatgacatcagaggatgaaacttttgctaactctgatgataacaatgaaacatttgtgagaaagaaagctcgtattgggaactacagttccagtactccaaagtgtactccagaaataaacaagagatgttttgctgctcttgttcgccataacattgatttaatctacttgaagaaatctttggttgtggatctactaagggagccggatacatttggcagcaaagttattggctgttttgtgagaataaagattgatctcaacgattatagtttctacatgcataaaaaggtgcaccaacatagaaagttgtatcagcttggactagtaacaggcaccagtaaatcccctgaagaatacaagataaatgatgtatcaacagatattcttttatgtatttccagcatacctgacatcaaaatttcaagtttgtcagatgaagaatacgaagaggaagaatgtcaagaccttcggctgctggccaagaatgaatcctttaaaaggcctactgttggggatctagaggagaaagcaagaagtttacgtagggagatagtgaatcattggatcagtaaagaactccagaggctagaaagattaattgacagggcgagtgagaaaggttggcgcaaggaaaagtttgaataccttgataagaaacaactcttgcgcaagccatctgaacaacaacgtttacttgaagaggtgcctcaagttattccagagacagaagataataaagatactgaatttcaagttacaggacaagacaaacctattcaaaagagtactgtcgctttacaaggtacatatgtgacaagggcttcttttttgaagagccacacagggaaaaaatccaaaggtactgatggggagagagatctttccttggaaagtttatcggaagaaaaacctgaagttaataaggcccacaccgatggtggtacagctgtaatacacaatcaaaatcggagcactacagctgctattgctgcgctaccaaagtatttgcatcgccatgctgccactgaagccaataatgctggtgatatttcatctgttcaggagctggatggtgttaaagctagcacggatgttgatacaactggaacagatgtccagcacgggagcattgaagctactaaagccaacgctgctggtgatgcacctggagcattttttcaaaagcagtgtgctaaagctgctgatgttattaccattgacgacgatgacgaggacaacagtcatcgttgttataaagaagaacaaacagcagtagttgatcttgaagctgattatgctggggataaccatcccgtgcagcttgaggcaaatagtcgaggccataaacacgtgaaggtgaaggagcgcatttggtattacattgatcctcagggtgatgagcaagggccatttacaatgcagcatctgagcatctggtggagcaatggcttcttccccggcgacttcagggtctggagaacaggccaaactagtaatgacgccatcttgctcgtggacgcactgcagatgactaggtaggctagttaggagcctcgtagaagactagatgtatttatgtatcgcggaaaaagcgggggggcttcgaggcagatatatgtgttctgctggggtgtacatccttctgtgttatatgatatgatgatgacatcctatccccaccatcacctcacccaccaatcaaaaacatcttgccaaacaaaacaatggttgtttgatggcaaagaggatttgttgggatgaaatatttgtggactattcagtatccctgtgctgtgacaatgctactgaaaatctggttctttggcatgttaggctgtttaacg

SEQ ID NO: 9202 - DNA, 3726 bp, Zea Mays
ctaaacccttgcggcagcgccccaaggcgcgccgccaccagagccccgagccacgacgcctccaaatcgatagggttttcgctgccccgctagcccgccgcctcctcctccgccagcgcgcccggtcgcagtaaaaggaggccaccaggcggcgaccagaataagcttcaggcgggaggaatggcgcagtcgctggagctgctgctgatccagtttttgatgccggataacgacgcacgtcggcaggcggaggagcagatccggcggctggcccgtgacccgcaggtggtccccgcgctcgtccaccatctccgtacggccaagacccccaacgtccgccagctcgccgcggtgctactccgcaagaagatcacctcccactggcccaagcttcccgcggactccaaggcatcgcttaaacaagccctcatcgattcaatcacactcgaccacatcatcctgtaaggcgagctagtgcaaatgtcgtcagcattatagctaagtatgctatccctgcaggagagtggccagagctgttacctttccttttccaatgcagccaaagtccacaagaagatcatagagaagtggctttgattcttttcagctcccttactgaaactattggagctacttttcagtctcatctgaacaatttgcaacctattttactgaaatgtctgcaagacgaaactagctctcgagtcagaattgcagccctaaaggctgttggatcattcatagaatatgtcaatgatggaggtgacattgtaaaaatgtttcgggattttgttcccagtatcttgaatatatcaagacagtgtcttgctaatggagaagaagatgttgcttccattgcgtttgaaatttttgacgaactaattgaatctcctgcaccacttcttggagactctgtgaggtcaattgtgcaattctcgctggaagtttctgcaaaccaggatttggaaataaatataaggcaacaggctatccagataatttcatggctggtaaaatttaaagcatctttcttgaaaaagcacaagctggttgtacctatcctgcaagttatgtgcccattgcttacggaaacagctaatgaagatgaagattctgatctagcagcagatcgttctgctgccgaggtcattgatacaatggctatcaacttaccaaggcacgttcttgcaccagttcttgagtttgcttctctgagctttcatcacattaatccaaagtatcgtgaggctgctgtgacgtcacttggtgttatctccgagggttgttgtgaacatttgaaagataagttggaggattgtctgaaaattgttttggaagctttaaaagaccaagaacaaatggttagaggtgctgcatcttttgcacttggtcagtttgctgaacacttgcaaccagaaattttatctcattatgcgagtgtacttccatgcattctaaatgctcttgaagacccatcagatgaagttaaggagaagtcatattatgctcttgcagcattctgtgaggacatgggtgaagatatcctaccgtatctagagcccttgatatgcagattggttatgtctttgcagagcagtcctcggaacttgcaggagacatgcatgtctgcaattggttcagtggctgctgctgcggagcaggcttttaccccatatgccgaaaaagtccttgagatgatgaaaggttttatggtgctaattaatgacgaagatctgtgtgcacgtgctagggctactgaagttgttgggatagtagcaatggcagttggcagagcaagaattgaagcaatattgcctccttttattgaggcttctatttctggttttggattggattacagtgaactcagagagtacactcatggtttctttagtaacgttgctgaaattttgggtgatagttttacacagtatcttcctcatgttgtccctctcgtattttcttcctgcaacttggatgatggttctgctgtggacattgatgatgccgatagcattgaaaatggatttggcggtgtttcatctgatgacgatgttaatgatgaaccaagagttagaaatatcagtgtgaggactggagtattagatgagaaagctgctgcaacacaggctattggttttttcgcactacacacgaagagtgcctatgctccgtatcctttagggcgtctccagcagttcatccatatggaaaacaatagaagtgctactccaacaatattttgcataaaatccagaatggatgtactagagaaacagaaggatgtccttgatactgttctgaacatctacatcaagactatgacagaggatgacgataaagaggtagttgcacaagcttgcatgagtgtagcagacattgtgaaggactgtggttttgctgcaattgagccttacatgctgaggcttgctgaggtaacactggtccttttacgccaagaatcaagctgtcagcaagtagagtcagatggtgaggatgatggcgacattgaccatgatgaagtcctcatggatgcagtttcagatcttttgcctgcttttgcaaaagtgatgggatcttattttgatcccatatttgcaaaattatttgatccgttgatgaaatttgctaaatctccccatcctccccaagataagactatggttgttgcaaccttagctgaggttgctcaggaaatgggtgctccaatatctgcttatgttgataagataatgcctttggtgttgaaagagcttgcatcatctgatgctactaataggagaaatgctgctttctgtgctggcgagatatgcaagaatgggggtgctgcagcactgaaatactatggtgatatacttcgttctctgcataatttgtttagtaactcagaatcagatgatgcagtaagagataacgctgctggtgctattgctaggatgataatggtgcagcctcagtcgattcctctcaaccaggttcttccagtttttatcaaagctttgccactaaaagaagatcatgaagaatcaatgactgtctatggttgcgtctgcggtttattattatcatcacatccccagatcctccctctggtgcctgacgtcatacatgtctttgcccaagtggtggtatccccagatgagagcgatgaagtgaaaacaaatattggcaaggctatttctcacttgatatctgtctatggccagcaaatgcagccaatactgagtgcccttccaccagcccatgcaaacgcgctggcttcatttgcgagtagaagatgaccttggaggaccagcttttctttggttccttgttctgcttgattttgttttggttttgtcgacgattgccattttctgaggatctggtcacatggatcaggccagatgggagtgcttgcattgcacattggcaagggcgagcggagttgtcaggttggcgcatgattgattatatggtgagcttggtttctctttgagatacatagttgtgcttgctttggagccctgtacggttatgagtgcctgcctgtattcaggttccggatttggttatttatgctcttgttttttatatttttttgcctgtatttgcaattcattgattgctgttgtatatagaagagagttttaaatagagagaatgtacgactctgcaactggcaaattttgtatacatactgctcataccacttgctaatgttcgtccggattgcgtaccttgtgc

SEQ ID NO: 9203 - DNA, 2100 bp, Zea Mays
cgacagtcgacaacacggtcaccaactgctcccgtctaacgatcaggatccagacgccaaggaagaagggtgaggtagaggttgacacagaaatcaattttctcctttctcggtctcgcgagcaagcctcgccatggatatctgcaccagttgcttccaagccagatattagagctgcctactacttgcgtcgcgcggagagcgggttgggaccagaaacaagagtagagcaagactcctatcttttttccacgcgccagtcttctctgaaccggtgaacccattcctcctcctcttcctactcaacgccacgatcgaagaggagactcagtcaatctcgccttgctctcctcttcgacccatcgtcggttcctgggatcagcatcgacgagcaggatttttccggctgtggaggagcacgagcacgagcaggagaaggcggctagaaggttcctgctcccgggcgtgacctctcacacggcatggtcgttgcttcgccggggaggcgcagcggggatggtcgataggagcagggccgtgctcatcggggtcaccgccggcgtcgcggccgcgctggtcgcggcggcgggcgtgcttctggccgtctggctctaccgccggcgggccagcgtcgccgcacggacgcgctccccggagtcgccctcggcgacgctgcgggccggcggcgccggtcgcgccagcctcgactccagcgtctccgtctcggtggtctccgagagcgccgccgactggggccacccgccaccgcacaaacgcgccgcgttctgggcctggagaggcggcgccggccacaacggcagggagccgccaccgctgtccgtctccgggatcccaaaataccattacaaggatctgcagaaggctaccagcaactttaccacaattcttgggcaaggatcgttcggccctgtgtacaaagctgtaatggccactggtgaagtggtagctgtaaaggtgctcgcgagtgattcaaggcaaggggaaagagagttccagactgaggtagcattgcttagcaggttgcatcataggaatcttgttaatttggttgggtattgtgtagaaaaaggtcagcgcattctgatttatgagtacatgagcaatgggagtttggcaagacttttatatggcgacaataaacgaagtttgagctggcaagaaaggctgcaaattgctcacgatgtttctcatgggattgagtacctgcatgaaggggtacgttaacatttgataactattaaggttgcagactttggtctatcaaaggaggaagtgtatgatggaaggaagtctggccttaagggcacctatggctatatggatcctgattacatgtccacaaataagctaacaaagaagagcgacgtgtatagctttggcataatactttttgaactgataactgccataaatccacaacaaggtctgatggagtacattaatctggcagcgattggaggggaggggagggttgattgggacgagatactggacaaggacctcctagtagggaacatccctgaagaggttcggatgcttgctgatgttgcctaccgatgcgttaacaagaatccgaggaagcgcccctggatatcagaggtcacacaggccatctcaagactcagacagcaccagctgataaagcatgatgcgataactctgccgaggagtgagaccaggaccgtccttaggaggatagactaccagcacgtggagcttagtgacctcactagcatcaaagaacttacgccgataagggcatcatgaactcgtgagcttgttctagtatgtaggttgctttatagagttagatttggacttggttcggcgatgttgtagctgtttgatgaaagcatcaggtagctagatcgttgaaagatgtcttggctgcaatgagagctctccttaattggagttctgtactgacctgaggtttgaaatcgttgtaaaaaaatcaacagtagtagctgtagcatttgataaaaaaagactttataaactgcatttttaccatggccatgtgagtacagacactgaattcgacagtagtagctcagtgtgagtaaagacactggattt

SEQ ID NO: 9204 - DNA, 4276 bp, Zea Mays
ctggcgcggacgcgcggtggcgccgtcgccgcctcaatgcagttcggaacgccgcttcctccggccgctcggcgcgcacccaccttccacgcagaccccgccgccgacgcgaggcagctcctcggcgcgctcctgccgccacgccctgcgctctaccacgttttgcaggcccacgcccgcctcgccgttctcggcctcgctaccgcgcgtgccctcccgcaactcctcgccgcccttccgcgcctgacgctcgccgccgccgacgtttcccactcctacccgctcctcctgttccgttgctccaactgtacctcggccttcgcgtcgaaccacctcctccgcgtgctcccgcacccgctcccgctccgcctcttcccgcgcctcccacgccgcaacccccactccttcactttcctcctcgcttccctctccaatcacctagacactgagcctgccgctgcaggctccatcgcctcccgcttcatgggcacccacgtgcacgcgctggccgtgaaggctggcgccgcgggcgacctgtacgtgcgtaacgcgcagatccacttttacggcgtctgcggagacgtggcggcgatgcggaaggtgttcgacgagctgccgatcgtgcgggacgtggtgacgtggaatgccgtcctcgctggctacgtgcgagcgggcatggtgggggttgcgcgggaggtgttcgacggaatgccagtgagggatgaggtttcttggagtacggtgataggaggctatgtgaaagaaggagagccggaggtcgcgctgggagtgtttaagaatatggtggcgcagggggtgaaggcaaatgaagcggcaatagtgacggcactgtcggccgctgcacagctgggtttgcttgagcaggggaaatttgtgcatgaagtggtcaagagagtaggaatgacgatgagtgtgaacttaggtgctgcactgattgatatgtattccaagtgtggaagtgtggcagcggccaaggaagtttttgatgccatgcctaggagggatgtttttgcttggaactccatgatctgcgggcttgccacccatggattggggcatgacgcagtccagctctttgagaagtttgtcagtgaggggttttgcccgacaagcatcacatttgtgggggtgctgaatgcctgcagccgtactggccttgttgatgaaggacggcggtatttcaagctgatggcagagaaatatgacattgagtcagagatggagcattacggatgcatggttgatcttctgagtcgtgctggtcttgttcaggaggctgttgaattgattgaagggatgcgcatcccacctgacccagttctctggggcacaatactgtcagcttgcaagagacatggccttgtggacttgggcattactgttggtaataagctaattgaactggatccagctcatgatggatactatgttctccttgcaagtatatatgcaaaagcaaagaaatgggacgaagtcaggaaagttaggaaattaatgtctaaccgtggcaccagcaagtcagctggttggagcttgatggaggcacatggaattgtgcacaagtttctagtaggggacatgaatcacaaagattctgcgcggatatataacatgctttgcacgattaacagaaggttggctgaggcgggctatgtaccagacgtgtcatcagtcttgcatgacatcggggatgaagagaaggttcatgcgattaaggtgcatagcgaacggcttgcaattgcttacgggttcattgttgttgaagctggcagcccaatccgtattgtcaagaaccttagtgtgtgtggtgattgtcatgagttcagtaagatggtgacaaaggtttttggcagggaaattgttgtgagggatggtagtaggtttcatcatatgaaagatggaaagtgttcttgccatgattattggtgattaatcattcgatatgtttcttctcaactatgatgtggagtttaggccatgatttcaatatatttgattggcaagctggtaattgacatgagttctgtttctgagagattccgatataccatttcagatgccatgtaaggcctctcctcacgagttcatagctccacttataagaggcagccaatgatccctacatcttgttgcctcctaagaaatttctggggcatcggtgcagcggtagagcctaccgtctgtaaccggaaggtctcgggttcgagccccagcctctgcatattacgtgggtaagacttgtcgcttaaagatacccttccccaaaccccgcacagtgcggaaagcctacaacactgggtgcgccctttttatcctcatgaagcaagagtgtgctttatcttttctgggatactgaaggcaatggttaaaaagtgcatgatggagttggatcatttctatggatacatcaaagaacagattgaaagcagtgcaacctttacaaatactgaaggtcaagtgttttactatccacttgcataaattatactccttcctggtgacgaaggataagcaaaggaatatttgctaggacctgggaagccacaattatttgagataggaacagggggctattatgagatgctcatatgctcagtccattaccacctcaattgctactgcgctcattggttgatcatatggctccgactgtttcaagtgaattattcagttggattacccaggagtatacagaagcacacaaccttgagaaatcattcagttgcactttatgattatgcaaggtgtgagcatttgattccttcagtttcatgctatcaggtacttcttcattttctgatcagaaacaaaaaaggacgaattgatttgaagagtatatgtggacatacttaaagttggatttggttcttgcaccaaaggaggtattatttattctgttgccatatctttaatcaagaaagatagttttctgcaagctcttggtattcttcggcaactaaagagtttggatcttaaattaagcaagggagccttgtcaactatagaagaagaatttaacaaggaaagcaaattggggatatgatgaatttgttggaaagagtggagatgttcccctgagttgcgtcttcgcaacaaaatctttgtgtctgtgtgtacaaatcttggcactgatcaggcatggttgttattccaaatattggaggccttagggtttgctccagatgcttcgactcttgaaattttcatatttcatagctgtagagaaacgaaactgaaatctgcacatgtatatttatcagagtgcttttctaggcatattaaacctggagtttattcttataatgctattttaggtggcgttcagggagggactgtacagaaatgcaaagtatgtcttcgaagacatagttgaaagagaagtaacacccaatctttcaacatattaaataattcttgcaagatattgcaggtataggcagtttgatgatattgagcaagtttttaaggatatgaaaactaatggtgtaaatgatcttccctctgaaaactgtgtgctctctaaggatttatcattcttgtggctaggtcatctaggggtggaaaccaagagagataattaaataattcttgcaggatattgcaggtacaggcagtttgatgatattgagcaagtttttacgtatatgaaaactaatggggtaaatgatcttccctctgaaaactgtgtgccctctaaggccttatcattcttgtggctaggttacctaggggtggaaaccaagagagataatgccactggtttctcaaaagctgagtttttttattcagttggcaatggactgtgtttggacactgagtccaaaatgtttgagagttcactggcgcaggctttggatagtgcagttcacacagatattaactcagcgctagtcagggcatctcagcaaggtaatgtttcaagtgctcttcttgtgaaagacgaagctcatcaaattagctacctgttctgagctattcaaggccttattcgtgatccctgcttatgtaatagatgccattgaccttatggaggagatgccagatatgttggaccttttgacttatcatactgtaactaattcgtgtgttcgtgtaggaacttgcaatttgactctagaggaaagcactatcaagaatcaagatggcttccaagtgagccacagattttttttttatgttttggtatgaactatttatgtagccttatgttgtagtaatgcataatttatgtaacctattttgggatttataaaag

SEQ ID NO: 9205 - DNA, 4022 bp, Zea Mays
atggatggtggcagcgcacttccagctacaccggcctcacagccatcatcgaccatactatctcaagcagggcaaggatcaggtgtcacacaaaacaagggggctgccttcatccacgagccgtcgctaacaccggagagtcgcaaagtttcgtctagcgccaagacaaccccacatcagggagacaacctgctgctaggaaaagaaattatccctgctccgcctaacgtggagacgccatcaggagcccacaacacccctggtgccgacactctccgcctgctgcctctaaaactagcaagttcgcaggatgacgcttacagtgtgctagatggatctacaaacaagattgacaaaagtgttaccggaaaaaggtctcgcacatcaccttccaagaaggctgccaagaaactttttagagatgaagtcataaccaatgacgatgctactggttcttcatcggttaatgtcgaggctggcaagaatgagaaaggttccactgtttaccaacaaaggttgttgtcatgtgattatgctgttgtatatggcttcagtttacctgctgcagaaagattcatagcgttggcaaacaaagagacgcttattgcaggtggtcctttcgtgcttccccttgcacacaaacacaaagtgaaaattcttcctgctgattctgagcactctgcaatatttcagaccagtgagtgtagcttggtggattgcctaaagtacttcgctgtggtggagcatcttgacagctatcgttgtgaccgttgttggcacatcattgctgccaaatatctttctcttagatcaaaagttgatgaggaaaagttgcagggatatgttccccctggagtcactgccatgttcatcatcttcacgagcaacaaagcagctgattatcagtcagtgcccgaaggtaacacctcagttgtttctcatccaaataccagtggagacaaagatgtgattgttgaaagaacgcatctaagccttaactttgtaatacatattagccaagacccctcggcgcgcccgcactttcggctgaggcgccatgcgccccgcgcgtccgccactgccaattcgtcgctcttgactctgaggtggctcgtgctgctaaggggaagagggcacatacggttatgctcacccagttgctcgctttggcaagccatgctttggcagaggcagaaaccaggcctgaacctaaggatctgtgggaagagccgataaacgctactatgtggagaccgtgttctgatcaaagggattggaaagcctcagagggaaccaatgggtacatcatgatcagtgcgaatggtggcataaaccagcaaagggttgcgatttgtaatgcagttacaatctctcggttgctcaatgcaactcttgtcctcccaaaattcttgtacagtaatgtgtggctggacaaaagtcagtttggcgatatatatcaggaggattattttatcaaatatctgaaatctgatattcagattgtaaaggatcttccagtagagctgcagtcattagacttggaggccatcggtagccttgttaatgatacaaatgtcatgaaagaggcaaagcccagtttatacgtaaaaaaaatactgccaattttactgagaaacagagttgttcactttataggatttggcaatcgcttatcttttgacccaataccttctgaccttcagagattgcgatgcagatgtaattttcacgctcttcgttttgtacacaaaattcaagaaactggtgcagttcttgtagagaggttgcatggccacagggcctcttcgtcacctttgaaggataatcttttaggccagtttgctatcaagtctgaccccagtacgaacaagagtgacgcatccaaatatctggctgttcatctccggtttgagattgatatggttgcatactcattgtgttactttggtggtggcaaagatgaggaagacgaactagaagcttatcgccaaattcactttcctgttctgtcagaactcaagaagacgacaaagttgccgtctgctgctttgttacggtctgaaggcaaatgtccccttgcacctgaagaggctgtgcttatgcttgctgctattggtttcaagcgcagcacaaatatatacattgcaggtgctgaaatttatggagggcaatataggatggctgcaataagtcgtctttatcctgctttagtaactaaagaaacccttctgtctccatcagagcttgaaccatttaggaacttctcatctcagttggcagccctagacttcattgcatgtgcagctgccgatgcatttgctatgactgacccaggaagtcaattctcttctcttgttcaaggttaccgcatgtactatggtggtgggaactttcccacaataaggccaaacaagcgccggctagccagcatacttgtgaagaatgccacgattgagtggaatgaatttgaaagtagagtaaggaaactcatacagcaaactaagcaagttcatgagaggcctgttgcaagaagcatatttagacatccacgatgtccagaatgcatgtgcagaacagagcactaatattttgatagtttcttgtatctataccaacagttgttttttcagaagaaagactaccaattagatcgccaaaggtagttcttttgtgctcccgctgaaatctggatagatctcttgcccttgaactactttggaatcaaactgtacaaaagaaaatataatgattgagcccttgtttgtatcagagaagcaatatagctgactagctcatcaattatcttactgctatggtctactgctaggcatcatgttggatttggggtatttggcagaactttgtctcatgtttgatggaagtagaccagggactaaattgattggggtcagctaaaccattctgtgaatgaaggtgcatcatctgcagctgactgtggaagtaatatgttgacaaaactgagcaacaacattcttattgttgcttgcctaaattctactcaggttaccattcaacaaatcaagctgccagagttctgccaaccttgtattgccatctccattgttgctatcgtgctccggctgaaatctgaatatatctgttgcccttgaactactttggaatcaaactgtaaaaaagaaaatacggtgattgggctcttgtttgtgtcagagaagcaatgtagctgactagctcatccattatcttactgctatggtctactgctaggcatcatgttggatttggagtatttggcagaacttcgtctcatgtttgatggaagtagaccagggactaaattttgcacctcgataacaatgctgccatatttttgattggggtcagctaaaccattctgtgaatgaaggtgcatcatctgcaggtgaatgtggaagtaatatgttgacctaactgagcaacaacattcttattgttgcttgcctcaattctactcgggttaccattcaacaaatcaggctgccagagttctgccaaccttgtattgccatcttcattgttgctatcgtgccaggtggcatcttgattccttttttaaccattcttttgttcattgtaccataagagacgcatatagttaggttttaagtttatcccaactgaaaggtttcattatcaacgagagaaatgttcctttttgtgcaatctttatatgtgctcatccaacggcacttgtatactaatgttttggctattttttttgtttccaaattttctttggcaatgccctgaaactgtgaatgaactcactcagactctgattcgcagagcgatgctcagaaccacctgatctctggtgttgtaatgaatgttgttggaaggcattttgtatggaaacctttggattgctagttacagttctgatctgaaataaagcctgatctccggggagtcacatttgacgtgttccatacttcgatgactactgctaaagatcagcattgcataacatcatgatgcttaaactatctacaacagatttc

SEQ ID NO: 9206 - DNA, 3867 bp, Zea Mays
ttatgattctaccagatatgtctttttgattccgtcgaaaatcgattttacggtataggcgcttatgacctcccctctatgccttgcggtaatgattcctctggcattacggcctttaccacaacggtgccgtccatggaccaatttatttcgtggattggatttcacttgcctgtctatggtttccttgcgtgtgctcaggataggtgttttgtataaatgtttcgccgtattattaagtattctcctttagttcgtttctctatctagaagtagaatagaataacccggttgaagggtaatgatcatacgtctgtaatacattgtatgtcccaaaataagtctcattcttctaccctttccgggtagtcgatggcagctaccttaacaccaaagaagagttcgactagttgaactcgaaagctcgaggcccaggcgacgcgacgcggccacgcccacgtccttccatggcgaccgctctccccgcctccgcctccgccgcttgccttctccagctctcccggcgcggtctccctggaacatcttctgtgctctccccgcttcgcaccgccactttccgctggcacggtgcctgtaacgtggcctgttcatgctctcccggcccccggccggcggttcccgcggagcgaagggacggcgtcgctggccatgccacttctccagagggaactgtacgaatcgtcgccgtggttggagaaggtagcatcagcccgattaaggacgcgccctgggaagaggtcatgcgccacacggctgataggctgaagtgggtcgatgaaggatttgaaatgcttgtcttcacggataatttggttggtcatgataacctcaggaaagagttactatcacactgtgatatgctagtcaatgttgcaataacaaatcaggatgctgttcagtggcttataaacaacagcaaacacatttctaatgtaatttgctttcagtcatctccgtctttagtaaacaaactaggtggcacatatgttcagtacactggagagcaggacatgtttgggaagctaacaagtattggaaaaccaagtggcatagaggaatcaactgaagttatgaagaccatatctaatgcttgggaaagacacaattcagatgacattagattttgcttgcttgttgttgtaaatgcatacataagaccggttgctatgctgaaaaatctaagggcaaaaggcctttctaccctaacttgcatgataaagaactgtggtcctcagatactcaattgtctgtttgaccctaactgtaggaaggcccttcagtgtttgaattcctgttctccaactgatcaagtctgcaactatcgttgcattgcatcatatgaaagtccatatctggaggctttttccctctgtgttttgcagaagaacaattgccttgacctcaatgctgagatacccagtaaaccgaatgtaatgccactaaccatgttcagagaacaaaaactaagccatgaaatagcggaagatctttttgttggttggttggacagcatggaatggagttggcgagtggcagctggacaaaatccagcatatgatcaattcccatgtcagtaccagttattttacagagggaaagctaaaggttcattttggtatgagccggtttttcaggtcaaaaccctggaaggggagctggtttggaggcgcaggaggtatcgtgtgagaagggctagcactcctggtacattttacttcagtgtgttggataatggtgtcatttccaaagaatattggacaattgttgacgttgcggaggatttcagctggggtctgttccattatcatggcgcagcacaagctgctgggctatcatacactggagcagtgcttgttactccagatgggtcttatcctgacctggaagacccaagattggcctctgctttagagaactgtgctataaagaaatgggagctctatacagtcgataactgctcctgcatgggtgcaccactgggaactcctgagggttcaaagctgcaccatcaaatttctccaggaaaagaaagtagtgttttgcagagaagatgataatctgtaatatgttaaagtgactcccaaatgattatgtcgtacgtacaaagatgtacagccaagtggacatgtattgctgaagagagctcatatgtaacctgcagcatcttcggtgttcccatcggtacctgtcgaagcatcttgtagtgttcagacagttcagttggctatcagtgcgaaggagacacattggtcaagcagaactgcagaggaggtgtacctgggcagacaagttagagttagcaactgacccacttcactttgattttacgttattgagttgctctgcgatgtacaggtttggatctccttatgttgacccaagttctatatcctacagctgataggcaggcgataccgtaccgagagagttgaagctgagaaagaatggcggggctctacgagaagcagtcggagacgtacgccaagaagcgtccgcagtaccccaaggagtggttctccatgctggccagcctcaccgcggggcaccagcgcgcctgggacgccgggtgtggcaccggccaggccgccatcagcatggcggagcactacgagagcgtggtggcgacggacgtgagcgaggggcagctccggcacgccaccgcgcacccgaaggtgcggtacctccacaccccggagcacctctcggaggacgagctggtgtcgctggtcggcggcgagggctccctggacctggtcgtggtggccacctccatccactggttcgacgtcccgctcttctacgccgtcgtgagccgcgccctgcggaagcccggcggcatgctcgccgtgtggggctacaactacgagatccacccgttcgaggacgcgctgcacggccagctctacccggccctgcggccgtacctggacccgcgggcgggactggccatggagcggtacaggtccctgccgttcccgttcgagcccgtcggggtgggcgccgagggcgcgcccgccgacgtggacatcgaggtggagatgacgctggaggacctggtcgggttcctgaacaccggctctgtcgtgaccacggcgagggccaagggcgtggacctggaggcggtcacgagggccgcgctgaagcgtgtggaggagcagtggggcggcgcgcccaccgtgccgaggaagctcgtgttcaaggcgttcatgctcgccgggaggcccaagtgctgaagtgataatgccgaataagtgtttgcttgtcagtcagcgtgagattgagatgagatcacagactacaatacatcatatagccagccactggattatgtctggcgatctaatgacatctgaagccactacatccaacccaggtagaggtagcaaactgcgtattcctttcatgctgtatgcagaatgaagaagaaatacctatttccattgcctagtgaattcccattagtatttcttctttcactggattatgttgtatgcagaatgaagaagaaatacctattttcattgcctagtgaattcccattagtatttcttctttcactggattatgttgtatgcagaatgaagaagaaatacctattttcattgcctagtgaattcccattagtatttcttctttcactggattatgttgtatgcagaatgaagaagaaatacctattttcattgcctagtgaattcccattagtatttcttctttcactggattatgttgtatgagaaaaataattgttgctcgctcatatttcacgtctaagacataagataggcttgacgtgagagaagtgttggaatataatataagagtgtttggtttgaggaatgaaat

SEQ ID NO: 9207 - DNA, 2878 bp, Zea Mays
aacacgcacccggcgtaccgcgaggggttccgggtccacctgtcagcgtcccgcctaaaccccgtcgccgcgccgcccagggccggcaggctggtagacccgtcaaatccaagcaaaggccaccccggccggcgacgacttccccttccaacacccacctcgcccgtccctccctccccgcaccctgatcccccggcatccatccatggcgacgaacagcgcggtgattgtgctcctcctcgtcgctgctgccgtactcgcctgcgcgggcggtgcgcgcgggttctacctcccgggcgtcgcccccgccggtttcctcaagaaggacccgctcgccgtgaaggtgaatcagctgagctccatcaagacgcagctgccctactcctactactccctccccttctgcaggccgggcacaatcgtcgatagcgccgagaaccttggcgaggtgctccgcggcgaccgcatcgagaattcactctacgtgttcgagatgatggagcctaggctgtgccagatcgtgtgcaagattgctccaacccaagatgaagcgaaggatctgaaggagaaaattgaggatgagtaccgcataaacatgatccttgacaaccttcctttggtcgtcccaattaagagattggatcaagaggcacctactgtataccagcaaggcgtgcatatcggcatcaagggacagtactcagggagcaaggaagagaagcatttcattcacaaccacttcacatttctggtgaagtatcacaaggatgacacaggtcttgccaggattgttgcctttgaggttaaaccatacagtattaagcacgaatttgatggcgactggaaggggaatgctacactccttaaaacctgtgacccacactcaagacgccttgtcgtagactctgattcacctcaagaagtagatgccaacaaagagatcattttcacctatgatattaactttgaggaaagtcctatcaagtgggcatcacgctgggacacctaccttctgatggcagacgaccaaatccattggttttctattgtcaattcactgatgatagtcctcttcctctctgggatggttgccatgatcatgctccgaactctttaccgcgacatctccaagtacaaccagttagaggaccaggaggacgcccaggaggagacaggatggaagcttgtccatggagatgtgttcaggcctcctgtcaatgctgacctgctgtgcgtatatgtcggtacaggcgtacagttcttaggaatgctgcttgtcaccttgctgtttgccatcctcggcctcctttcacctgcgaatcgcggagggctcatgacagcaatgctcctcctctgggtcttcatggggctgtttgcagggtacgcctcctcgcggctttacaggatgttcaagggctcgcagtggaagaatgtcaccatcaagaccgcgctgatgttccctggcatcgtgtttgcaattttcttggtcctgaatgcactcatctggggcgagaaatcctcaggcgccgtgccattcaccaccatgtttgctctggtactcctctggttcggcatctccgtgccattggtctttatcggcagctacctcggcttcaagaaacctgccatggaggacccagtgaggacaaacaagatagcacggccaataccggagcagccatgagatcgccatcgtgctctgctacttccagctctgcggcgaggactaccagtggtggtggagatcctacctgacgtctggctcgtcagcgctgtacctcttcctctacgccacgttctacttcttcaccaagctggaaataacgaagaccgtctccggcgtcctatactttggctacatgctcattgcctcctacgccttctttgtgctcaccggcaccattggcttctacgcctgcttctggttcaccaggctcatctactcttcggttaagatcgactagagagtaacagctgcaacactgctccgtgggttttcgaaatcagagatcaagagagaatactaggtaacgaaccatcagaatttgagagggtagtgtgcgttatttttataaggtggaacttcaaacgtagggtgcttattcagtgctttagggtttttacagtttgattctggaacactaagtcagtttacttcgaagtcagtattttcagtgtgtatcccttacagaagaggtgtctgatggtataattcaactacttaacaatttaaccatatgttatgtttggtgaaattatgatggtattagcagtttgattcagcaacattaaatgtataaattagtgtactggccacaccccacacaacaagtttcggttacagatgctacaatgaaacgagcttaacatttgaaccacatatcttccgtggttctaataattaaatcacaagggaggctacttattcagtaagaaaattggcatgttatacatacatggataacaagatagtagcactcgaggtttttgcacatatggaacacatacataacacccgccaaagagcctaatcctatcttattttcggaacatctcggtaagctagctaatcgacgatctccacgggccttttctaagctcggctggcctgctggtcgcgcccgttcttcttgctcccgaacatgacgtagctgaggccgccaacgacgatgaggccgccgaccgccagcgtcgttgggctgtagcgccgtagagggctcgacggatgcgccgatgccgaccccgcgcgcttgagcgggtcttctgccatggacgcccacgcgtacatcttctccggccacatcacgcacacacggtgctcctttctggattctgatgatggctacctccactacacggactaggaagctctgtgtcc

SEQ ID NO: 9208 - DNA, 3826 bp, Zea Mays
cgacttcagtagcttctggtgggcagaggttaaaaaaaagccgaaacaaaatcgtcacatctatcatagtgagtttgaggacattggaccgcaccctgcagaggccaagcgtcgaacacatggcgtgcaccttcctccgccgcgcgttctccctcaccgccgccggcacccacgcgaccccccgagttgccgccgccttcgcttccacttcctcctcatcctccgtcgtcgtgcctctgcgctccccactagaccaccgtcttctccgccacctccgctccgagatcacctacctcgcggagcgccgccctccccacgtgccgccgagtagcttcaagtcgttcgccgtggaggaccgcccgggggagcagtgggtgcgcctccgcgccagcgcgggagggggaggcgaggaggtgaaggtcgaggccaccatgttcgacggcgctgcggagcctgtcccggacgacgcgcccctcttccgccgcgtggagtcgctcgagcgcgggccccgcctccacctcagcctcatcgtcgaggtcgcccggggcgaccgcgtcctcggcttcgtctgctccgcctggcccgacgacctcgccgtccgccacgtgctcacgctcgcagctggcggtggcagcagtggtggtcgtcgtggtgggcgcgatttcgagaaactggggggcgaggagagggaagcggtgacgaagttcttgaaggagagggaggtggacgccgagctcgccggattcttgcacgactacatggcaaacaaggagaagatggagctgctccggtggttgaagactgtcgaatcattccttaacaagtaggataagatcgcacacagaagacaccgctgatgttactgcctagtttgggaacgggtacgctccaacaacaactggtgacgatctcctgcagtctctgtgatcatccgcatctacccctctgctgacaattgtgtgctgaagatgtttgtttttaatcagcttagatagctcagcgcacagcgctcttggaaactggtgatctgaatatcctactggtactttcatttctttgtgataagattgttctcaacggtgtatcttttaagatacaccccattgggtttttttcccttttgcaatataccaaatctcattttggatttccaaccagttgctatgtgcgtgcttagagtaaaaatctgctcttctgaactctgacggttcaatgtcgaaggaggagctgtaacggttggattaagcggggcgacggctcacatttcagaagccttcacatgatggcattgacacacctcaatccaacagtcgtgccactgccaagctccatcgcgccacgcgtgatgtacgtgattatgatctcactgactagcgggcccgcgtacagattcaaccctcccctcccctcaacggctagttccacctccgcatccgttgggacaaaagggggaaaaaccagagggaacttcaccagccaccaaagtaccacacctctcctctctcaagaaccaccgcactctctctagcaggcctctgttttgtacttgaagtttgaaacaggagcgaaaaggtagatagtcactcagcttctcgagagatcgccaaagacgcggcgccggcagcaagttctgcggcgatggggcacaagtacacgccgacgtactactcgggcctgcaggacaccatcgcgtcgctctgcaagtccatcctgccctccttccgcgtgggccggcggctcacctccgaccaggccgcggcgcggcgccacgccgagcagctcaagtggcagcaggagtccttccaccgcatcctccaccttgccgcgctccaccgcgagggcatcgtcccggcccacgacgtcgccgccttccgcggcaccatgctcgcggcgctcgtcgcgccgccgccgcagcaccccgagcagcccgcggtgctccgggacaagctcctcttcctccaggagctactctacgccaagtgcgtctccgcggcggagtacaacgcgtccaaggcgcccctcgtgcggcggctcgccgcgttcggcggcggcgtcgtcgagtgccccgatgccgaggcctcggccgaggagtggtcggagatcgacctccgtgacccgcctcctcccgccggcgcggcgtcctccgacaaaccgaagcacaaggccttcatcacgccgtgggagagcagatccaggaaggatcaggacgcgaaccgcagcgcatcaaggccgccgctggccccggtggatcataacaacgccaacaacgcgtcggtcctcatgcccgagtattctccgtcggaagcggtgccctgcaggaaggcggagaaggggaggaggaggcatctggcggggatgttccacagtggcggcaatggcaccgagaacaaggagcctgcgggggaggaagggggggtcgacgagaaagcgacggtgaaatgtaagaagaaaagctcgtggggattcgatggcatcaagaagtggaagaaagctggcgcctgtaataacaatggcgaggcggcagccaccggtgagcagccgcagcgtactcctccgcgctcatcgtacagcgagtgccaattggaggcgagccccatggctgcatctggcccggatgccaagagggccaagacgaggctgcactccagcacggatgatgactgcttctgagctgctgcgtgataaggaatcagcagatcgaggccatctcaacaaagcttcaggtggacaagtctgacctcaagcccttcttgccaaagtagatcactggatcatccatcattcagattaggcgcatgatttctcataaacgagatagtgacactttttatgcttttgttactggtataatggtattgttgtacttaggttcaattgttacattggaccaggagttgctgtttatggcgtcatttgtatgattggagcctacttcccattgattccttgaatgcacatcagcttttctctcccccagtgagcatttgcccgacaagaaacttcagtgtcacatgaacagctgataactcatttgacttcacaaaagataaacaggcagttctagatgcaagttcctacatatacagcaggcatgaatcgcaattgtaatttgtaaatatataagatatacatatagatatataagttatatatagacatgttacgcccaccggaaactaattgaggtaccgcctgcagtatcttgatctacaaaagcaaaggatcctctggccttcatcttcccggttgaagtggtaatcgtacgtaatttcctcccctgggtttatgtgccgttctgcaaagaacattacctggatgaacatagaaataacaaagtcaaattttagtccacagctggaacttgtgggaatcatgtagcttaacatatacactccctccggcctccttccaaattgtagctcactttggatttgtcaaacttctctaacttaatctacaaattcatataaaatctctactgaaatatactgtgtgaagaatataatgaaacaaatttgatgttctagatgttagttattaggttcttttacaaaactagtagaaattaaacaagattgacttaggacaaaaccaaggtgaattactccctccgactcaaaccaaaacaacctctagagttatcctaagtattttaagtttgaccatatgtatagaaaagaatttatttattttaggacggagggagtaccattttttagtcagaggtaggagatatttaggctaacgaggctgacacaaggcattacgactaaaatttacgatccagaatattaattttataagaaaacaaacatatatataggca

SEQ ID NO: 9209 - DNA, 5998 bp, Zea Mays
atggacgttgaaatgctgccgtacgggattatttcgacgtttcattgcttgagtgtccgtacttcgccgctaaacatggcgttgttaccgtgcgtgtacatgcagatggacggcgtcactctgcgccacctgctccgccccttcgccgcgcaggaggccgcggcggccggccgagtggcagcagcgccagagcagctgttcgcaagtcattcgaccctgcaatccgggccgcctccgagagtggggccgagcaatgagttgcttactcaagttccggggaactattgcactttcgatcttgcgccggacctcactcgggcaaatgcgagcaatgctgctggtaccattgattttactcgggctggtccctccagcagtgctgccactctgcccaagtatccgagacatggattgccagctagcagtagcaatgagcagtcctcttttggagcgcttttcccgaacagaagtgctaatggaatgggtatttttacttgtcaaagttcggctaacgaaggaatagcaaatgttggtgtgcagtttcaggactcaagtgtccatggactgcagaaattgccattcaaatcgatgactcatcagcatcctacactgcctggcggagagttttttgtgggcgaagctgggctttttggagttatctgcttgtgtcatcggttgcgaatgtctgtagctaaattctgcgagcatgctggaggaattccagaaaaagctggtgaaattgtctgcttggagaatggcatgagtattgcacaatggttcaaattctgcataggggtcggaggatctattgctaacaccaggtgggattggccggaatgggcacatatgaaaagttctccagaagagcacatattgaaaagtcttgcatcaagaaacagtggaacaggaaaaatggggttgttaagtagatatggaaaaatcactggacatatgaacaaaccggcttattccaatgatctgtccgttgagggtggagggcacactaatgttgagaagctagtaaacaggacagatgaaacatattacagaaagagtgttgatgtgcatgaaacttttacaaagaactctgctttacttcagaattccgctgtggtgaatttagggcccgctaaaaaccatccagttcatgcattcgacttgaacccacttaccactcctagtggaagcccacactttgaagcaagcatgggaagacattacaatggaaatcatttggcccatagtcatggaatccatttggagaaaaactttgatgcgtcattttgtaatcctatgccacgttttacaggagttatgaaccatgatagtagggcgtgcagaccaaatttctccaataaaacattccaggacacttcaacgatgattgaatttcagaaaccccaaacacataggcctccgataaatcaaaatccttctccaaagcaagcaacaaagatcagcaaaagtctatccgaacataatgaaccatccattagtaccggaaataagaagcaaccacttgaagttgttaatggcatgaagcgttctgaaggtgatgagcttacagatgatacatccaagaattcatttatctcattatttctttcacaccttgagaggaataatacacccgaacccatcgatgacattctcaacagtaatgagcactatcttcctaaggccctggatgttgcatgtggttctgatcatccagaaagtgccactagacagattgaaacaagggtgcctaatgataagcactcaaagttggcctcagccattgttcatacgaaaaggagatcagagggcatttctctttcagtggcttcttctggatataatcctcaagatgcatcccatgctaatagtcaggaacacttgattcatggtgattccttgtcacatttgctgcctagtcaacctaacaccggaatctcgaaaatttctgcaagggtttcatgtcatgcaaattgcatgagctgcattcacgtgggtaataaatcccatcaggttgcacatggtgagattggggttccctgtttctatgataaaatggccaggggccatggtacttttgagcgagttgatgactgcacacatagaagtttgagagctttcacaaaaatcagttgcgataatgggaaatcttgttgttcttctcgtgagcttctacctagcttttgccaaaatgatcagccaacattgggaaaatcgatttgtggatgctgttgcaaaattcaggaagatgcttccaagcttggttttatacctggtcacatgtgcagaactcatttttctagtgatgttggtccagttctagccaataagcctactattgaagggctagatgaattttgtgcttgcagttgctccacttttacacaacgatcatcattatgttctcgggaatacgtcttgcagtcttcctgtgactcatgtcccattaatggactgcactgcagaagttgtatgggacatgcagcagatagcttaacaaaacactctctgtttgatcctcttaatacaaaagaacgaggttcttgttgcaatggaagatgctgctactctgtagtcccaaaatgtttgtctagttgtgactttacaaaacactgtgatgtcataattgaccaaataggtcatgctgcacctaaagataaccatcagctgcaaatgcctaccagatgctgcacactgggggagaatgagaagttaatatgccaatgcttaagcaataaaatagctgtaagaaacttgcctcaaacttctcattgtaaagatgtctctgagaaagtaatgaaccagccttctattgctataacggagagactggagaatgtatcagaaccttcagtggctgatgacagttcatccaaagctgtagcagagaaaaaggatgcttatagagattctgcagtatctaaaggacagccaaattttggtttctcatctgggtcgtccagcattatagtgacaaagttccagaaatcacctgaatttaacaatgtatcctctactgctaaacatagcaaacataaaaatctgtgtgatgaaggatcaagaattgagaaaagttcagcatccagctatgtgcctaccagtacaggatgtgaagaacccctaaatagttctgccaaatctgagctgggtccatcaagagtgaagcgcaaatgtaatcagatttctgagggaaggagactggaagaaacagataatgaggaacattgttctgaactgctaaaaaagactagaacactgaggtgctctgttaaaggttctgaatcagatgattgtactagggctagttcccagtcgtcccagaagggggtttatcaaccacaaaatgaggttaactcattttcttgcagggtgttgagaaccaagcgaaaacatcctattatgcatctaaataagcatgtgaaacagcttcacagacagaccaagttttttgaaggtgatgagcaaccagatgccaagggcaattttcttggtggattagattcctatgatagaaagaggcaagtagaggatatgagcactctggataaaacaagacatcaccaggaagggagtcgagcatttgtccgcaaacttcctaaatatgtgtctctgaattgcattgttaatgaaccgaatactaacagtgaaggtgcttgcagtgggagtggtgggattgattctagtttaattgctacagggattacaaacgataacaggaaatctcccaaaattgttcctctcaatctggttcttaaaaaggctaagagatgcaatgctgttaaactccgtaagacagaaagcacccacttgtatgaggagaaaagctcagattgttctgtgaacagctcagattattctatagaaaagtattccgttgatgatgaaaattgcagcccacaagctgaatatgaactgcaggattccaaaaggagtaggtattcatctaatgatctgaggtcacatgtggctctccacaaaagaacatctggtggaaccaagaatcgaagaacaagtgtatcccttgccaggattaagaaattcgggagcaaatcagtatgctattctggcagtgacaaagacaatgctgtgctagcccatgaagtgaatgctaggagatacagtggaagactcagctcaaattctccatgctgtgtttgtgggatctcagacctggagccttgcaatcgattaatagagtgcagcaagtgctatatcaaagtgcaccaagcctgctatggtgtactaaaagttcctaggggtcaatggttttgcagaccgtgcaagaataataccatggatacagtctgtgtgctgtgtggttatggaggtggagctatgacaagggcactgaaaaccaagaatattttgaaaagtttgctccaaggtttgatgaatttagaaaggtcagaatattatgttgattccttaggaaatgcaagcagtgagtgtacaagcttgcaaaatccagtagacagtgcacatggggataacattatgaatgcgaagaacatcaccagcaattcctggacctctggaaaatactattcgagtttacttggaccacaaccaatgcagtgggttcacatggtctgtgggctgtggacacctggcacaaaatgcccaaatgacaccacaatgagcgcttttgatgtttcaggtgcttcacctgccaagagaaatactgcatgttcaatatgtgacagaactgggggctcatttgtcaagtgccgagctgtaaattgtttggtattctttcatgcttggtgtgcacatcagaggggtttgctgcaaagtgagcctgaaggcgagcacaatgaaaatattggcttttatgggcgatgcgtgtctcacgccattgttttttctagtcacgttaatcctaagaaagaatactttagaaacaacaattggacatgtgcacgtacagagggttttaaaggccgaaagggagaaggcttttctgatagtagccataaaaaatatgaagagtacagtggcgagttcggtgtttcccaagaacagataaatgcttggttacgcataaatggttcaaagccctgcggacgaggacagaaggagtacatccattacaagcagttaaaagggtggaagcatttggttgtttacaaatctggcatacatggacttggtctctacacatcagtctttattccacgcggctctatggttgtagaatatgtgggtgaaattgttgggcaacgggttgctgacagaagagagatcgaataccagtccgggaaacggcaacaatataagagtgcatgttatttctttaagattgacagggagcatattattgatgccacccgcaaaggtgggattgcaagattcgtcaatcattcatgccagccaaactgcgttgcgaaaataatctcagtcaggaatgagaagaaggtaatgttctttgcagaacggcacataaacccaggggaggaaattacgtacgattaccacttcaaccgggaagatgaaggccagaggatcctttgcttttgtagatcaagatactgcaggcggtacctcaattagtttccggtgggcgtaacatgtctatatataacttatatatctatatgtatatcttatatatttacaaattacaattgcgattcatgcctgctgtatatgtaggaacttgcatctagaactgcctgtttatcttttgtgaagtcaaatgagttatcagctgttcatgtgacactgaataacaaaagcataaaaagtgtcactatctcgtttatgagaaatcatgcgcctaatctgaatgatggatgatccagtgatctactttggcaagaagggcttgaggtcagacttgtccacctgaagctttgttgagatggcctcgatctgctgattcctgcaaatccaagagccatccatctttgggaaacagaatatataaaaaaaaatgaccaataacagagttctttctttgtgttttccaccaggaccttcacttcagtaattccagatgaaa

SEQ ID NO: 9210 - DNA, 6183 bp, Zea Mays
atggacgttgaaatgctgccgtacgggattatttcgacgtttcattgcttgagtgtccgtacttcgccgctaaacatggcgttgttaccgtgcgtgtacatgcagatggacggcgtcactctgcgccacctgctccgccccttcgccgcgcaggaggccgcggcggccggccgagtggcagcagcgccagagcagctgttcgcaagtcattcgaccctgcaatccgggccgcctccgagagtggggccgagcaatgagttgcttactcaagttccggggaactattgcactttcgatcttgcgccggacctcactcgggcaaatgcgagcaatgctgctggtaccattgattttactcgggctggtccctccagcagtgctgccactctgcccaagtatccgagacatggattgccagctagcagtagcaatgagcagtcctcttttggagcgcttttcccgaacagaagtgctaatggaatgggtatttttacttgtcaaagttcggctaacgaaggaatagcaaatgttggtgtgcagtttcaggactcaagtgtccatggactgcagaaattgccattcaaatcgatgactcatcagcatcctacactgcctggtgatcgaatccgtgtcacctgtatgaatgttggcggagagttttttgtgggcgaagctgggctttttggagttatctgcttgtgtcatcggttgcgaatgtctgtagctaaattctgcgagcatgctggaggaattccagaaaaagctggtgaaattgtctgcttggagaatggcatgagtattgcacaatggttcaaattctgcatagggctttttctttgtcggaggatctattgctaacaccaggtgggattggccggaatgggcacatatgaaaagttctccagaagagcacatattgaaaagtcttgcatcaagaaacagtggaacaggaaaaatggggttgttaagtagatatggaaaaatcactggacatatgaacaaaccggcttattccaatgatctgtccgttgagggtggagggcacactaatgttgagaagctagtaaacaggacagatgaaacatattacagaaagagtgttgatgtgcatgaaacttttacaaagaactctgctttacttcagaattccgctgtggtgaatttagggcccgctaaaaaccatccagttcatgcattcgacttgaacccacttaccactcctagtggaagcccacactttgaagcaagcatgggaagacattacaatggaaatcatttggcccatagtcatggaatccatttggagaaaaactttgatgcgtcattttgtaatcctatgccacgttttacaggagttatgaaccatgatagtagggcgtgcagaccaaatttctccaataaaacattccaggacactttgagcaatgcttcaaacactgaattaaagcttgggcaatcttcttatcatcaatctatgactactctttccccattggggcaatcaacgatgattgaatttcagaaaccccaaacacataggcctccgataaatcaaaatccttctccaaagcaagcaacaaagatcagcaaaagtctatccgaacataatgaaccatccattagtaccggaaataagaagcaaccacttgaagttgttaatggcatgaagcgttctgaaggtgatgagcttacagatgatacatccaagaattcatttatctcattatttctttcacaccttgagaggaataatacacccgaacccatcgatgacattctcaacagtaatgagcactatcttcctaaggccctggatgttgcatgtggttctgatcatccagaaagtgccactagacagattgaaacaagggtgcctaatgataagcactcaaagttggcctcagccattgttcatacgaaaaggagatcagagggcatttctctttcagtggcttcttctggatataatcctcaagatgcatcccatgctaatagtcaggaacacttgattcatggtgattccttgtcacatttgctgcctagtcaacctaacaccggaatctcgaaaatttctgcaagggtttcatgtcatgcaaattgcatgagctgcattcacgtgggtaataaatcccatcaggttgcacatggtgagattggggttccctgtttctatgataaaatggccaggggccatggtacttttgagcgagttgatgactgcacacatagaagtttgagagctttcacaaaaatcagttgcgataatgggaaatcttgttgttcttctcgtgagcttctacctagcttttgccaaaatgatcagccaacattgggaaaatcgatttgtggatgctgttgcaaaattcaggaagatgcttccaagcttggttttatacctggtcacatgtgcagaactcatttttctagtgatgttggtccagttctagccaataagcctactattgaagggctagatgaattttgtgcttgcagttgctccacttttacacaacgatcatcattatgttctcgggaatacgtcttgcagtcttcctgtgactcatgtcccattaatggactgcactgcagaagttgtatgggacatgcagcagatagcttaacaaaacactctctgtttgatcctcttaatacaaaagaacgaggttcttgttgcaatggaagatgctgctactctgtagtcccaaaatgtttgtctagttgtgactttacaaaacactgtgatgtcataattgaccaaataggtcatgctgcacctaaagataaccatcagctgcaaatgcctaccagatgctgcacactgggggagaatgagaagttaatatgccaatgcttaagcaataaaatagctgtaagaaacttgcctcaaacttctcattgtaaagatgtctctgagaaagtaatgaaccagccttctattgctataacggagagactggagaatgtatcagaaccttcagtggctgatgacagttcatccaaagctgtagcagagaaaaaggatgcttatagagattctgcagtatctaaaggacagccaaattttggtttctcatctgggtcgtccagcattatagtgacaaagttccagaaatcacctgaatttaacaatgtatcctctactgctaaacatagcaaacataaaaatctgtgtgatgaaggatcaagaattgagaaaagttcagcatccagctatgtgcctaccagtacaggatgtgaagaacccctaaatagttctgccaaatctgagctgggtccatcaagagtgaagcgcaaatgtaatcagatttctgagggaaggagactggaagaaacagataatgaggaacattgttctgaactgctaaaaaagactagaacactgaggtgctctgttaaaggttctgaatcagatgattgtactagggctagttcccagtcgtcccagaagggggtttatcaaccacaaaatgaggttaactcattttcttgcagggtgttgagaaccaagcgaaaacatcctattatgcatctaaataagcatgtgaaacagcttcacagacagaccaagttttttgaaggtgatgagcaaccagatgccaagggcaattttcttggtggattagattcctatgatagaaagaggcaagtagaggatatgagcactctggataaaacaagacatcaccaggaagggagtcgagcatttgtccgcaaacttcctaaatatgtgtctctgaattgcattgttaatgaaccgaatactaacagtgaaggtgcttgcagtgggagtggtgggattgattctagtttaattgctacagggattacaaacgataacaggaaatctcccaaaattgttcctctcaatctggttcttaaaaaggctaagagatgcaatgctgttaaactccgtaagacagaaagcacccacttgtatgaggagaaaagctcagattgttctgtgaacagctcagattattctatagaaaagtattccgttgatgatgaaaattgcagcccacaagctgaatatgaactgcaggattccaaaaggagtaggtattcatctaatgatctgaggtcacatgtggctctccacaaaagaacatctggtgtcattggagaagatgactctcttggtctaacagatgtggaaataaattgcctgtcaatatcatcatcaagtaatggaaccaagaatcgaagaacaagtgtatcccttgccaggattaagaaattcgggagcaaatcagtatgctattctggcagtgacaaagacaatgctgtgctagcccatgaagtgaatgctaggagatacagtggaagactcagctcaaattctccatgctgtgtttgtgggatctcagacctggagccttgcaatcgattaatagagtgcagtgcaccaagcctgctatggtgtactaaaagttcctaggggtcaatggttttgcagaccgtgcaagaataataccatggatacagtctgtgtgctgtgtggttatggaggtggagctatgacaagggcactgaaaaccaagaatattttgaaaagtttgctccaaggtttgatgaatttagaaaggtcagaatattatgttgattccttaggaaatgcaagcagtgagtgtacaagcttgcaaaatccagtagacagtgcacatggggataacattatgaatgcgaagaacatcaccagcaattcctggacctctggaaaatactattcgagtttacttggaccacaaccaatgcagtgggttcacatggtctgtgggctgtggacacctggcacaaaatgcccaaatgacaccacaatgagcgcttttgatgtttcaggtgcttcacctgccaagagaaatactgcatgttcaatatgtgacagaactgggggctcatttgtcaagtgccgagctgtaaattgtttggtattctttcatgcttggtgtgcacatcagaggggtttgctgcaaagtgagcctgaaggcgagcacaatgaaaatattggcttttatgggcgatgcgtgtctcacgccattgttttttctagtcacgttaatcctaagaaagaatactttagaaacaacaattggacatgtgcacgtacagagggttttaaaggccgaaagggagaaggcttttctgatagtagccataaaaaatatgaagagtacagtggcgagttcggtgtttcccaagaacagataaatgcttggttacgcataaatggttcaaagccctgcggacgaggacagaaggagtacatccattacaagcagttaaaagggtggaagcatttggttgtttacaaatctggcatacatggacttggtctctacacatcagtctttattccacgcggctctatggttgtagaatatgtgggtgaaattgttgggcaacgggttgctgacagaagagagatcgaataccagtccgggaaacggcaacaatataagagtgcatgttatttctttaagattgacagggagcatattattgatgccacccgcaaaggtgggattgcaagattcgtcaatcattcatgccagccaaactgcgttgcgaaaataatctcagtcaggaatgagaagaaggtaatgttctttgcagaacggcacataaacccaggggaggaaattacgtacgattaccacttcaaccgggaagatgaaggccagaggatcctttgcttttgtagatcaagatactgcaggcggtacctcaattagtttccggtgggcgtaacatgtctatatataacttatatatctatatgtatatcttatatatttacaaattacaattgcgattcatgcctgctgtatatgtaggaacttgcatctagaactgcctgtttatcttttgtgaagtcaaatgagttatcagctgttcatgtgacactgaataacaaaagcataaaaagtgtcactatctcgtttatgagaaatcatgcgcctaatctgaatgatggatgatccagtgatctactttggcaagaagggcttgaggtcagacttgtccacctgaagctttgttgagatggcctcgatctgctgattcctgcaaatccaagagccatccatctttgggaaacagaatatataaaaaaaaatgaccaataacagagttctttctttgtgttttccaccaggaccttcacttcagtaattccagatgaaa

SEQ ID NO: 9211 - DNA, 6184 bp, Zea Mays
atggacgttgaaatgctgccgtacgggattatttcgacgtttcattgcttgagtgtccgtacttcgccgctaaacatggcgttgttaccgtgcgtgtacatgcagatggacggcgtcactctgcgccacctgctccgccccttcgccgcgcaggaggccgcggcggccggccgagtggcagcagcgccagagcagctgttcgcaagtcattcgaccctgcaatccgggccgcctccgagagtggggccgagcaatgagttgcttactcaagttccggggaactattgcactttcgatcttgcgccggacctcactcgggcaaatgcgagcaatgctgctggtaccattgattttactcgggctggtccctccagcagtgctgccactctgcccaagtatccgagacatggattgccagctagcagtagcaatgagcagtcctcttttggagcgcttttcccgaacagaagtgctaatggaatgggtatttttacttgtcaaagttcggctaacgaaggaatagcaaatgttggtgtgcagtttcaggactcaagtgtccatggactgcagaaattgccattcaaatcgatgactcatcagcatcctacactgcctggtgatcgaatccgtgtcacctgtatgaatgttggcggagagttttttgtgggcgaagctgggctttttggagttatctgcttgtgtcatcggttgcgaatgtctgtagctaaattctgcgagcatgctggaggaattccagaaaaagctggtgaaattgtctgcttggagaatggcatgagtattgcacaatggttcaaattctgcatagggctttttctttgtcggaggatctattgctaacaccaggtgggattggccggaatgggcacatatgaaaagttctccagaagagcacatattgaaaagtcttgcatcaagaaacagtggaacaggaaaaatggggttgttaagtagatatggaaaaatcactggacatatgaacaaaccggcttattccaatgatctgtccgttgagggtggagggcacactaatgttgagaagctagtaaacaggacagatgaaacatattacagaaagagtgttgatgtgcatgaaacttttacaaagaactctgctttacttcagaattccgctgtggtgaatttagggcccgctaaaaaccatccagttcatgcattcgacttgaacccacttaccactcctagtggaagcccacactttgaagcaagcatgggaagacattacaatggaaatcatttggcccatagtcatggaatccatttggagaaaaactttgatgcgtcattttgtaatcctatgccacgttttacaggagttatgaaccatgatagtagggcgtgcagaccaaatttctccaataaaacattccaggacactttgagcaatgcttcaaacactgaattaaagcttgggcaatcttcttatcatcaatctatgactactctttccccattggggcaatcaacgatgattgaatttcagaaaccccaaacacataggcctccgataaatcaaaatccttctccaaagcaagcaacaaagatcagcaaaagtctatccgaacataatgaaccatccattagtaccggaaataagaagcaaccacttgaagttgttaatggcatgaagcgttctgaaggtgatgagcttacagatgatacatccaagaattcatttatctcattatttctttcacaccttgagaggaataatacacccgaacccatcgatgacattctcaacagtaatgagcactatcttcctaaggccctggatgttgcatgtggttctgatcatccagaaagtgccactagacagattgaaacaagggtgcctaatgataagcactcaaagttggcctcagccattgttcatacgaaaaggagatcagagggcatttctctttcagtggcttcttctggatataatcctcaagatgcatcccatgctaatagtcaggaacacttgattcatggtgattccttgtcacatttgctgcctagtcaacctaacaccggaatctcgaaaatttctgcaagggtttcatgtcatgcaaattgcatgagctgcattcacgtgggtaataaatcccatcaggttgcacatggtgagattggggttccctgtttctatgataaaatggccaggggccatggtacttttgagcgagttgatgactgcacacatagaagtttgagagctttcacaaaaatcagttgcgataatgggaaatcttgttgttcttctcgtgagcttctacctagcttttgccaaaatgatcagccaacattgggaaaatcgatttgtggatgctgttgcaaaattcaggaagatgcttccaagcttggttttatacctggtcacatgtgcagaactcatttttctagtgatgttggtccagttctagccaataagcctactattgaagggctagatgaattttgtgcttgcagttgctccacttttacacaacgatcatcattatgttctcgggaatacgtcttgcagtcttcctgtgactcatgtcccattaatggactgcactgcagaagttgtatgggacatgcagcagatagcttaacaaaacactctctgtttgatcctcttaatacaaaagaacgaggttcttgttgcaatggaagatgctgctactctgtagtcccaaaatgtttgtctagttgtgactttacaaaacactgtgatgtcataattgaccaaataggtcatgctgcacctaaagataaccatcagctgcaaatgcctaccagatgctgcacactgggggagaatgagaagttaatatgccaatgcttaagcaataaaatagctgtaagaaacttgcctcaaacttctcattgtaaagatgtctctgagaaagtaatgaaccagccttctattgctataacggagagactggagaatgtatcagaaccttcagtggctgatgacagttcatccaaagctgtagcagagaaaaaggatgcttatagagattctgcagtatctaaaggacagccaaattttggtttctcatctgggtcgtccagcattatagtgacaaagttccagaaatcacctgaatttaacaatgtatcctctactgctaaacatagcaaacataaaaatctgtgtgatgaaggatcaagaattgagaaaagttcagcatccagctatgtgcctaccagtacaggatgtgaagaacccctaaatagttctgccaaatctgagctgggtccatcaagagtgaagcgcaaatgtaatcagatttctgagggaaggagactggaagaaacagataatgaggaacattgttctgaactgctaaaaaagactagaacactgaggtgctctgttaaaggttctgaatcagatgattgtactagggctagttcccagtcgtcccagaagggggtttatcaaccacaaaatgaggttaactcattttcttgcagggtgttgagaaccaagcgaaaacatcctattatgcatctaaataagcatgtgaaacagcttcacagacagaccaagttttttgaaggtgatgagcaaccagatgccaagggcaattttcttggtggattagattcctatgatagaaagaggcaagtagaggatatgagcactctggataaaacaagacatcaccaggaagggagtcgagcatttgtccgcaaacttcctaaatatgtgtctctgaattgcattgttaatgaaccgaatactaacagtgaaggtgcttgcagtgggagtggtgggattgattctagtttaattgctacagggattacaaacgataacaggaaatctcccaaaattgttcctctcaatctggttcttaaaaaggctaagagatgcaatgctgttaaactccgtaagacagaaagcacccacttgtatgaggagaaaagctcagattgttctgtgaacagctcagattattctatagaaaagtattccgttgatgatgaaaattgcagcccacaagctgaatatgaactgcaggattccaaaaggagtaggtattcatctaatgatctgaggtcacatgtggctctccacaaaagaacatctggtgtcattggagaagatgactctcttggtctaacagatgtggaaataaattgcctgtcaatatcatcatcaagtaatggaaccaagaatcgaagaacaagtgtatcccttgccaggattaagaaattcgggagcaaatcagtatgctattctggcagtgacaaagacaatgctgtgctagcccatgaagtgaatgctaggagatacagtggaagactcagctcaaattctccatgctgtgtttgtgggatctcagacctggagccttgcaatcgattaatagagtgcagcaagtgctatatcaaagtgcaccaagcctgctatggtgtactaaaagttcctaggggtcaatggttttgcagaccgtgcaagaataataccatggatacagtctgtgtgctgtgtggttatggaggtggagctatgacaagggcactgaaaaccaagaatattttgaaaagtttgctccaaggtttgatgaatttagaaaggtcagaatattatgttgattccttaggaaatgcaagcagtgagtgtacaagcttgcaaaatccagtagacagtgcacatggggataacattatgaatgcgaagaacatcaccagcaattcctggacctctggaaaatactattcgagtttacttggaccacaaccaatgcagtgggttcacatggtctgtgggctgtggacacctggcacaaaatgcccaaatgacaccacaatgagcgcttttgatgtttcaggtgcttcacctgccaagagaaatactgcatgttcaatatgtgacagaactgggggctcatttgtcaagtgccgagctgtaaattgtttggtattctttcatgcttggtgtgcacatcagaggggtttgctgcaaagtgagcctgaaggcgagcacaatgaaaatattggcttttatgggcgatgcgtgtctcacgccattgttttttctagtcacgttaatcctaagaaagaatactttagaaacaacaattggacatgtgcacgtacagagggttttaaaggccgaaagggagaaggcttttctgatagtagccataaaaaatatgaagagtacagtggcgagttcggtgtttcccaagaacagataaatgcttggttacgcataaatggttcaaagccctgcggacgaggacagaaggagtacatccattacaagcagttaaaagggtggaagcatttggttgtttacaaatctggcatacatggacttggtctctacacatcagtctttattccacgcggctctatggttgtagaatatgtgggtgaaattgttgggcaacgggttgctgacagaagagagatcgaataccagtccgggaaacggcaacaatataagagtgcatgttatttctttaagattgacagggagcatattattgatgccacccgcaaaggtgggattgcaagattcgtcaatcattcatgccagccaaactgcgttgcgaaaataatctcagtcaggaatgagaagaagaacggcacataaacccaggggaggaaattacgtacgattaccacttcaaccgggaagatgaaggccagaggatcctttgcttttgtagatcaagatactgcaggcggtacctcaattagtttccggtgggcgtaacatgtctatatataacttatatatctatatgtatatcttatatatttacaaattacaattgcgattcatgcctgctgtatatgtaggaacttgcatctagaactgcctgtttatcttttgtgaagtcaaatgagttatcagctgttcatgtgacactgaataacaaaagcataaaaagtgtcactatctcgtttatgagaaatcatgcgcctaatctgaatgatggatgatccagtgatctactttggcaagaagggcttgaggtcagacttgtccacctgaagctttgttgagatggcctcgatctgctgattcctgcaaatccaagagccatccatctttgggaaacagaatatataaaaaaaaatgaccaataacagagttctttctttgtgttttccaccaggaccttcacttcagtaattccagatgaaa

SEQ ID NO: 9212 - DNA, 1168 bp, Zea Mays
caacgctcaacagcagtgatacggtgctgcacgggtcctcatctgtatgactgtatcacatatgcatacgattctgtccgcatcaacgctcaaaggcacatgcgggctgcggcatggtgtgaggggtggggatgaagtggaggcaggaaggtggcgcgtccagcggattggccttgggcatcatggtcaggttacaacaacaattaacaaccttatccttggtcgagtatattgccatcaccatggcacaatgaacataagtgggaatagacgatattcatgcaaactgacgtttaaagagcagtctttccttgatcggaatcctcgccaggagttgtcaacgatgctgatggaagcaaggtcgcaacattgatggggaagtgggatgaaagtatgcattatatcatcaacaatgatgcctccaagaccaactcccatggttcacatgagggttctggtgccactttgctatgggagaaaaacgagcctccagtcaatcccactcgctacaacttgtccacatttgcaataacattaaatgagttaacaccagagctcaaggagaagctgccaccaacggattcaaggctgagaccagatcaacgtcacctggagaatggggagtacgagaaggccaatgctgaaaaactgcgtctcgagacacggcagcggatggcaaggaagatgcaggagagtggctggaaaccaagatggttccaaagggacagcgaggatgggacataccgctacgtcggaggctactgggaggcaagggagcagagaacatgggttggctgcaatgacatatttggtaacttgtctagcagcccaaagctgccgccatccggtctcaacactagctcaagtatatagaggagctgacatcgcattaatcacttgggtttagctgtgagctaacatcacttgtggtacactgaatcatttgtcacattgaagccaaggacattcaagcttaacccaagcttttgtcgatactagaaagaacacgagaaatattgccaaaactattgttaaaagaattctttatgatatcattttcttctgcattgcacaaggacgttttgcatgtttggtgcttgtgttgtttgtctcgttggtgatgctgctcaaggttgttcaagaactagagcatcaggctgggcttcat

SEQ ID NO: 9213 - DNA, 1410 bp, Zea Mays
ttcttaatgcctttttctctcattttgagatctcgtttcccttttacctgttgggtggcttattgcagcatggatccatccaatgataaataggaaataggttccaaccgagtgatcgcgccgacttatctgtcctcatgtctaaaccaaggcctaggactcttggagattctacttcttaagcaacccatacaagataattgcctagtactcaagactttggaaatttgccgattgtacgaactggagaatgttagtacaatcatcatgaagattgctggcatttatcgttggaagcatggacgaaaaggaactggtgtatactggttccagcaagctcgtgataaagtttgtcttgatagaattgctcaacagttattcgaacacattgggaagtcagtgacagacgatagttttaagcaatgggaagggctgctcgagctccttggttctgacattggtagtgcaggcggtcttgagttccttcacaggtaccgggatttcaagaggtctctgcaacaagctctagacagaaggtgtggtgaggctgctcgacaaactgtggattttttaatacagcttatgaaaaacccatccacacctcaacgtttctggctaccccttctacatgattcggtggagctacttaatagcaaactcagccctcttatggatgttgctgagacgacattgttgctcaacaagctgcaagagctgtcaatggccaagctgcgccctgatttttccagtaatcacctaccaagccatgcgatgagctctgtgagattggctctggcatcaaatctggcacgtgccgttcttgaagaccgtagtccaagcacactttagcacaggagtatgacgtccagtttgctggtggattgtgaccatgtttgcttggggcctcctgacaattcaaatgatcgggtttgagaaagattgaccatgtaacatacattgtactctgcttgcttgcttagtgcatttgtgtcgcgaatgcatgcatcatgctgagcgctgtggtttgaaggaaagaaataaaggatcgacatgttgcttgaaaacatctcttcacgggagcgttttcttgaaaaagaatataacaaaatggcctgaccagtcgattgcttttctccgtttgcaaacagtataagagcaacttcaagaggctctctatattatttctaatatatataaatatatatttaaaaaaaatacttttcaacaacttatctaaatatagccatattctattctggatttctcctagtcaaatatatagaatgtgaatgtgtctctagagtgtacacaagatatagaaacacggttagagattaaaaaaatatagaaaatggtttttatgtaaatgattctaaatgataatttatagtatgtttggtttaaagaatg

SEQ ID NO: 9214 - DNA, 736 bp, Zea Mays
atgattgatcccatgatgtcagacaaacaccctgttaaagcaatgtgtgacatccgtgatttggggttattttatgttgtattttcttttcctgacaaatccaaccctcctgtttttgacaagtgtgattggcactgtgtttcacatattgaagcagcttgggatcttgcatattctattgcatctgtgtgttcggcgatggttctgatcccaagtcacagatccattggtaagccatctacagaaaatgtgctaaccgtgctggcaagaggaaggagcaagcactactattccaaaaagggtctggtagtgacagtgttgttacttacccagttctacacaaaattagaggagaaacataaagctttggaagcaaagaaggacaaggctgatgccaggaaaaaggagttgcattcatgaaacatttgatccatctacatgcatatcaaccgccagatgagacgcaacatgttctaaagattgaggctcattctggtggcctaaatgatatagcagtctctcgaccaaataagcaaccttttgatgtcacctgggagatgataaactgattaagaaattatttacactcgaaggacacaaggtgactgtgtattctatatcccagtgtaatctttattctaaacaagatcgatgttattacaatgaatcagaattgctgaatcaagagtttgtataacctataaacttttatgaattgctgatttttttttctgag

SEQ ID NO: 9215 - DNA, 3001 bp, Zea Mays
cggttcctgtgcgccgccgccctgtcgagcctgccggtgccgcgagcatcgactcatcccgttccaaatcgacccaaacccattgcagaccaacacacaatatggcaagtgcggtgccgcgcgccctgcgcatgtcccacgcgcaattcatcgagcaccttcgctgcgcggcctcgtccgaccgcacccctcgcaccggcgaggctcttcacggctgggcgctcaagtccggcgcagcctcccacgcgcctgtctccaactctctcatcaccttctactgttccctcccgcggcctctactcggcgcagcctacgtcgtcttcgccgacatccccgccgccttgcgcgacgtcgcctcgtggaactccctcctcaacccgctctcccgccaccaccccgtctccgcgctctcccatttccgctccatgatgtcctcccccgaggccgttctcccctcgccgcactccttcgctgccgcgttcactgccgccgcccgtgtgccctctgcgtccgctggcgccgtcacgcacgcgctcgcgtgcaagctgccatcctcctgcggctccaataatgtcttcgtctcgaccgcccttctaaacatgtactgcaagctgggagctgtttctgatgccaagagagtgtttgatggaatgctacatcgcaatgcagtgtcctgggctgccatggtgtcaggttatgccactgggaagtgttctgaggaggcctttgagctcttccggctgatgcttcagaagtgcccattggagaaaaatgagtttgtaaccacagcagttcttagcgcagttagcgtgccactgggtttgcttatggggacgcagttgcatgggctggtattaaaggatggtttggtgggatttgtgtctgttgagaattcgcttgtcacaatgtatgcaaaggctgagtgtatggatgcagcaatgagggtgtttgggtcatctaaggagaggaactccatcacatggtcagcaatgatcacagggtatgctcagaatggagaagccaattgtgcagctaggatgttcctacagatgcattcgtcaggatttacgccaactgaattcacctttgttggggtactgaacgcatgcagtgacatgggcgcattagtggttgggaagcagacacattgtttgatggtgaagcttgggtttgaaacgcaggtttatgtgaagagtgcactggtggacatgtatgccaagtgtggttgtattggtgatgcaaaagatgggtttcatcaattatatgatgttgatgatgttgtcctttggacagcaatgattaccggacatgtgcagaatggggagcatgaggaagccctgatgttgtattccaggatggacaaacagggcattatacccagttatttaactgtaactagtgtacttagagcctgtgcatgccttgcagcactggaccttgggaagcaattgcatgcacaaatattgaagtgtagatttagcttggggggttctgttggaacagctctgtccactatgtattcgaagtgtggaaaccttgaagatagcatggttgtcttcagaaggatgcctgatagggatgttatttcatggaactcaattatttctgttttttcacaacatgggcgtggaagtgatgcacttgacatgtttgaggagatgaagctagagggaacggcaccagatcatataacattcattaatttgctatctgcttgtagccacatgggcttagttgacagaggctggttttattttagggcaatgaccaaagactataatttaattcctacacttgatcactatgcttgcatggttgatattcttagccgtgcaggccagttaaaagaagcaaaggacttcatagattcgataactattgaccatggtacatgcctatggcgtatagtcctaggggcatgtcgcagtttacgtgattttgatgttggagcatatgcaggtgagcagctgatggagttaggtactgaggactcatctgcttatatactgttatcaaacatctatgctgcccagcggaagtggaatgatgttgagcgggtgagacatttgatgagactccgaggtgttagcaaagatctggggtgtagctgggttgagctctacaaccgagttcatgtgtttgttgttggggaacaacaacatcctgaagcggaaaatataaatgtagagttgataaggctagcgaagcatatgaaggacgaagagtgtttcctgtttgatgacgaaaaggatgaactaggagattctcatgaaggtgaacaaatggaattgatatcaacaacatattactgagttcgcaagagattgatcccatgatgtcagacaaacaccctgttaaagcaatgtgtgacatccgtgatttggggttattttatgttgtattttcttttcctgacaaatccaaccctcctgtttttgacaagtgtgattggcactgtgtttcacatattgaagcagcttgggatcttgcatattctattgcatctgtgtgttcggcgatggttctgatcccaagtcacagatccattggtaagccatctacagaaaatgtgctaaccgtgctggcaagaggaaggagttctacacaaaattagaggagaaacataaagctttggaagcaaagaaggacaaggctgatgccaggaaaaaggagttgcattcatgaaacatttgatccatctacatgcatatcaaccgccagatgagacgcaacatgttctaaagattgaggctcattctggtggcctaaatgatatagcagtctctcgaccaaataagcaaccttttgatgtcacctgggagatgataaactgattaagaaattatttacactcgaaggacacaaggtgactgtgtattctatatcccagtgtaatctttattctaaacaagatcgatgttattacaatgaatcagaattgctgaatcaagagtttgtataacctataaacttttatgaattgctgatttttttttctgag

SEQ ID NO: 9216 - DNA, 2550 bp, Zea Mays
gaggccccatgccgaagccaccagcgaaatgaacggaagaagagagcggagggaacaactgccgcacggcacggagacagacgcggacagaccgagcgattggtcggcgaccacctcacctccgccgccatccactcctcggctcgggctccacgcaatgttactcgttaccatcattagctgttgatgggcatatgaacgatgtccacatctcgtcagatagatgatgggcctgctgtactacagttatgcagatggacattgctacaaccccatctcaaactatcaaaatttcgagaggcttttatatctccaacaaggcgtctttttggactgctctcagaccatggggatcttgtcctggcaactgctgagatcaactcatcacaagttgaatctcatagagctctatcggatacctgtactcaggcagtcttcaaaacgttttctactattccccgagtgaagtctttagcatggggatactgttctgatgcttttgatgactcaagttttaatgaaattctagtggtatcaagtgatgcttctatcacagtccatgcattctgccattctcgcaaaagcacactaacagttaattcaatgtctgatgctaaagagttgcatggggagtggaaagagtggcgccctactgaatgttcagtgttggaggatggtgagtcaggtccagaaaattggttttgttctttcctaactacagtcactgcgtctgtttctaatggaaaataccaagccagattgcccatgaaatctttattgcctaattcagcagaagttgtatcctttagcatatatgacattactctctctttcttgaaatattggtatagcaaatgttctctgaagactatggcggaaactgacagtgaatcaccacgacgttttcttagagcatcgtgcagttgtcagtgggagtgtctaaaagttttgtctagctcgtcatgttatttgatcggcttagttctgactcctaatgaatcagtacgttgtgaggcccatccatccaatgcggagtgtattttggttactgttctggagctaaaccactggggcatacagtggaactttgtggcagaccttcaggatgtatctgatggtattacgccaagtccaaaatgggttgattttcagttatcagatgtgtttcttgcctgccttaatacagcaggttttgttgccatttggaacgtgaaaactggtggtcttgtgacgtcattcagtgttcttcaacaatgcagaactgatctggagatgcctctgaggagctctatgtccattgtgacaaatttggacgagggaaatatccatgttgagaactttgttggcagaatgtttaagcggttagttttggcatcatattcttatcttcttgctgttgtagatgaggttggagtagtgtatgtgttctatgcggatgacatcttaaacttcaaagctaatgtgcacgaaaactttgatctgcctgttatgaatcagtttgctgattgtttttctatctgggaagctgctggtcatgagataggaagtctatcattttgtgctaatcagtccatacaacaagggtcacttagtctaaccaaattggttcctgagttctcagggaaaagcgatgatattgtcaggcctagagaaagaagaaaatatagatgcgatgaaaatgaagtggacagctggccaagtggctttgtcactgcagggcagatgaaagttggggcaggttatcgtcgcacaaattcctcttgtttctttaggaggataattcttcctccatgcagatcacagcaggatgtaattagcctgtgtccacttggactaactagaatttttaaaggttctattgcggatggaaacgagcatgtcaaaatttttcattccgagttgcttatgtattcatcttttcttggcaaaggagatattgatattggttttatggacgaaatgcttccatttaaaaaggattccacttttgtcggagattctgttgtttgctcctgccagggatatttgtatttaattacccagtatggcctttctgtggtccttcctccagtttctatatcatccttttcatctcaatgtgacgctatcaaattctggcaaatgggtcctgctgctggtagcacatgcaatgctctgaacttactatctgttgacaaatcagacacaagctggaaaacctggcaaatagaagtcctggatagagctttgttgtatgaaggtcccgcactagcagacaggctctgttgggagaatggatgggatttgaaattctctaggttacgttggctgcaattagcccttcattactcaatgattggtgatctagagcagtcactgaatttactcgctgaggttaatcttgcggaagaaggtgtattgcaactgctattggcatctattcataggttatctagtaggactggaagtgataatgaagccacagtgtcatccaagtctggaaactggtgcattgtagaaacttgctagcagcctgagtcatagaggaatggctatggaagttgaatgcat

SEQ ID NO: 9217 - DNA, 2868 bp, Zea Mays
atgaggaccggcggcggcggcgcggtctggggcgggggagagagcagcgccttgggaggtccctgctcttgcgcgtgggaatgcagagggggcgagctcggctggcttcagatcccgacgacgctcggccatgacgagggagcagaggagggcgcaggatgggatttgaaattctctaggttacgttggctgcaattagcccttcattactcaatgattggtgatctagagcagtcactgaatttactcgctgaggttaatcttgcggaagaaggtgtattgcaactgctattggcatctattcataggttatctagtaggactggaagtgataatgaagccacagtgtcatccaagttaatggttttagctgttcgctttgcaacaagaatgataaaatgttacgggttacagaagcaaaccacagacaataattcagtaaagcttcatgaaatggctctccttttgatggcaataagaagtatccagagccgagtctctgcaaagaatcagaattctgtttggatgggagatgataagagctcattgaaaataggtacagaagtatttcagcatgattcttcagttccagttgttgtactggatggtgtttcatcagggccatcgggtgggttagatactcatgacaggcaagagttggttcctgtgtgtgttcctgatagcaacagcatgttagctctaacaccagttgggtcatctcttagtgcttcaacttttcatgatattgatactaataaaaggactacccaagttggaagtcaaaattttcaaggaaatatcaaggagatgattaacagatgggaaatgaataactttgacttaaaaattgtagtcagagaagcactgcagtctggtcgcctacctttggcagttcttcagttgcagcttttgcgccagagggaattagtttccaatgattattctgaagatgctttctctgaagttcatgaaattggaaggtccattgtgtatgacctgttgatgaagggtgaaactggattggctgtagcaacactagaaaggctaggaaatgatgtagagtcggacctaagacaacttatgcaaggtactgtcaggaggtcactaaggctacaaattgctgacgagatgaagaagcgtgggtacataacaccagatgactggaagatgctagaaactataacactaattgagcgtctctaccctagcagcagcttctggaacacatacttttacagggagaatgtcattcgtgatgctgcaaaaattgttacactgccaggagacgataaacctgtattggctctaaatattcgcaaccaccccattattgaatgtggtgatgttgacggagcagtgcttggttcttgggtgaacattaatgattgcactaaggagttttctgggagcaacatttctgatggttattgggcctgtgctgctgtgtggtcggatgcttggggtccgagaactgtggaccgtatattgctggaccagccttatcatgtacatgctcatgtcccatgggaatctcagtttgaatattttgttgctcataatgatgtggggaaagtctgcgaactcctggacatgattcccaatagcatactttcagaagggattattagagtaaacgtgaacagtttacaagctcctgccaacactctttctgatttaacagtccctgattacaacatgtacatatgtgactcagaagagcttgaacctttctgtgtggagataccacatgttaaagtatttagatctttgtggaatcatgagtcaacattatatattcgaatggtaatgcagcaggaattggcaaagagacacatctttatgaaagagtattggcaaagtactactgaaattatacctttgcttgctcgtgctggcatacttataaaggttggtctaaaggaagaatgttctacaatattttctgcttcagagattccagatgatgcccatcaccagggccgtgaaggcgcactgcataagctaatcatacgtttctgtgtgcaatataacttgccatatctactggacctctatctggacacctgtaatttgactcctgataaggattgtatccgtttactcaaagaaaacacaggtgattgcaagtgggcacaatggttactcttctccaggatcaaaggttatgagtatgaggcatcattctctaatgcacgttggaatttgtcaaagaaaatggtcaataatagtaatcctacggctgttgagatagatgaaatgttgtatacagtagatgatatggcagaacgaattggtgaaatgtctgcattagctaccttgatgtatgcttcagcaccaattcagaaatccatatgtactggaagtgtgaacagaagtggttcgtcttcccagtgcacattggagaacctggctccttgtctccagcaatttccaacactatggaaaacccttttttcagcttgttttggccaagatgaatatgggtgtttaaactactctgctgcgtatggaaaaagatcaatttcagagtacttgagatggcgctatagcgttttttcctctgctggaggagacacttcgttgttgcaaatgcttccatgttgggtcccaaagtctgttagaagattaattcaactatttgaacagagtgttacgtttctggattaccatgtggattttggggagagaattaggagagcaggaggggggtggctgcttgaggatgtctggcactctggtgccttagggctgaaggtaccattgggagtggcagccaggaggcctacacccaagccagtggtagaaaagatgtgctatgcctttgatcagtggcgtagacaacaattttcaccttggtattcattgtaa

SEQ ID NO: 9218 - DNA, 9106 bp, Zea Mays
atgaggaccggcggcggcggcgcggtctggggcgggggagagagcagcgccttgggaggtccctgctcttgcgcgtgggaatgcagagggggcgagctcggctggcttcagatcccgacgacgctcggccatgacgagggagcagaggagggcgcaggatgggatttgaaattctctaggttacgttggctgcaattagcccttcattactcaatgattggtgatctagagcagtcactgaatttactcgctgaggttaatcttgcggaagaaggtgtattgcaactgctattggcatctattcataggttatctagtaggactggaagtgataatgaagccacagtgtcatccaagttaatggttttagctgttcgctttgcaacaagaatgataaaatgttacgggttacagaagcaaaccacagacaataattcagtaaagcttcatgaaatggctctccttttgatggcaataagaagtatccagagccgagtctctgcaaagaatcagaattctgtttggatgggagatgataagagctcattgaaaataggtacagaagtatttcagcatgattcttcagttccagttgttgtactggatggtgtttcatcagggccatcgggtgggttagatactcatgacaggcaagagttggttcctgtgtgtgttcctgatagcaacagcatgttagctctaacaccagttgggtcatctcttagtgcttcaacttttcatgatattgatactaataaaaggactacccaagttggaagtcaaaattttcaaggaaatatcaaggagatgattaacagatgggaaatgaataactttgacttaaaaattgtagtcagagaagcactgcagtctggtcgcctacctttggcagttcttcagttgcagcttttgcgccagagggaattagtttccaatgattattctgaagatgctttctctgaagttcatgaaattggaaggtccattgtgtatgacctgttgatgaagggtgaaactggattggctgtagcaacactagaaaggctaggaaatgatgtagagtcggacctaagacaacttatgcaaggtactgtcaggaggtcactaaggctacaaattgctgacgagatgaagaagcgtgggtacataacaccagatgactggaagatgctagaaactataacactaattgagcgtctctaccctagcagcagcttctggaacacatacttttacagggagaatgtcattcgtgatgctgcaaaaattgttacactgccaggagacgataaacctgtattggctctaaatattcgcaaccaccccattattgaatgtggtgatgttgacggagcagtgcttggttcttgggtgaacattaatgattgcactaaggagttttctgggagcaacatttctgatggttattgggcctgtgctgctgtgtggtcggatgcttggggtccgagaactgtggaccgtatattgctggaccagccttatcatgtacatgctcatgtcccatgggaatctcagtttgaatattttgttgctcataatgatgtggggaaagtctgcgaactcctggacatgattcccaatagcatactttcagaagggattattagagtaaacgtgaacagtttacaagctcctgccaacactctttctgatttaacagtccctgattacaacatgtacatatgtgactcagaagagcttgaacctttctgtgtggagataccacatgttaaagtatttagatctttgtggaatcatgagtcaacattatatattcgaatggtaatgcagcaggaattggcaaagagacacatctttatgaaagagtattggcaaagtactactgaaattatacctttgcttgctcgtgctggcatacttataaaggttggtctaaaggaagaatgttctacaatattttctgcttcagagattccagatgatgcccatcaccagggccgtgaaggcgcactgcataagctaatcatacgtttctgtgtgcaatataacttgccatatctactggacctctatctggacacctgtaatttgactcctgataaggattgtatccgtttactcaaagaaaacacaggtgattgcaagtgggcacaatggttactcttctccaggatcaaaggttatgagtatgaggcatcattctctaatgcacgttggaatttgtcaaagaaaatggtcaataatagtaatcctacggctgttgagatagatgaaatgttgtatacagtagatgatatggcagaacgaattggtgaaatgtctgcattagctaccttgatgtatgcttcagcaccaattcagaaatccatatgtactggaagtgtgaacagaagtggttcgtcttcccagtgcacattggagaacctggctccttgtctccagcaatttccaacactatggaaaacccttttttcagcttgttttggccaagatgaatatgggtgtttaaactactctgctgcgtatggaaaaagatcaatttcagagtacttgagatggcgctatagcgttttttcctctgctggaggagacacttcgttgttgcaaatgcttccatgttgggtcccaaagtctgttagaagattaattcaactatttgaacagggcccttttggaatgcaacttctatcaactgccccatcatctgaagagttattcactcacggtgtctccaattatatatacaattctactggatataccgaagccaatgcactgtccttagaagcatcgatccaaaaaagtgttgaagaagaattatattcttcccttgaggagaaagatgtgagagtggaacaccatttgcaccgtggtcgagccttagctgctttcaggcatcttattgctaagagggcttcacagttgaaatcagctagtgcacgtcaagtgatatccgcacagtctaatgttcaagcagatgtacaattgatacttgctcctctaagtcaagttgaacgatcaattcttatatcggtggctccactagctattacaaactttgaggactcgactctagttgcttcctgtatattcttgttggaactttgtggcctgtgtgccaacatgcttcgtttagatattgctgcactacgacgcatctcttcctactacaagtcagttcaagaaaataaacatgttgatctatctccaccaaggggcccagagctccatgtgcagtcccatggagctggtatagctcctgctctagctcgagcgctagctgaagattatgtccagtctgatcatctgcatgttttggagcagactcaaacctcgatggctcccaagcgggaacagacacaatatcctcttatttctattctgcaacaccttgaaaaagcaagtttgccatcattggaggaaggtaaaacttgtgggttttggcttttgactggtgttggtgatgcatctctttaccggtcgcaacagaatgaagcaagtcaacactggaatttggttactgaattctgtcaggcacactatctcccactaagtacaaaatatcttgcattactggccaatgacaatgattgggttggttttttaacagaagctcagatagctggattttctattgaagctgttattgaagtggcagccaaagagatcagggattcaagactgagggcccacatactgactgttctaaaaaatatgatatcacttcgaaggaaatcatctggtaatgtaccttcaggaagcagtgatccatctttctcttctgttgatggcaataatcccatggaacttttctgcattcttggagtctgtgaaaagcaaaaaaaccctggggaggcactcctaattaaagcaaaacaaatgcagtggtctttgcttgccatgattgcctcatgctttccggatgtaactcctctcacatgcttaagtgtttggcttgagattacagccgcaagggagatgtcctcgatcaaggtggatgatgtttccttgaaaatagcaaagaatgttggatctgctgttgaagccacaaataaattgccaagcactagcagaaatgttgaatttcgttacaataggaagaatccaaagcgaagacggttcctggaagcgtcacatgaaaagttatgtttctcaatagatagcacatgtgggccagattctgctgcaacttccaatcctatcagtattgttgaccatcagggaataggaaagccaatctcaggagaaaccataatgtccgttgatattgatgaaaggcttgcatctttatcaaacatggtagcagtgctttgcgaacaacaactgtttctaccattacttagagcttttgaaatgtttttgccttcctgctcccttctttccttcattcgttctctccaggcattttctcaaatgcgtcttcccgaggcttctgcacgtttggcatccttttcagcaagaataaaagatgaagcctctcatactcaactaaactcttccaaagaagtgtcagtaatagcagaatgggtggccactacagctgtaaaagctgcagatgctgtcctttcaaactgttcatcaatttatgagaagaggtgtctactgcagcttctttcagcagtggattttgctgatggtggcacttcatcatcttactttagccgaagatattggaagattaatctgtctgaaccatctttgtgtaaagatactgatgtgtacaactggaatgatttgatggatgatgcttctcttttaacatcattagaaaaggacggtcaatgggagcaagctcgaacttgggcaagacatctggagtcaagtggcatagcttgggaatctactcttgatcatgtcactgaatcacaggcagaagccatggttgctgaatggaaggagtttctttgggatatcccacaagaacgtgcagccttgtggggtcactgtcaatctctctttatgagatattctttccctcctttaaaggctggattatttttccttaagcatgccgaagcagtaggaaaagagataccagcacaagagcttcatgaaatattattgctctctttacaatggctaagtggaactatgactaaatcctctccggtctatcctcttcatcttttgcgggaaattgagactagggtgtggctcctggctgttgagtcagagagtcaatccaaggttgatggtgaatttgccacttctgctgttgctcataacaaagctgttggaaacagtagcagtattatagaacatactgctgatatcatcacaaaaatagacagtaacatgagcttgccgcacatgaaaattacagaaaggaatagcacacgggacagtttatcataccaacatgtgcaactctttgagtctaacagtgaagcatcttcaacaacaataaataacacgcgagcaaagcgaaggatgaaaacaaattcaccacttaaacgaggtgtcaatgacaatattgaaagtagagctaatgagctggataacaattctaacactttacatagttcaaagattggtgaacaagctagaaatttgctctctgaagaggaatttgtaaagatggaagcatctttatctggttgggaacaaaatgttaggcctgtagatatggagaaggctgtgctctctttactggaatttgggcaaataactgctgctaagcaactccaacaaaagctgtctccatcatatattcctgaagaacttgtccttgttgatgttgctttaagaattgccaaaaacagcagtaatggagagatcaatttgtcatgctttgacacacaggctcttcggatacttcagtcactgagagtagcaaatagctgcgatatgattagcccatcacaggttatggagatactagctgcgaaatgtggtgagggtcgtgggcgagctcttattaggagaataataggagttgttcgaactgctagattattgggactcccattttccgaagcatttgagaaacaaccaattgaacttctacagttgctttccctgaaagctcaggattcttttgatgaagcgaaatttctagtggagacacacatcatgcctgcatctagcattgcaagaattctagctgattcgttcctaaaggggcttttggccgcacatcgtggaggctatttggattcccaaaaggaagagggtcctgcacctctattgtggagatcaagtgacttcttaaagtgggcaaaactatgtccatcagaatcagaaattggccatgctttgatgcgtttggtaatgactggacatgaagtaccacatgcttgtgaggttgaactcctaatattgtcgcaccacttctacatgtcatcttcttgtcttgatggagtggatgttctcgtcacatttgcagcaaatagagtggactcatatgttttagaggaggatttttcttgtttagctcgtttgatcactggagtgagcaatttccattccttgagcttcattctttcaatccttgtagagaatggccaattggagttgctgcttcaaaagtattctgccactgacacagccacagggacgcttgcatcggttcgaggatttaggatggctgttattacatcactgaaacagtttatcccgaatgatgacgacgctctctctatggtatacaagcactttgacatgaagcatgaagctgcttctctccttgaatcacgtgcagagcaatacatgaacagctggttatcacgatatgataaggaacggcgaaatgatgagcttctggacgctatgcatcatcttgtagagacagctgaggttctttcaactattgatgctggccaaagaacacatcgtgcttgtgcccgtgcttctcttctgtcacttcagatccgaataccagatcttttgtggattggtctttctgagaccaatgcccggcggatttttgtggaacaatctaggttccaggaagctcttattgttgctgaagcatacaacataaatcaacctatagaatgggccccagtcttttggaatcaaatgctaaaaccggatctaatcgagcaattcgtggctgagtttgtctcagtgctgcccctgcagccaccaatgcttctcgagcttgcaaggttttacagggcggaggttgcagccaggggggagcagtcacacttctctgtctggctttcacctggaggcttgcctgcagagtgggtgaaacatcttggtagatccttcaggagcctgctgcgtagaacaagggacatgaggctgaggctgcagttggcaactctggcgacaggcttcattgacgtccttgttatttgcaatagagttttggacaaagtcccggacaatgctggcccgctgatcctaaggaagggacatggtggagcataccttcctctcatgtagatatttcccttctctttttggtgcattggattcagaacttaattcttggcagttaggctatatattgaaaggcagatgaatcttgcaaatattatatgtatcagctttctttggttcagcatctttaaagtcaagcttggctgcagtcttggacatggattctcatcgatgatgccatgaaagacttttgtgattgtatgtgcagcattttgagcggaaaagctggcagaaatgggatttttgcagcttcatccggcaggtgttttcgcacccatgatatattgtatgttttgcatgtacgaagatccgccccgtatttgttttcctcttttttttttggttttgcaagtgtcatgtaggtcgatttgctgtctgtgatttggactgcaagtctgcaaccagacggcagatgcgtcgagacgtcgagtgtccagtccagcgaaagcgtaaatacaaagcacatggacgttaaccagacggcagatagcctttgtttgttgttctactggtaatgttcttattttctaaccatggttttacaacccaggggatcttgtcctggcaactgctgagatcaactcatcacaagttgaatctcagagctctatcggatacctgtactcaggcagtcttcaaaacgttttctactattccccgagtgaagtctttagcatggggatactgttctgatgcttttgatgactcaagttttaatgaaattctagtggtatcaagtgatgcttctatcacagtccatgcattctgccattctcgcaaaagcacactaacagttaattcaatgtctgatgctaaagagttgcatggggagtggaaagagtggcgccctactgaatgttcagtgttggaggatgcaaatgttctctgaagactatggcggaaactgacagtgaatcaccacgacgttttcttagagcatcgtgcagttgtcagtgggagtgtctaaaagttttgtctagctcgtcatgttatttgatcggcttagttctgactcctaatgaatcagtacgttgtgaggcccatccatccaatgcggagtgtattttggttactgttctggagctaaaccactggggcatacagtggaactttgtggcagaccttcaggatgtatctgatggtattacgccaagtccaaaatgggttgattttcagttatcagatgtgtttcttgcctgccttaatacagcaggttttgttgccatttggaacgtgaaaactggtggtcttgtgacgtcattcagtgttcttcaacaatgcagaactgatctggagatgcctctgaggagctctatgtccattgtgacaaatttggacgagggaaatatccatgttgagaactttgttggcagaatgtttaagcggttagttttggcatcatattcttatcttcttgctgttgtagatgaggttggagtagtgtatgtgttctatgcggatgacatcttaaacttcaaagctaatgtgcacgaaaactttgatctgcctgttatgaatcagtttgctgattgtttttctatctgggaagctgctggtcatgagataggaagtctatcattttgtgctaatcagtccatacaacaagggtcacttagggggtgtttggtttctaaggactaatgtttagtcactatgttttattccattttagttccaaaattgccaaatatagaaactaaaattttattttagtttctatatttaacaattt

SEQ ID NO: 9219 - DNA, 11109 bp, Zea Mays
cggagggaacaactgccgcacggcacggagacagacgcggacagaccgagcgattggtcggcgaccacctcacctccgccgccatccactcctcggctcgggctccacgcaatgttactcgttaccatcattagctgttgatgggcatatgaacgatgtccacatctcgtcagatagatgatgggcctgctgtactacagttatgcagatggacattgctacaaccccatctcaaactatcaaaatttcgagaggcttttatatctccaacaaggcgtctttttggactgctctcagaccatggggatcttgtcctggcaactgctgagatcaactcatcacaagttgaatctcatagagctctatcggatacctgtactcaggcagtcttcaaaacgttttctactattccccgagtgaagtctttagcatggggatactgttctgatgcttttgatgactcaagttttaatgaaattctagtggtatcaagtgatgcttctatcacagtccatgcattctgccattctcgcaaaagcacactaacagttaattcaatgtctgatgctaaagagttgcatggggagtggaaagagtggcgccctactgaatgttcagtgttggaggatggtgagtcaggtccagaaaattggttttgttctttcctaactacagtcactgcgtctgtttctaatggaaaataccaagccagattgcccatgaaatctttattgcctaattcagcagaagttgtatcctttagcatatatgacattactctctctttcttgaaatattggtatagcaaatgttctctgaagactatggcggaaactgacagtgaatcaccacgacgttttcttagagcatcgtgcagttgtcagtgggagtgtctaaaagttttgtctagctcgtcatgttatttgatcggcttagttctgactcctaatgaatcagtacgttgtgaggcccatccatccaatgcggagtgtattttggttactgttctggagctaaaccactggggcatacagtggaactttgtggcagaccttcaggatgtatctgatggtattacgccaagtccaaaatgggttgattttcagttatcagatgtgtttcttgcctgccttaatacagcaggttttgttgccatttggaacgtgaaaactggtggtcttgtgacgtcattcagtgttcttcaacaatgcagaactgatctggagatgcctctgaggagctctatgtccattgtgacaaatttggacgagggaaatatccatgttgagaactttgttggcagaatgtttaagcggttagttttggcatcatattcttatcttcttgctgttgtagatgaggttggagtagtgtatgtgttctatgcggatgacatcttaaacttcaaagctaatgtgcacgaaaactttgatctgcctgttatgaatcagtttgctgattgtttttctatctgggaagctgctggtcatgagataggaagtctatcattttgtgctaatcagtccatacaacaagggtcacttagtctaaccaaattggttcctgagttctcagggaaaagcgatgatattgtcaggcctagagaaagaagaaaatatagatgcgatgaaaatgaagtggacagctggccaagtggctttgtcactgcagggcagatgaaagttggggcaggttatcgtcgcacaaattcctcttgtttctttaggaggataattcttcctccatgcagatcacagcaggatgtaattagcctgtgtccacttggactaactagaatttttaaaggttctattgcggatggaaacgagcatgtcaaaatttttcattccgagttgcttatgtattcatcttttcttggcaaaggagatattgatattggttttatggacgaaatgcttccatttaaaaaggattccacttttgtcggagattctgttgtttgctcctgccagggatatttgtatttaattacccagtatggcctttctgtggtccttcctccagtttctatatcatccttttcatctcaatgtgacgctatcaaattctggcaaatgggtcctgctgctggtagcacatgcaatgctctgaacttactatctgttgacaaatcagacacaagctggaaaacctggcaaatagaagtcctggatagagctttgttgtatgaaggtcccgcactagcagacaggctctgttgggagaatggatgggatttgaaattctctaggttacgttggctgcaattagcccttcattactcaatgattggtgatctagagcagtcactgaatttactcgctgaggttaatcttgcggaagaaggtgtattgcaactgctattggcatctattcataggttatctagtaggactggaagtgataatgaagccacagtgtcatccaagttaatggttttagctgttcgctttgcaacaagaatgataaaatgttacgggttacagaagcaaaccacagacaataattcagtaaagcttcatgaaatggctctccttttgatggcaataagaagtatccagagccgagtctctgcaaagaatcagaattctgtttggatgcagggagatgataagagctcattgaaaataggtacagaagtatttcagcatgattcttcagttccagttgttgtactggatggtgtttcatcagggccatcgggtgggttagatactcatgacaggcaagagttggttcctgtgtgtgttcctgatagcaacagcatgttagctctaacaccagttgggtcatctcttagtgcttcaacttttcatgatattgatactaataaaaggactacccaagttggaagtcaaaattttcaaggaaatatcaaggagatgattaacagatgggaaatgaataactttgacttaaaaattgtagtcagagaagcactgcagtctggtcgcctacctttggcagttcttcagttgcagcttttgcgccagagggaattagtttccaatgattattctgaagatgctttctctgaagttcatgaaattggaaggtccattgtgtatgacctgttgatgaagggtgaaactggattggctgtagcaacactagaaaggctaggaaatgatgtagagtcggacctaagacaacttatgcaaggtactgtcaggaggtcactaaggctacaaattgctgacgagatgaagaagcgtgggtacataacaccagatgactggaagatgctagaaactataacactaattgagcgtctctaccctagcagcagcttctggaacacatacttttacagggagaatgtcattcgtgatgctgcaaaaattgttacactgccaggagacgataaacctgtattggctctaaatattcgcaaccaccccattattgaatgtggtgatgttgacggagcagtgcttggttcttgggtgaacattaatgattgcactaaggagttttctgggagcaacatttctgatggttattgggcctgtgctgctgtgtggtcggatgcttggggtccgagaactgtggaccgtatattgctggaccagccttatcatgtacatgctcatgtcccatgggaatctcagtttgaatattttgttgctcataatgatgtggggaaagtctgcgaactcctggacatgattcccaatagcatactttcagaagggattattagagtaaacgtgaacagtttacaagctcctgccaacactctttctgatttaacagtccctgattacaacatgtacatatgtgactcagaagagcttgaacctttctgtgtggagataccacatgttaaagtatttagatctttgtggaatcatgagtcaacattatatattcgaatggtaatgcagcaggaattggcaaagagacacatctttatgaaagagtattggcaaagtactactgaaattatacctttgcttgctcgtgctggcatacttataaaggttggtctaaaggaagaatgttctacaatattttctgcttcagagattccagatgatgcccatcaccagggccgtgaaggcgcactgcataagctaatcatacgtttctgtgtgcaatataacttgccatatctactggacctctatctggacacctgtaatttgactcctgataaggattgtatccgtttactcaaagaaaacacaggtgattgcaagtgggcacaatggttactcttctccaggatcaaaggttatgagtatgaggcatcattctctaatgcacgttggaatttgtcaaagaaaatggtcaataatagtaatcctacggctgttgagatagatgaaatgttgtatacagtagatgatatggcagaacgaattggtgaaatgtctgcattagctaccttgatgtatgcttcagcaccaattcagaaatccatatgtactggaagtgtgaacagaagtggttcgtcttcccagtgcacattggagaacctggctccttgtctccagcaatttccaacactatggaaaacccttttttcagcttgttttggccaagatgaatatgggtgtttaaactactctgctggtaatgcgtatggaaaaagatcaatttcagagtacttgagatggcgctatagcgttttttcctctgctggaggagacacttcgttgttgcaaatgcttccatgttgggtcccaaagtctgttagaagattaattcaactatttgaacagggcccttttggaatgcaacttctatcaactgccccatcatctgaagagttattcactcacggtgtctccaattatatatacaattctactggatataccgaagccaatgcactgtccttagaagcatcgatccaaaaaagtgttgaagaagaattatattcttcccttgaggagaaagatgtgagagtggaacaccatttgcaccgtggtcgagccttagctgctttcaggcatcttattgctaagagggcttcacagttgaaatcagctagtgcacgtcaagtgatatccgcacagtctaatgttcaagcagatgtacaattgatacttgctcctctaagtcaagttgaacgatcaattcttatatcggtggctccactagctattacaaactttgaggactcgactctagttgcttcctgtatattcttgttggaactttgtggcctgtgtgccaacatgcttcgtttagatattgctgcactacgacgcatctcttcctactacaagtcagttcaagaaaataaacatgttgatctatctccaccaaggggcccagagctccatgtgcagtcccatggagctggtatagctcctgctctagctcgagcgctagctgaagattatgtccagtctgatcatctgcatgttttggagcagactcaaacctcgatggctcccaagcgggaacagacacaatatcctcttatttctattctgcaacaccttgaaaaagcaagtttgccatcattggaggaaggtaaaacttgtgggttttggcttttgactggtgttggtgatgcatctctttaccggtcgcaacagaatgaagcaagtcaacactggaatttggttactgaattctgtcaggcacactatctcccactaagtacaaaatatcttgcattactggccaatgacaatgattgggttggttttttaacagaagctcagatagctggattttctattgaagctgttattgaagtggcagccaaagagatcagggattcaagactgagggcccacatactgactgttctaaaaaatatgatatcacttcgaaggaaatcatctggtaatgtaccttcaggaagcagtgatccatctttctcttctgttgatggcaataatcccatggaacttttctgcattcttggagtctgtgaaaagcaaaaaaaccctggggaggcactcctaattaaagcaaaacaaatgcagtggtctttgcttgccatgattgcctcatgctttccggatgtaactcctctcacatgcttaagtgtttggcttgagattacagccgcaagggagatgtcctcgatcaaggtggatgatgtttccttgaaaatagcaaagaatgttggatctgctgttgaagccacaaataaattgccaagcactagcagaaatgttgaatttcgttacaataggaagaatccaaagcgaagacggttcctggaagcgtcacatgaaaagttatgtttctcaatagatagcacatgtgggccagattctgctgcaacttccaatcctatcagtattgttgaccatcagggaataggaaagccaatctcaggagaaaccataatgtccgttgatattgatgaaaggcttgcatctttatcaaacatggtagcagtgctttgcgaacaacaactgtttctaccattacttagagcttttgaaatgtttttgccttcctgctcccttctttccttcattcgttctctccaggcattttctcaaatgcgtcttcccgaggcttctgcacgtttggcatccttttcagcaagaataaaagatgaagcctctcatactcaactaaactcttccaaagaagtgtcagtaatagcagaatgggtggccactacagctgtaaaagctgcagatgctgtcctttcaaactgttcatcaatttatgagaagaggtgtctactgcagcttctttcagcagtggattttgctgatggtggcacttcatcatcttactttagccgaagatattggaagattaatctgtctgaaccatctttgtgtaaagatactgatgtgtacaactggaatgatttgatggatgatgcttctcttttaacatcattagaaaaggacggtcaatgggagcaagctcgaacttgggcaagacatctggagtcaagtggcatagcttgggaatctactcttgatcatgtcactgaatcacaggcagaagccatggttgctgaatggaaggagtttctttgggatatcccacaagaacgtgcagccttgtggggtcactgtcaatctctctttatgagatattctttccctcctttaaaggctggattatttttccttaagcatgccgaagcagtaggaaaagagataccagcacaagagcttcatgaaatattattgctctctttacaatggctaagtggaactatgactaaatcctctccggtctatcctcttcatcttttgcgggaaattgagactagggtgtggctcctggctgttgagtcagagagtcaatccaaggttgatggtgaatttgccacttctgctgttgctcataacaaagctgttggaaacagtagcagtattatagaacatactgctgatatcatcacaaaaatagacagtaacatgagcttgccgcacatgaaaattacagaaaggaatagcacacgggacagtttatcataccaacatgtgcaactctttgagtctaacagtgaagcatcttcaacaacaataaataacacgcgagcaaagcgaaggatgaaaacaaattcaccacttaaacgaggtgtcaatgacaatattgaaagtagagctaatgagctggataacaattctaacactttacatagttcaaagattggtgaacaagctagaaatttgctctctgaagaggaatttgtaaagatggaagcatctttatctggttgggaacaaaatgttaggcctgtagatatggagaaggctgtgctctctttactggaatttgggcaaataactgctgctaagcaactccaacaaaagctgtctccatcatatattcctgaagaacttgtccttgttgatgttgctttaagaattgccaaaaacagcagtaatggagagatcaatttgtcatgctttgacacacaggctcttcggatacttcagtcactgagagtagcaaatagctgcgatatgattagcccatcacaggggcttttggccgcacatcgtggaggctatttggattcccaaaaggaagagggtcctgcacctctattgtggagatcaagtgacttcttaaagtgggcaaaactatgtccatcagaatcagaaattggccatgctttgatgcgtttggtaatgactggacatgaagtaccacatgcttgtgaggttgaactcctaatattgtcgcaccacttctacatgtcatcttcttgtcttgatggagtggatgttctcgtcacatttgcagcaaatagagtggactcatatgttttagaggaggatttttcttgtttagctcgtttgatcactggagtgagcaatttccattccttgagcttcattctttcaatccttgtagagaatggccaattggagttgctgcttcaaaagtattctgccactgacacagccacagggacgcttgcatcggttcgaggatttaggatggctgttattacatcactgaaacagtttatcccgaatgatgacgacgctctctctatggtatacaagcactttgacatgaagcatgaagctgcttctctccttgaatcacgtgcagagcaatacatgaacagctggttatcacgatatgataaggaacggcgaaatgatgagcttctggacgctatgcatcatcttgtagagacagctgaggttctttcaactattgatgctggccaaagaacacatcgtgcttgtgcccgtgcttctcttctgtcacttcagatccgaataccagatcttttgtggattggtctttctgagaccaatgcccggcggatttttgtggaacaatctaggttccaggaagctcttattgttgctgaagcatacaacataaatcaacctatagaatgggccccagtcttttggaatcaaatgctaaaaccggatctaatcgagcaattcgtggctgagtttgtctcagtgctgcccctgcagccaccaatgcttctcgagcttgcaaggttttacagggcggaggttgcagccaggggggagcagtcacacttctctgtctggctttcacctggaggcttgcctgcagagtgggtgaaacatcttggtagatccttcaggagcctgctgcgtagaacaagggacatgaggctgaggctgcagttggcaactctggcgacaggcttcattgacgtccttgttatttgcaatagagttttggacaaagtcccggacaatgctggcccgctgatcctaaggaagggacatggtggagcataccttcctctcatgtagatatttcccttctctttttggtgcattggattcagaacttaattcttggcagttaggctatatattgaaaggcagatgaatcttgcaaatattatatgtatcagctttctttggttcagcatctttaaagtcaagcttggctgcagtcttggacatggattctcatcgatgatgccatgaaagacttttgtgattgtatgtgcagcattttgagcggaaaagctggcagaaatgggatttttgcagcttcatccggcaggtgttttcgcacccatgatatattgtatgttttgcatgtacgaagatccgccccgtatttgttttcctcttttttttttggttttgcaagtgtcatgtaggtcgatttgctgtctgtgatttggactgcaagtctgcaaccagacggcagatgcgtcgagacgtcgagtgtccagtccagcgaaagcgtaaatacaaagcacatggacgttaaccagacggcagatagcctttgtttgttgttctactggtaatgttcttattttctaaccatggttttacaacccaggggatcttgtcctggcaactgctgagatcaactcatcacaagttgaatctcagagctctatcggatacctgtactcaggcagtcttcaaaacgttttctactattccccgagtgaagtctttagcatggggatactgttctgatgcttttgatgactcaagttttaatgaaattctagtggtatcaagtgatgcttctatcacagtccatgcattctgccattctcgcaaaagcacactaacagttaattcaatgtctgatgctaaagagttgcatggggagtggaaagagtggcgccctactgaatgttcagtgttggaggatggtgagtcaggtccagataattggttttgttcttttcctaactacagtcactgcgtctgtttctaatggaaaaataccaagccagattgcccatgaaatctttattgcctaattcagcagaagttgtatcctttagcatatatgacattactctctctttcttgaaatattggtatagcaaatgttctctgaagactatggcggaaactgacagtgaatcaccacgacgttttcttagagcatcgtgcagttgtcagtgggagtgtctaaaagttttgtctagctcgtcatgttatttgatcggcttagttctgactcctaatgaatcagtacgttgtgaggcccatccatccaatgcggagtgtattttggttactgttctggagctaaaccactggggcatacagtggaactttgtggcagaccttcaggatgtatctgatggtattacgccaagtccaaaatgggttgattttcagttatcagatgtgtttcttgcctgccttaatacagcaggttttgttgccatttggaacgtgaaaactggtggtcttgtgacgtcattcagtgttcttcaacaatgcagaactgatctggagatgcctctgaggagctctatgtccattgtgacaaatttggacgagggaaatatccatgttgagaactttgttggcagaatgtttaagcggttagttttggcatcatattcttatcttcttgctgttgtagatgaggttggagtagtgtatgtgttctatgcggatgacatcttaaacttcaaagctaatgtgcacgaaaactttgatctgcctgttatgaatcagtttgctgattgtttttctatctgggaagctgctggtcatgagataggaagtctatcattttgtgctaatcagtccatacaacaagggtcacttagggggtgtttggtttctaaggactaatgtttagtcactatgttttattccattttagttccaaaattgccaaatatagaaactaaaattttattttagtttctatatttaacaattt

SEQ ID NO: 9220 - DNA, 5035 bp, Zea Mays
ccaccgtccatacatgccttattgccttttgcacattcaagaccgctctagtccctgctctacagctctagtcgattacagaaatttggacaaagcagaaggttcaggtcgtaagatcgcctagtccctgctcttcctggtcagtggccgttaccactgccccctctcctctcctctcgctcgtgcagaggaggagacagactccccccgtcgccgccctcgcgcctcctccgcccgcagctcaagccgagcgtcaccccgtcggctaccttccattctcgccgcacttctcccactgggcacctcgcgccctcgtgacggtataaatagcccctagtcactcctcggcgctcctcaaacccaccaaaccctagcccacttagcggcggcggcgctagaggtggaacgagaccttggcggaggtagcgagggtagcgctgctcgctcgctcgttgggtttccatcccctactgcctagagcgagctctacgcgacgatgagcagccttgtcgagcggctgcgcgtgcggtcggagaggcggccgcggtacgcgctcgacgagtccgacgacgacctcccgctgcgcgttggggccggaaaggggaaggatcaacagaacgacgcgcccgccgagcggatcgagcgcgaggacgcgaaagaagaagcttgccagcgctgtggaaaaagtgataatctagtctcttgttcaacatgtacatacaaatttcacagaaaatgcttggttccttgcttaaacatcacatctgataaatggagctgcccagaatgtgtaagtccattaacagagatggagaggattctagatattgaagtgctggaagcacctcgtgaagattctagttccacagagcctcgatcaaagaagatggagcgatatcttatcaagtggaaaggattatcatacattcactgctcttgggtttcagaaaaagaatattcagaagccgcgaatatacaccctcgtctgaggactaggttgaataacttcagaaggcaaaaggaagccatgaaaatagaagcagaaagatctggtgaggacatcgttgcaattagaccggagtggacaactgttgacaggatccttgctagcagaaaaaacttagttggcgatcgggaatactatgttaaatggaatgaacttacatatgaggaatgtacatgggaaaatgagtctgacatcacggtgttccaacctgagattgaacgcttcaatgagatccagttcaggcgtaagaaatctggtgacaagggcaaggccactcgggagccacgccaattcaaggagagccctacgtttctttctggtggcacactacatccctatcagcttgaagggttaaactttttgcgatattcgtggtttcataacaaacgcgtaatccttggtgatgagatgggtcttgggaaaacgatacaaagtattgcttttcttgcctcactctttgaagacaagtttggtccgcatctggtcgttgctcccctctcaaccctgcggaattgggagcgtgaatttgcaacttgggcacctcaaatgaatgttgtaatgtattttggagctgctgcttctcgtgacattattaggaagtacgagttttactacccaaaagagaaactgaagaagctgaagaaaaagaaatcttctccatctaatgaagataagaagcagtcaaggataagatttgatgtcttattgacgtcttatgagatgatcaacatggactcgtctattctaaaaaatatagaatgggagtgcttggttgtggatgaggggcatcggttgaaaaacaaagattccaagttgtttggtcaacttaaagattataataccaaacatcgtgttctattaacggggaccccagtccagaataatcttgatgagcttttcatgcttatgcacttccttgagggtgaaagttttgggagtataactgatctccaagaagagttcaaggatataaaccaagacaagcaaattgagaagcttcatggaatgctgaagccacatcttcttcgaagattcaagaaggatgttatgaaagaacttcctccaaaaaaggaattgattctacgagttgaattgacaagaaaacagaaggagtactataaggcaattctcaccaagaattatgaagtgttagcccgtcgtaatggtggacatacatctctaataaacgttgtaatggagttgcgcaaactctgttgccatggattcatgattgatgaacctgatcttgaacctgccaatccagaagaaggtttaaggaggcttctagattcatcaggtaagatgcagctgctggacaagatgatggtgaaactgaaagagcagggtcatagagttctaatttattcacagttccagcacatgttggacttgctggaggactatttaagttacaggaaatggacttatgaacgcatcgatggcaagataagtggcgctgataggcagatacggatagatcgcttcaacgctaagaattcaactaggttttgctttcttctttctactagagctggtggtctgggaataaacttggcaactgcagatactgtaatcatctatgacaggtgaaaaatctctctgtttagacaaaacagttaacataatggattcgcttcaatttctcacctatgtatgtacagtgattggaacccacatgcggatttgcaagctatggcaagagctcatcgcttaggacagactagtaaggtgatgatatacaggcttgttagccgaggtacaattgaggagcgaatgatgcagcttacaaaaaagaagattttattggagcacttagttgttggtcgactcaccaaagctaataatgtcaatcaggaggagttggatgatattatacgctatggatcaaaggagctttttgaagacgagaatgatgaatctcgccaaattcattatgacgaagctgcaattgagaggttgttagaccgtgatcaagttgacggtgatgaatctgtggaagatgaagaagaagatggattcttaaaaggattcaaggttgcaaactttgaatatatcgatgaggcaaaggctcaggcagaaaaagaggaggcacggagaaaggctgcagctgaggctgaaaattctgaaagaaactactgggatgaactattgaaggatagatatgatgtacagaaagttgaagaacatactgctatgggaaaagggaaaagaagccgcaaacagatggctgccgctgatgaagatgacattcatgatttaagttccgaagatgaggattactcattggaggatgacatttcagataatgacacaagtttgcaaggaaatatttctgggaagaggggccaatattctaagagaaaatcacgtaatgttgattctattccattgatggagggcgaaggacgtaccttgagagttcttggattcaaccatgctcaacgagcaatgttcctacagacactcaatagattcggttttcagaattatgactggaaagagtatcttcctcgtcttaaaggaaaaagtgtcgaggaaatccagagatggcgttccaaaggaaatgatgcgtgttgatgatgtactagtcaggatagcaaacatatcccttattgaggagaagatggctgccacaggaccaggaaaaattacaaacatttttcctaattacttgctctatgagttccaaggcttatctggtggaagaatatggaaagcggagcatgatctactgttactgagaggcatactgaagcatggatatgcaaggtggcagtatatatcagatgacagagagaatgggctttttgaggctgcacgacgagagcttcatctcccttcggttaatgaaataattggtgctcagttgaacgaggcaaatgttagcatgtgctcactatgtcccttcctccaaattttgaagtgttgcatttcttatttcttccattccttttctaggggaatttggaaggtgcacaggaaggccaagcgaacacaacaagcatgtcgcattacaaggagatccagagaaagatagttgagttcttgagaaagagatatcatcttatggagagagccttgaatatggaatatgctgtgataaagaaaaaaattcctgttcctgatgatattactgaacaaggtgttccagcaggacatgctccttttattccagatatcagtgaactgttgcgggaattgcccaatcttgagccaatttctaccaatgaattggtttctgagggcacagctggtcagttacaagttccccatctctacaataagatgtgtggagtgcttgaagagagtggtgcttatgcgctcagttccttctttggagacaagtccgcatcttctagtttggccaatagccttcgacagtttgaaactgtgtgcgagaatgtcgtcgaggccttgcgaccacaccaaaatggtactggcagtgccatcaaagaggaattggtagatgcagccaccaaagcagcagcagcagcagctcctcaacaagattcaggccatgatgcaccgcatgggcagtcttcgacagccaaggcggacatggaaatcgatggttgatttgtaggttccagagtggtaagaaagggaatccccctctaatcattatgtatactgtggtcagaatgtgcgctatatattgtaacatcaaagaaagcacctccaggcctgagggtgttactgctaatgcgtttggtttacttgttgtccttgtaatatgcatacacatttagaactcatgcagccattttgtgtgctcgaaccggtggatcgctgccctgttgtcttgtactgtgtttagggcctgtttggatacgaatggttaattataagacggggctaaagataagtacggataagtacggattagctatagttggctagcttgttggttaacaattagctaaactttggctagctagatggtaaacaattagttaaaagtttagcaaaagaattagttcacctattaactcagtttgttgcctcctttttattatgccaactaatttg

SEQ ID NO: 9221 - DNA, 1012 bp, Zea Mays
acaatgagaccgagtgaacgaggcatcaacaccaatatgtttaatatccaggaacattacaacaaatgagatggcaaataccattaggtacagttacctcaggggaccaagtggcagattcagaaatccatatgaccatgggctgcgtgagaactgttctgacttcttgctgaaggggtacaatgaggatattgagagcactgtacagacattgcaatctgacgaggaaatgggaccaattcagatgagcagcccagtctcacagaatggcgagagcattccaccacatgtgaatggcactgaccatggttccaccatttcacatgccaactcaaaatcccatcgccaaagtccatccaattgtttgggcctagggctgggcactgggcataacaacccctctagccgttatgcgcgatctcttcttcccttatgatttgtcttgaggatatccagatgtgctcctttatatttgtgcatacttgttggacaaccagtcaaccacagctttgtttgggctatttcttcatgggtgctcggtgatttctctctggttgcacaaacgtgaaggcttcagaaacatcttcagcttactgcacctatgacacacgatagaaatagtgtcaatgtcaaggttttgttcttgttttcttggcaaaaggcaccaaggctctatgcctactatccaatatgtatgtacatggatggggctagtagttcatgcactaacccgttttgacttttgaggcatagttgtacgcttagggctgataacggcctataatttttgcactataagatttaagtatcaaatcgggttaggatcggactctatttctagtcatttttgaattataatttatttagggcattgatattttttgaagaaccatttggatcacgatccattaccacccatatgtacgctacgagagttgtaaaatgtacagtaacagaactacatggcatgtttgttcctgcatacgtatttatagaaaaaaatgatttgtct

SEQ ID NO: 9222 - DNA, 2765 bp, Zea Mays
gcgctgggttcgttcctgacctccgcccgccgctgccctcccccgcctcgtcgacaaatcacgccgcgccttttcttttcttttcttttctttctcagtttcaggtgttgttttgccactagctgctgcctgcctgctgccgccgccttttttccggctttcgcttttccgctctctgcaccagcctcaccctcccaaccgcgtctccgtccgctttctcttccgtcggggccggccgcacctcggacccatcaggtgctgctgtgctgggcgagttctcccccccttccttgcttttgtctggcattcgctcgctctagtttcgcgcaacccggccgccgccgcctcgggtttctcgcctgtggctttgagccgagaggttggggactcggtttccttcctgctctgagttgggtttcgcgcggctcggactttggccggcgggcgaataaaccggccggatgcttctgggcgctgcggccgcgaggatggaggagaagcgtgtgatcacggggagggagcgggaccagttccccgtcgggatgcgggtcctcgcggtcgacgacgaccccgtctgcctcaaggttctcgagaccctgctgcggcgctgccagtatcatgtaataacgaccaaccaggccatcaccgcgctgaagctgctaagggagaacagggacatgttcgatctggtcatcagcgacgtgcacatgcccgacatggacggattcaagctccttgagcttgtagggcttgagatggacctacctgtcatcatgttgtcagtgaacggggagacgaaatccgtgatgaaggggataacccatggcgcctgcgactatctcctgaaacccgtccgcatcgaagagctaaggaacatatggcagcacgtcgtcaggaggaagttcagcaagcgagagcgcagcaaccttgacgtctacaaagatttcaacaggctgccaggcgcggatccatgccacagccacggccacggccacggccagaccactgccggggcttccgaccagagcgggaggatcggcaggaagaggaaggaaatgcacagcgacgaggaggacgacggcgaggagaacgatttccaggagggcgacgagccctccgcggctaagaagccgagagtcgtctggtcgattgagctgcaccggaaattcgtcgcggccgtcaaccagcttgggattgatactgttccgaaaaggattcttgagcttatgaatgtggagaaactcaccagggaaaatgtcgcgagccatctacagaaatacaggctctatctgaaacggttaagtgctgtggcatcacagcaagctagcattgtcgccgcatttggaggtagagacccctttctccacatgggagcctttgaaggccttcagagctaccaacctttcgccccctgtgctgctctatcgtccttcatcccacaccacggctcgcttggtagaactaccgcggcagcattcggggtcccggagcttgctcctgccatcacagttcaagctgctgccagcaatggcatgataagccactgtgctggcgacgcaagcaagtttcagctctccggtatacaagaaaaccagcaaccaaatctgggacaaggctcggccacctctcttgggctgccccagctccaacagaagtggatccagcaagaaactggcgacttgtctgctgtcttctctgggagtgcactggctaacactctgtctggtgcactccagagagttgcgagcagtccattgccaccgcaagaacttttggagggcgtacaaaccaaagttagtgcccagccaccaataacaatggcatctgtgagttcagaacttgttgagaggactgttggagtttcggctaatttgcaggactccggtatatccccgcagggcactcttccaataaatgatggatttactgctgacaagttacagctgcaagatccattcgacagcaatggtggaacaaatttttcagtaaacatgcctgtttgtccctctggtagccttacagcatccagcaacgccaagggtggtgctagttcgtgcagtccagtgctgctcgctcctgatactgggagacattcaaactacttgcagtttggagttgcaggcaactctggacatgacatgaacgatattaaacaggaccatctgcatcaaggattgagcactggaggtttcaatcacgattttggcacctgtatgactgaacaaacagatccaaatgtgccgtatcttatgccacaaatgaagcctaacaccttgtcatcagaggataaactgaagcagaggaatatttatgatttggggattccaaagctccatggtggttttagctctagtagctgcaattttgatggtcttctcaattccatgatcaaagcggaaaaggatgatctctcattcacggatagcgacctggggtgcgacttctttccactcggtgcttgcatatgagacctcttaacaacccctcgtgcagattggccctcgacgggatgggatgggactacggcctacgggagaggttgtaaagtacactgcttaggagcattggccagtttatgctgcctaatgtgttactatgcttggtactgtgcacactagaaatgctagggatacaggtagctacggacatgccttgtaatctacatttcctcctcttcgaatgggaaatgaaagtgattatggttaggtaaaaaggagcaagtataatgctccaaattaacatcatcttcatcttaaaattttacc

SEQ ID NO: 9223 - DNA, 1438 bp, Zea Mays
cgcgtctcgcgtaagcaagtggggaagacttcatcgccgtgcgcgcccgccataccgcgcaccgccacctccatcgcgcgccggccagcccccgctcctccacctccactacacgcgccggccagcccccactcctccacctccactgcacgcgccggccagcccccacttctccacctccaccgcgcgccggaagcccccgctcctccacctccactgtgcgcgccggccagcccgctcctccaccgcatcaggaaggcgagccagagatcgagcggcccgagaaaaggaggaaacacaagcttaatcagaagccgaagcccagggagctcaatccaatggagtggatcgctgaagcccggcaccaggcagtgctgatgggaatcgggatggactgcatccgctaggcctctccatcgaccagtgggttcccctgctcaagttgtattgatttgcgtgcgcgcggtttctgccaatctggcgacctgcttcagaatctgatcttcaagacacattcagtgaagatttgttctcaggttgatctgtgcaattttgaaggcactcatggtgtcaagtgaggactggcaatttccaccagcgcgagacgttgatggtgtccatcttactgtatttagttgggttttagtacctcgtacctccaaaaggtttcagttaaaggacatgtcctggagatcaaaggtgactgagctaactgcaatctcttatttccttgcattttaggattttggttgcctggattctgcagctcttcattttgcaatatttgaaaaatagtcgagtagcctctagggcttaccatgcctaaaatggtgagattcagctctgatgatgctaaggatgtagtccattaccaaacaatctcaccaaagagcttagctaaatctgttctcgaggaaggtggctggtcaaacttcatgttctcaagggaggatactcagaataatattgatgttgccattgtttttattggctcaaagctgcaatcgtcagacatatctaaagataagcaagttgatccagctttagcagacacactgaagccttggagtctggagcaaaaaaaagtggtggctgtattctcaaggaacatgagaccactgagctctggagtgaatgaaggacgtcgtctttggaagtcagacatcacctagagctagggtgtccattcttgacatgtttctcttagtgataggtggatactgtctagctaggaataaagtcttgagggattgatggacgcatgcatctccaattcctgtgtgttgtattactactggtacaatctccaattcctgtgaacttatgtatttggactgtgaatttgtgatatgaacatatatcaatgtgtttgaaatctgtattgtatgtgatattctgtattggatgtgatattatctgtgtctaatttttcatttct

SEQ ID NO: 9224 - DNA, 1484 bp, Zea Mays
ggcgtattggtgtcgcgtctcgcgtaagcaagtggggaagacttcatcgccgtgcgcgcccgccataccgcgcaccgccacctccatcgcgcgccggccagcccccgctcctccacctccactacacgcgccggccagcccccactcctccacctccactgcacgcgccggccagcccccacttctccacctccaccgcgcgccggaagcccccgctcctccacctccactgtgcgcgccggccagcccgctcctccaccgcatcaggaaggcgagccagagatcgagcggcccgagaaaaggaggaaacacaagcttaatcagaagccgaagcccagggagctcaatccaatggagtggatcgctgaagcccggcaccagtcggcgcggccgcgggcgctgccgcattggcaggcagtgctgatgggaatcgggatggactgcatccgctaggcctctccatcgaccagtgggttcccctgctcaagttgtattgatttgcgtgcgcgcggtttctgccaatctggcgacctgcttcagaatctgatcttcaagacacattcagtgaagatttgttctcaggttgatctgtgcaattttgaaggcactcatggtgtcaagtgaggactggcaatttccaccagcgcgagacgttgatggtgtccatcttactgtatttagttgggttttagtacctcgtacctccaaaaggtttcagttaaaggacatgtcctggagatcaaaggtgactgagctaactgcaatctcttatttccttgcattttaggattttggttgcctggattctgcagctcttcattttgcaatatttgaaaaatagtcgagtagcctctagggcttaccatgcctaaaatggtgagattcagctctgatgatgctaaggatgtagtccattaccaaacaatctcaccaaagagcttagctaaatctgttctcgaggaaggtggctggtcaaacttcatgttctcaagggaggatactcagaataatattgatgttgccattgtttttattggctcaaagctgcaatcgtcagacatatctaaagataagcaagttgatccagctttagcagacacactgaagccttggagtctggagcaaaaaaaagtggtggctgtattctcaaggaacatgagaccactgagctctggagtgaatgaaggacgtcgtctttggaagtcagacatcacctagagctagggtgtccattcttgacatgtttctcttagtgataggtggatactgtctagctaggaataaagtcttgagggattgatggacgcatgcatctccaattcctgtgtgttgtattactactggtacaatctccaattcctgtgaacttatgtatttggactgtgaatttgtgatatgaacatatatcaatgtgtttgaaatctgtattgtatgtgatattctgtattggatgtgatattatctgtgtctaatttttcatttct

SEQ ID NO: 9225 - DNA, 2525 bp, Zea Mays
tagcgacccgcgcgtctctcttctatcccgcctacgcgcgagccaccggtccccgctcctccccgcgcggcgccgccagcctgctcctccaccgcgcccaccgctagctcgctcctccaccgcgcccgctgccagcccgctcctccaccgcgcccccgctcctctgccatcatcgctggttgagatgggtgggtagggtttgggcttgggcgtggccgcttgggatctgaatagggtgaggtcgtgaacaatggatctgtcgagtcgatgggcggaaccgctgaaggaagcagaaggcgaggtggatcagtggatggcgtattggtgtcgcgtctcgcgtaagcaagtggggaagacttcatcgccgtgcgcgcccgccataccgcgcaccgccacctccatcgcgcgccggccagcccccgctcctccacctccactacacgcgccggccagcccccactcctccacctccactgcacgcgccggccagcccccacttctccacctccaccgcgcgccggaagcccccgctcctccacctccactgtgcgcgccggccagcccgctcctccaccgcatcaggaaggcgagccagagatcgagcggcccgagaaaaggaggaaacacaagcttaatcagaagccgaagcccagggagctcaatccaatggagtggatcgctgaagcccggcaccagacacattcagtgaagatttgttctcaggttgatctgtgcaattttgaaggcactcatggtgtcaagtgaggactggcaatttccaccagcgcgagacgttgatggtgtccatcttactgtatttagttgggttttagtacctcgtacctccaaaaggtttcagttaaaggacatgtcctggagatcaaaggtgactgagctaactgcaatctcttatttccttgcattttaggattttggttgcctggattctgcagctcttcattttgcaatatttgaaaaatagtcgagtagcctctagggcttaccatgcctaaaatggtgaggtaagtctattgcgcttctactgacatgaccatttaatcactgggacttcacactcaatacttttcttgaatatatagagatgataggaacattgctgcccatcagtaataatcttgtgccttgtttctatgggttgagcatccactgagattttacaaataaagttgataggccacattttgcacattcacatctgctagtaagattgttttctttccaaacagtaaatactttaaatcaggtaatggtatttattctggtgcagggtaatgtacaattgtgttcccttaaacacactttatgcttttcccctcaccttctatagaatttacccatgattccatggtgtacgattatgtgcagtgcagttgttgttagttctttagaaaacctcttgttgttagggccaagcgtaattagttcaaatatcgccacaatggttttcaagttgtcggtgcaggatatgactcatgtgctcttgtaatggtctgtactttaagaacagggtcgagaaatagtgaatgtttcagaacttttttttcattttctaccataggaaacttaatgtgttttgtgacaggatactactgtcaatgggaaagagaaccatgatcaagagataagttgcatcgtagacacaatgttactctgttcaatattgatgtcttttctgtttgcatagtgttaaccttagtcgaaatttctagctcatgacaaatatttattgtacctttaaatggttatttaagcaagaatatatgagcttactgtcatagaatgacctacattccatccaccttggtcatccagattcagctctgatgatgctaaggatgtagtccattaccaaacaatctcaccaaagagcttagctaaatctgttctcgaggaaggtggctggtcaaacttcatgttctcaagggaggatactcagaataatattgatgttgccattgtttttattggctcaaagctgcaatcgtcagacatatctaaagataagcaagttgatccagctttagcagacacactgaaggtaatcataggcactcatctctcagatactgttctatatgcatggtacttgagttattctgcgctactactgacactactaaattggagccttggagtctggagcaaaaaaaagtggtggctgtattctcaaggaacatgagaccactgagctctggagtgaatgaaggacgtcgtctttggaagtcagacatcacctagagctagggtgtccattcttgacatgtttctcttagtgataggtggatactgtctagctaggaataaagtcttgagggattgatggacgcatgcatctccaattcctgtgtgttgtattactactggtacaatctccaattcctgtgaacttatgtatttggactgtgaatttgtgatatgaacatatatcaatgtgtttgaaatctgtattgtatgtgatattctgtattggatgtgatattatctgtgtctaatttttcatttct

SEQ ID NO: 9226 - DNA, 766 bp, Zea Mays
ccggaaatgagcacccaacaggttcatatggcctgtgtaatgcaagggcgtagagttggagtggcatactatgattcagatacacgccaactttttgtgttagaaatctgggaagacagcgttggggaatttcctctgattgatcttgtgaaatttcagtcaaaagcgagcacaatatacacaagcacaaaaacagaagaagcacttttgtcggctttacaaaggaatgatggtaacggtgaggctcctgttgtgaagctcacgaaaagctcaacattcagctatgagcaagcctggcacatattgatctacttgaaagttgcagctatggatgatggactaagtgcaaaagaaaggatatgctttcttaattccatgatggatcttggaagcgatgttcaagttcgtgctgctggaggtctcctagcaatattagacaatgagagacttcttgacaccattgagcagatggaaggtggagcatccattgcgatcgattctgtggtacagatctcattttatcctctgatggagataaattgaacacactgatgtgttgagatttaattatatcttctgtcatgggctgggcttatggccccagatggcagtatgccagatcagatccgaccttatatactgctgctgccctggccggccgcccgtacccaacagattgcccatgacaactttcagtggcagtctagtttgtaatcaacaaaattatatacataatttatttcctactttcaaggatatagttact

SEQ ID NO: 9227 - DNA, 6458 bp, Zea Mays
taacaacatccaaaaatatgataacatatcaaaataattgattggcaaataatgctgaaactcatcaatacggttattctggtctagtaacaagcaaacataaatgagagcattttctcacagatagcctttcagcagttaccgcgaactagaaacatcaagatatcaaacactgcttcaacagaagatattccagcacaaacaataacaagcacagaaactattaagaatctaatcgacagagctagtacactagatcgtatagcttgtttgcttcagtgatgatccaggaaaatggaatgaatcacgttgtatatcatgaggatatcttgcaaatgtcctcgtattcgacagccctgagaaccttcccatcatagaggcctttctcaacctgcacttttgcacagaatttctcagtgtccactgaaagcaacctggcatttgacccccgataagccccattgacaatccgcacaagtccaccaatctgagggatcacggtctcaagctcatcttggtcgaccctgagaacatgcttgctctccaacatctcaatctccccaacatatttatcaataactttcttcaccacccctttctgcttgtagtaccccttctctgccaatgacttgctcatcactttgaccacaatcccagggcacagccagtagtccttcctattgctcctctccttggccttctcctcctccttcatcagctcgtccaatgctgacctctttgcctctgctgccttcacatcctttcccatcttcttggtcaactcattcttctcctggtctcgggtgcctgagccatcctcctcatcaaaaccaaatttcatcttcggcttatcgtcaaaaggattaaccttgggccccggcacagccttctgaagcgcaatcgcaatcttacctgttgccttatctgcctctttcgagtcatcctccggctcctgctcatcatcatccgaacctgaatactctccttcactgccagactcaggctcgccctcggcagcaccaccaccattgggtttagctaaggacttgtgcgcacgctcaatctggcgggcaatcatgcgctcctggcgctcgtcgtcagccatgtctgacttgatcctcttgcgcttgaggcgttccttgacggcctgctccgagtcacggtcgatgtaggtcatgaaccaccccttgggcgtgtcctcgaccttacagtacccctcgcgccccaggaacttgacgaactcggtgagcgtggcccaccgcgtggagttcatgtggacgtggtgccggtcggcgatgtactcgttgtagacgacggtggcggcgacgcgggagtggcggtgcgcgcggcggatgagggagaggaaggactcgaggaactcctcggagaagccctcgacgacgcggtcgggggccatgccgaacacctgcatctgcctctggtgcgactccgacatgcagtggcacttgaacccgttctcgtcgcggcactgcttctgacacatctgacagtaccaccgcagcttctgcagccccttcgccttgatccggtttgcgatcgccttcggcgtcaggaactcgtgcttccccatcgtgcgggagaggcccttgccgcacaagcaggatgggaattacaggtagaagaaggggggagcacgttggtcaaggagacggacgcgaggcgacgaggagtggattattattgtggagagaggcagcggcggaggccggagaggaggccggcgacggcgagattggggagtgcgtgaacggattggggatcgattggattggggcgagggctttgtttttttttgttgctttttttgtttttttattagacaggcgagggctttgttgggacttgggaataagtccaaggctagcaccacaaatgaacgatccggatcgcgtaaacgatcaatcaacggacgagatccagccaccgtgccagatttttcaacccaacgcatgtgaagggcgcgcatcgtatcttatcttcactctccgtccaccaaagcaaaccctacccgctcccttcccgcgccgccgccgccatggactcgatcgacgcagatctcgcgcgcacgcaagaggagcggcgcaggatggaggaggcgctggcggctggcgcgcccatggccgtgtcctccgtcaccttcgacaccgacctctacggcggcgggggcgccgaccccaaccgcttcgcgggctacgacacctccatcccggcctccgaggacgacgccgcggaggacgacgcggaggccgccaaccctgcgccgcgccgcctcgcggcctacacgggccacgccatcgccgccgccgacatcccgcggtcggccgacgacgacgacgggctgcccaagaggtcccagcgcatcatcgaccgcgaggacgactaccgccgccgccgcctcaaccagatcatctcgccggagcgccatgacccgttcgccgctggggaggccaccccggacccctcggtgcggacctacgctgacgtcatgcgcgacgcggcgctgcagaagaagaaggaggacctgctgagggagattgccaagaagaagaaggaagaggaagagaaggagaaggagaggaaggctgccgctcctgagcagcctgccgccacaacaaagcggcgcaacaggtgggatcagtcgcaggacggcgacgctggtgccggtgccaagaaggtgaagacatcctcggactgggatgcccctgatgcgactcctgggattggccgttgggatgccacccccggacgtgttggagacgccacaccctccgtgagaaggaacagatgggatgagacaccgactccagggaggatggccgatgctgatgctacgcctgcagctggcggtgccacccctggggctactccttctggggcttgggacgcgactccaaagctgcctggtggtgtcacgccaacccctggtaagaagcagagatcaaggtgggatgagacaccagcaagtatggggagtgcaacccctggtagtcttggtgctgcaacacctgctggttatactcctggtccaacgccatttggtgcagagaaccttgccacaccaactcctagccagattgctcgtggaccgatcactccggagcagtaccagctcatgcggtgggagcgggacattgaggagaggaacaggcctctcactgacgaggagcttgatgccatgttcccgcaggagggctacaagattcttgagcccccggcttcctaccagcccatcaggaccccggcaaggaagctccttgcgacaccgacacctctggggacaccactttatgctattccagaggagaatcgtgggcagcattttgatgtgcccaaggagctgcctggtgggttgccactcatgaagcccgaggattaccagtactttggaactttgctgaacgaggaagaggaggagcagctatcgccagaggagcagaaggagaggaaaatcatgaaactgttactcaaagtgaagaatggcacacccccacagcgtaaaacagcacttcggcaactgacagacaaagcccgtgaatttggtgcaggaccgttgttcaacaaaatactgcccttactcatgcagccaacactggaggaccaggagaggcatcttttggtgaaggtcattgacagagtactttataagctcgatgagctggtccgtccttttgtgcacaagattcttgtggttattgaaccactgttgattgatgaggactattatgctcgtgttgaaggcagggagatcatctcaaaccttagcaaagcagctgggcttgctactatgattgctgctatgcgacccgacatcgataacattgatgagtatgtgagaaacaccactgctagggcgttcagtgtggtggcttctgctttgggtatccctgcccttttaccattcttgaaggctgtctgtcagagtaagaagtcttggcaggctaggcacactggtatcaaaatcgtccaacagattgctattctcatgggctgtgctgttttgccacacctcaagtcactagttgagatcattgagcatgggctgagcgatgaaaaccagaaagttcgtacaattactgccctttctcttgctgcacttgctgaggctgctgcaccatatggtatagaaagttttgatactgtattgaaacctctgtggaagggtatcagatctcaccgtgggaaggtccttgctgccttcctaaaggccattggtttcatcatccctcttatggatgctctgtatgctagctactacacaaaggaggtgatgcaggtcctcattagggagttccagtctccagatgaagaaatgaagaaaattgttctcaaggtggtgaaacagtgtgtcagtacagagggtgtggaggctgattatatccggaatgacatccttccagatttcttcaagcacttctgggtgaggagaatggctctagatcgcaggaactataagcagcttgtggaaactacagttgagatggcaaacaaggttggagttgctgatattgttgggagggttgttgaggatctgaaagatgaaagtgagccctacagaagaatggtgatggaaacaatcgagaaggtggtagccaacttgggtgcatcagatattgatgctcgtctggaggagctgcttattgatggtatcttgtatgctttccaagagcagactagtgatgacgcaaatgttatgctaaatggttttggagctgtggttaatgcacttggacagagagttaagccctaccttcctcagatttgtggtactatcaagtggcgattgaacaacaagagtgcaaaagttaggcagcaagctgctgatctgatctccaggatagccatagtaatgaagcagtgccaggaggagcagcttatgggtcacttgggtgttgtgctgtatgagtacttaggagaggagtatcctgaggtgcttggttcaattcttggagccttgaaggctatcgtcaatgtcattggtatgactaaaatgactccaccaatcaaggatcttcttcctcgtctgacccccattcttaagaacaggcatgagaaggtccaagagaactgcattgatcttgttggtaggattgctgatcgtggagcagaatttgtgccagcaagggaatggatgaggatttgttttgagctgctcgaaatgttgaaggctcataagaagggtattaggagagcaactgtgaacacatttggttatatcgcaaaggctatagggccacaggatgtgttggccaccctgttgaataacttgaaggtgcaagaacgacagaaccgggtctgtacaactgtagctattgctatagttgctgaaacttgctcacctttcacagttttacctgcccttatgaatgagtaccgggtcccagagctcaatgtccaaaatggtgttctgaagtcactctctttcctctttgagtatattggtgagatgggcaaagattacatatatgccgtcacccccttacttgaagatgctttaatggatagagatctggttcaccggcagactgctgcatctgctgttaagcacatggctctaggtgttgctggcttgggttgtgaggatgctcttgttcatctgcttaactatgtttggcccaacatatttgagacatctccccacgttataaatgctgtcatggaggcaattgaggggatgagggtcgcactaggtgcggctgtgattttaaattattgcctgcaaggtctcttccatccagcaaggaaagtacgagaagtgtattggaagatatacaactctttgtacatcggcgcgcaggatgcacttgttgcttcttatcctgccctggaagacgatggggataacatctttagtcgtccagagttggcaatgtttgtctgattaacgctggatgtgcatgtccatgtgtcttcatccatattcttatgaagcttgaactgggattgttccttctgaagggggtgcaatgtttaggaattttttttcctggtttactataatgcaactcaaaatctctatcatagtctggtcttactaacgatttgggaactgttttgttttcagggtacctcatgttgcagctgctgaagcgttacactggatttaggaccaatcctaaggctgcagcatgccaattaatccatcaagatcctatattgtgaaggacaaatgacaatcctagcgcgctgtcatctttttatgaatattaggcgttgggcatttaccgtgttttaaaactttgtattacacatggatgttgtattatgtggtgtggacaatggaacgttgcaagctgacctgaacctgattccttactgtattactgagatgttgatatgcatgtcatgttagtgtacgttgtgttctccttgtcattttgtttgtgatatcgacatgctatgtttgttgctgaagttgagcacaaatgatttgttggtca

SEQ ID NO: 9228 - DNA, 3332 bp, Zea Mays
atggccatccaccgcagcaatctctctagacgcttcaagatctcaaggatctggcatcaatcggagcaatatcgcgccaaatccttcgcctcctcatctccaacgagcgagactacacccctcaaggtcctaaccgggctcctgcgcgacgcctattcgctgaaatgcctcagggagttgcacgcgcatctcgccgtcgcgggtgcgatccaggacacattcgtcgtcacaggtcttgtcgaaagttagtatcaaatttgttgagctgtggcttgagaagatgccagacaagaagatcgaaggggctgattcatctcacattgtctcttcaacaaaatctttggaaagttcagtagggcctaatctaattgaaagtactgatggagattattgtaataaccttcacaagacagcagttgccaattttgtggcatcaatgctgcaagaacatcctatgagccttatattggctgagaacaaaagcaatttgcaagaaatttcagttgaacagaagattcctatctttgtttctatcaacctttcaccaaaagtggatggcagtgaattgccatgccccattgaagttcatgatggtattacatcttcctctagcaaaactaacgaaccaatggaagcccaagattattcgaacacaatgaaatcaaacacagctagttgcatgttcgaggcatcaaagcggcaagaatgccctataagcctcatattggcagacaagaaaggcagtttgcaagaagtttcagttgaacaaaatgttccttgtggtgattatgttgccctttcacaaaaagcagacggtagtgaattgacatcaacccgtgaagctcctgaaggctttctaacttcctctagcaaagtttatgtattaaaggaagcccaagatggttctatcacaacggaagcttctaaagtaaatgtttgtgcagcttcacactccatgcttaggttaattgaaggagtccaggatgaggcttcttgtattgattctgataaggttacttgtgaaacaccacctgccatcctgaaaaagttgaaagaagataagccactggtcgtccatagatttcataagcaccaaatgagcctaggagacacacatcaaaaggtgcctgcacctgtgagcagatcaaacaccagcaaatacttaagaatggataaaaacattgttgatactacgactcccattgaatcagtaaaggctgttgcatcaaaatttggtggcagcatgaactggaaaactcgcaagacacagacagcacaggtgagtgaccgtatcgtacttgagcttgataagctgaagaacgaaatttcagaatgtaaacatcaagcagaagctgcagaggctgcaaagttatcagtattaaaagagctggagagaacaaagaagcttatcgacgaaatgaaacacgtcctggagagggaacaagctgaggaggtggatgccaaggatgacttggagttatttcaaattatattacaagcgatggagggagttgactgtaatgatagtgttgtggttagagagaagctgaataatattcaagaacgacacaaagcattggatgccaaagtgatttcagtgaaatatgtgttgggaaaagtgcaggaggattatgattctttgttgatcggaactgatatttccattaacaaagctcaggcagccttcacaatgtccaaaggtgcagagaaagaagtagaggagctcaccatagagctccaaagactaaaggaagtgtttgatttggctaacgccaaattccaggacgtggaagaacgcaagaacacgttgatggcacgtgatgaggatcgtcttgcatgggaagaggatctcaggcaatcagacaaagagctgaatcagatcagcatggacctttgttcttttcaagaattgcaatcaaagcatgatacgtcagccaccatgttgctcaatctgaagaatgaggtagccaattatttggaggcaaagcgaatcgaggaagcacgagaacaagaaagtggaactcataaacccgtgcaagaagtcatcattatgttaaagagcgagctcgtggagcagaggaagagcatagcgagggtgacggatgaattatgtgttctgaaagccacagctgaattgctaaaatcgcaattgaagaaagagaaagcagcacttgctgccgctcagcagatggaagtgatggcatccatgtccactcagtctctcaagatggacatcaaactgtcacagcaggaacttgaagcacttcatgccaaggcaaaggagtgccgagatagatcgggcaaggctctgcaagatgcgtcccatgaagctgacgaggcgaaggttattgctaccaaggctcagggggagctaaaaaagacagaggaagaagtggcgcaagcgaaggctgctctgagcactgtggaatccaagctcgaagcagttctgagggacatacaggcagcgaaagcgtccgagaggctggcgctcgatactctgacgacgacgacactggaggagcacagcaaggtcggcgctcgatactctgagacggtcacgcttgacctggatgagtacacgtctctggttcagaggtcacgtcaggcagaagaggctgcgcacgagaagacaacagctgcttccaccgcagaggttgaggcggcaaaggagtccgcggcgcgcaccatatccagactgaacgagatcttgcaggccttggaagagcagaagcaggcactggcagccgccaccgagcgggcgggcagggcgagcgaaggcaagctggccatggagcaggagctgaggcaacggagagaggaggagaacgggaagcgccgccgcatggccagtgaagctccaaagcctgtaaccgggcctcggagcgctgcagagatcgcgggtagagtcgacatgacgttgacgtgcacgggcaaaggagatagtagctgtcccgccgcgtcggtccatccggtgtcggacgcgtccgggaccgggaccgggaggagcagccccagcgatgcggccctgccagtgccagtgccagcgaagacgaagaaggcaaagaagctgccgttcttcactcgcgtcgtcatgttcctggggggcaggaggaggaggaggctcagagctgccaggtgattttccgtttccttgtgttccttatctgtgtgcccgtgtcgcgtgtggtgtttgtcagtgctgggagcgtgtaaacttcactggtttttactcgattgcacgttgttcgtgctggatgtgttcgaagattgtgtgagattgcatggggtgttcggtttgctggacaagacaagatggttctgtaacacggttg

SEQ ID NO: 9229 - DNA, 1871 bp, Zea Mays
attcagtcggcctcgctactttcctaagtggaaaaagggttctctcaggccatttccttgagccgttccgctgccattcgaccaccaccgccacggcggcgccgatgccgactacaaccactcgcagagactaccgcctccagccccgctgcttctcatctccacgcagccgtccgatggccaagcggctcgccggtgccgacaaagaggtgctcgtcgaggtggtgaggttcacgcataagagcggactgaggggctgtgacggcggctggaaggatttcctggcccagaacgacaggaagtttggcgcgtcggtgagcgacccgaggaagcgctccagggacgtgctgttcgccttcctgcagaccttccccaaggatttccagaagaaacacttgatgccactagtccgacgagagccaccggaagacaacgcaggcattcctcagtccccaaagtgagctgctgggcagctgctcatcaccaacacaattctaacccccagcagtttcaggcgattggcatacgaatcgcaaagacgctgcatgccttctatcagttctgccgaccacacacaatatttggaaccataataggcattacttcggtgtctatcctgccagtgaaagagcctggacgattttacgttgatagctatatggggatttctcgaggctttggccgccgcattatgtatgaacgtttatgtagtagggctgaacaaggtcaataagccaaccctcccattagcgttcggagagttttcaatgccaactgcagtattgttagtagtggcattcttggtcatgagcattagcatcggaataagatcaaagtctgctccattgatgtgtgctttgcttgtttgcttccttcttggaagcgcatactccattgacgttccattactccggtggaagcgacatgcttttctagctgcattctgcataatctttgtgagggctgtagtggtccagttagctttctttgcacacatgcagcaacatgttctgaagaggcccttggcacctacaaggtcggtggtctttgcaacatgtttcatgtgttgcttcgctgcagtaatagcgctattcaaggatattcctgatgtcgatggagatagagatttcggcattcagtccatgactgtacgattaggcccaacagagagtgcataggctctgcattaatattctcatgacagcatacgcagccgcaattttggtaggcgcgtcatctacgaacctgtatcagaagattgtcattgtgtctggtcatggcttgcttgcctccacactctggcaaagagcacaacaatttgacattgagaataaggattgtatcacacaattttatatgttcatttggaagttattctacgccgagtattttcttataccatttgtgtagtaaagaatcatgcgaagaacaacacccctgctatagacatgtgaaggtttattgctaatgttactctaccccctgctatagacatgtgaaggtttattgctaatgttactctaccgaatggtctgaatgtctatgcgtcatttgaatgtaatatgactatttgttgtatcagggtaacaactggagcaaatgtaccatgtatattaagcattaatttaactgcatcatttgtaccatgtatattatgactatgtatgagatattgtctcttattagtactggatgtgatgtgtcttattatgactatggatgagacttttgtgatgtaattgatgagactatggttttaaatattgttatgtgattgtgtgtgagatattttatgtgaaaatatgatgtgctatatagttgttgatatatttgttatgttgtggaatgtggtgtaaaagaaaaataaacaa

SEQ ID NO: 9230 - DNA, 455 bp, Zea Mays
atcgtctgctggcatcgttccattctcctctaaaccctagccgcctagcgcctcgatctgagcagcctgtctcgcggaggtagttctggttgatttggtcctagatggcggaggaaaaagtggggcggatcttcgtcggcgggctgtcgtggaacaccacggagcgcacgctcgagcgcaccttcggtcagtacggcaaggtcatcgaggctcagctgctgattcacagagactgcagtcagttcaatttctgcatgttaggaagttagcaaagttgcaggaaaagaaattcactaatcatttgagctcactggttgtagtggaaagggagacaggccgctctaggggatttggatttgtcacattttcagaacctcgggctgtggatgctgccattcggggaatgcataacggagaactggatggccgcaatatttctgtgaacaaagctgaac

SEQ ID NO: 9231 - DNA, 2568 bp, Zea Mays
ggttggcctgtctgctcggcccgccgtcgtctcagctcttgtgttttctgttacggaaaaaaaaagaagaaaaaacaagccggggacgacggcggcgaggacgacgacgacgagagggacggaactggaccagcgcacgtgccgagatggcggcgctggatgacaaggccatgacggacctggagacgctggaggaggaggaagtgctgcgccggttaggcacagcggaggaggcgggcctcaccgacaacgaggccgcgcgacgcctccgtctccacggccccaacgtcgtcgtcctctcgcaccacgagggcagcatgcttcatggattcctaatggcgctcttctcgctctggggatgggatcatgtcttccccaagtacaataacatggtccgggtcatacttaactccatgtcgtgggttacagtactgactatagttgtgtctcttgctatcacctcagctggccaaagatcatgcgagctggccatcataattttcgtagtagctacatgcctcatagcatgctttactgcaatgcttgttttagagtatgctaaggctccgctggaggccaaagcccacgcaccaagggccaaggttctgagagatgggaattggagagatgtacatgcagcaaatctggtcccaggggatatcatatttctcaaagttggggacattgtcccagccaatgctcgcatactccgatttcagaaaatcgacacaatgacttgctgggccaaaaggtctgttgattgtgcgcatggcttcctcctatactatgcttggactgtttcctgtggccaaggaactgccgttgtcattgcaactggacgtggcattcccagaagtacattgcggctctacccacaacgttatgctcgacctgggcagcttaaagaaggagccatgcttactggctgcttctgtgcttccctggtacttgttggcacttttgctgagatagtcttaagatttttgttccaaaaacaaaattacagaggcatgccactcgacgcccattttatgccattgattggtggaatcccgatggcaatgcctacttttttttacctggcattggcattgggatctgtaaggctttgttttctggggattgctagccggggaacagttgcacttgaagatctagcaagtgtggatgtaatcctcttcaacatgactggtactttaacgtgtaatcagccctgttttgtacgggacaagattgagatgtttgcagatagcgttaataaagaccatgccatagttttagctgcacgggcatcaagatctcaacatgagttgtacattgaaccaattgatgcagctattctaagcctccttgatgatccggagcaggcacgactcggtgttcaagtcttagagcatcatgccagtttctttgttgcactgaaactgatgttccagactacatacatcgacgaaggcaatagattcaagtgttgcgtattcaaaggccatagctgtaggacatcaagtagactcttgttgggactttattgcccttctgccttacacagatgaccttagaagcgatagtgctgatgttgtcgatagccttatcgatctaggtttagatataagagtcctcacagaaagtccattgtcgaccacaaagcagatattcaccatttcatcaactgtccatcttgatcctgcaggtctaactccaatcttaattgtaatgaagtttggtgtccgtgtcattttacatttatggaactttgacttgtcaaatatcctggctttcatgattacagcttgtaattactgtacgtcctttgcaatgttatttgaaagggtggaattgaacaagtcaccagataaatggagagttcagaaaatcattacaagcggtgctgcttttggaagctacatagttcttactactgccattttttatagggttgcaacaactgcaaacccttttgcatgtaaattcaaacatatatcactgatgggcagtgatgaggaaatcagatctgctttgttccttcagattagcacagtaaaccaggctattgcactctttgttcattctgatggttgctgtatcataagatggcctggaccttttgtcacatttgcctttgttgtttctcaaacggtggcaacacaaaaagttgtccatggcgacttgaattttgcactaacaaagggtattggctgtgttagggccggattgatatggttgtataacttagtcctacttttggccctggttttagtttgtcgcaaatggagacacgcaaagatgactagtgaaaagttgttgacaatatgcttgcgttcagctatcctacacatagttcttacctggtttctgtacgtaatacttgatgttagggtgcaacagccagtctctagtagatagatcgaacacatagttagggctttttccttctgcagtgtcatctgtaaaactctcaagttaattaatatcttgcataatagattttgcagttggttggcccttcatgattcagaacttgcaactgtgagaccactatattattttaagttaaaactttgctgaagc

SEQ ID NO: 9232 - DNA, 2861 bp, Zea Mays
ggttggcctgtctgctcggcccgccgtcgtctcagctcttgtgttttctgttacggaaaaaaaaagaagaaaaaacaagccggggacgacggcggcgaggacgacgacgacgagagggacggaactggaccagcgcacgtgccgagatggcggcgctggatgacaaggccatgacggacctggagacgctggaggaggaggaagtgctgcgccggttaggcacagcggaggaggcgggcctcaccgacaacgaggccgcgcgacgcctccgtctccacggccccaacgtcgtcgtcctctcgcaccacgagggcagcatgcttcatggattcctaatggcgctcttctcgctctggggatgggatcatgtcttccccaagtacaataacatggtccgggtcatacttaactccatgtcgtgggttacagtactgactatagttgtgtctcttgctatcacctcagctggccaaagatcatgcgagctggccatcataattttcgtagtagctacatgcctcatagcatgctttactgcaatgcttgttttagagtatgctaaggctccgctggaggccaaagcccacgcaccaagggccaaggttctgagagatgggaattggagagatgtacatgcagcaaatctggtcccaggggatatcatatttctcaaagttggggacattgtcccagccaatgctcgcatactccgatttcagaaaatcgacacaatgacttgctgggccaaaaggtctgttgattgtgcgcatggcttcctcctatactatgcttggactgtttcctgtggccaaggaactgccgttgtcattgcaactggacgtggcattcccagaagtacattgcggctctacccacaacgttatgctcgacctgggcagcttaaagaaggagccatgcttactggctgcttctgtgcttccctggtacttgttggcacttttgctgagatagtcttaagatttttgttccaaaaacaaaattacagaggcatgccactcgacgcccattttatgccattgattggtggaatcccgatggcaatgcctacttttttttacctggcattggcattgggatctgtaaggctttgttttctggggattgctagccggggaacagttgcacttgaagatctagcaagtgtggatgtaatcctcttcaacatgactggtactttaacgtgtaatcagccctgttttgtacgggacaagattgagatgtttgcagatagcgttaataaagaccatgccatagttttagctgcacgggcatcaagatctcaacatgagttgtacattgaaccaattgatgcagctattctaagcctccttgatgatccggagcaggttgctcatcactgtggcagcagcaaagaagttaaagagaaaataagcatgataatggatgaacttgcccttgatggatatcaggccatagctgtaggacatcaagtagactcttgttgggactttattgcccttctgccttacacagatgaccttagaagcgatagtgctgatgttgtcgatagccttatcgatctaggtttagatataagagtcctcacagaaagtccattgtcgaccacaaagcaggtctatctttatcttctatgtacctcctgcaaagttttgtttttgcaagttcttgttaccattttgctatcttcatatcttagtacagaggacaaaagcgatatagtaagaagactaagaaatttcggttgtcattgtgcaatggttgggtatgaatttcttgatcatgatgccataggagagagccatattgggatttcagttgctgatgcaactgattacacaaaaagtgaatctgatcttgttttgactcagcctgcactgatgcctgtttcttcagcagtgcaaatcagtaggaagatttgtcagatgctaagaagctacactatattcaccatttcatcaactgtccatcttgatcctgcaggtctaactccaatcttaattgtaatgaagtttggtgtccgtgtcattttacatttatggaactttgacttgtcaaatatcctggctttcatgattacagcttgtaattactgtacgtcctttgcaatgttatttgaaagggtggaattgaacaagtcaccagataaatggagagttcagaaaatcattacaagcggtgctgcttttggaagctacatagttcttactactgccattttttatagggttgcaacaactgcaaacccttttgcatgtaaattcaaacatatatcactgatgggcagtgatgaggaaatcagatctgctttgttccttcagattagcacagtaaaccaggctattgcactctttgttcattctgatggttgctgtatcataagatggcctggaccttttgtcacatttgcctttgttgtttctcaaacggtggcaacacaaaaagttgtccatggcgacttgaattttgcactaacaaagggtattggctgtgttagggccggattgatatggttgtataacttagtcctacttttggccctggttttagtttgtcgcaaatggagacacgcaaagatgactagtgaaaagttgttgacaatatgcttgcgttcagctatcctacacatagttcttacctggtttctgtacgtaatacttgatgttagggtgcaacagccagtctctagtagatagatcgaacacatagttagggctttttccttctgcagtgtcatctgtaaaactctcaagttaattaatatcttgcataatagattttgcagttggttggcccttcatgattcagaacttgcaactgtgagaccactatattattttaagttaaaactttgctgaagc

SEQ ID NO: 9233 - DNA, 2916 bp, Zea Mays
ctaacggttgtggctggttggcctgtctgctcggcccgccgtcgtctcagctcttgtgttttctgttacggaaaaaaaaagaagaaaaaacaagccggggacgacggcggcgaggacgacgacgacgagagggacggaactggaccagcgcacgtgccgagatggcggcgctggatgacaaggccatgacggacctggagacgctggaggaggaggaagtgctgcgccggttaggcacagcggaggaggcgggcctcaccgacaacgaggccgcgcgacgcctccgtctccacggccccaacgtcgtcgtcctctcgcaccacgagggcagcatgcttcatggattcctaatggcgctcttctcgctctggggatgggatcatgtcttccccaagtacaataacatggtccgggtcatacttaactccatgtcgtgggttacagtactgactatagttgtgtctcttgctatcacctcagctggccaaagatcatgcgagctggccatcataattttcgtagtagctacatgcctcatagcatgctttactgcaatgcttgttttagagtatgctaaggctccgctggaggccaaagcccacgcaccaagggccaaggttctgagagatgggaattggagagatgtacatgcagcaaatctggtcccaggggatatcatatttctcaaagttggggacattgtcccagccaatgctcgcatactccgatttcagaaaatcgacacaatgacttgctgggccaaaaggtctgttgattgtgcgcatggcttcctcctatactatgcttggactgtttcctgtggccaaggaactgccgttgtcattgcaactggacgtggcattcccagaagtacattgcggctctacccacaacgttatgctcgacctgggcagcttaaagaaggagccatgcttactggctgcttctgtgcttccctggtacttgttggcacttttgctgagatagtcttaagatttttgttccaaaaacaaaattacagaggcatgccactcgacgcccattttatgccattgattggtggaatcccgatggcaatgcctacttttttttacctggcattggcattgggatctgtaaggctttgttttctggggattgctagccggggaacagttgcacttgaagatctagcaagtgtggatgtaatcctcttcaacatgactggtactttaacgtgtaatcagccctgttttgtacgggacaagattgagatgtttgcagatagcgttaataaagaccatgccatagttttagctgcacgggcatcaagatctcaacatgagttgtacattgaaccaattgatgcagctattctaagcctccttgatgatccggagcaggcacgactcggtgttcaagtcttagagcatcatgccagtttctttgttgcactgaaactgatgttccagactacatacatcgacgaaggcaatagattcaagtgttgcgtattcaaaggttgctcatcactgtggcagcagcaaagaagttaaagagaaaataagcatgataatggatgaacttgcccttgatggatatcaggccatagctgtaggacatcaagtagactcttgttgggactttattgcccttctgccttacacagatgaccttagaagcgatagtgctgatgttgtcgatagccttatcgatctaggtttagatataagagtcctcacagaaagtccattgtcgaccacaaagcagtacagaggacaaaagcgatatagtaagaagactaagaaatttcggttgtcattgtgcaatggttgggtatgaatttcttgatcatgatgccataggagagagccatattgggatttcagttgctgatgcaactgattacacaaaaagtgaatctgatcttgttttgactcagcctgcactgatgcctgtttcttcagcagtgcaaatcagtaggaagatttgtcagatgctaagaagctacactatattcaccatttcatcaactgtccatcttgtgagttcaatttatgattattttctataatccttctaaagtacaggatcctgcaggtctaactccaatcttaattgtaatgaagtttggtgtccgtgtcattttacatttatggaactttgacttgtcaaatatcctggctttcatgattacagcttgtaattactgtacgtcctttgcaatgttatttgaaagggtggaattgaacaagtcaccagataaatggagagttcagaaaatcattacaagcggtgctgcttttggaagctacatagttcttactactgccattttttatagggttgcaacaactgcaaacccttttgcatgtaaattcaaacatatatcactgatgggcagtgatgaggaaatcagatctgctttgttccttcagattagcacagtaaaccaggctattgcactctttgttcattctgatggttgctgtatcataagatggcctggaccttttgtcacatttgcctttgttgtttctcaaacggtggcaacacaaaaagttgtccatggcgacttgaattttgcactaacaaagggtattggctgtgttagggccggattgatatggtcgcaaatggagacacgcaaagatgactagtgaaaagttgttgacaatatgcttgcgttcagctatcctacacatagttcttacctggtttctgtacgtaatacttgatgttagggtgcaacagccagtctctagtagatagatcgaacacatagttagggctttttccttctgcagtgtcatctgtaaaactctcaagttaattaatatcttgcataatagattttgcagttggttggcccttcatgattcagaacttgcaactgtgagaccactatattattttaagttaaaactttgctgaagc

SEQ ID NO: 9234 - DNA, 3120 bp, Zea Mays
ctaacggttgtggctggttggcctgtctgctcggcccgccgtcgtctcagctcttgtgttttctgttacggaaaaaaaaagaagaaaaaacaagccggggacgacggcggcgaggacgacgacgacgagagggacggaactggaccagcgcacgtgccgagatggcggcgctggatgacaaggccatgacggacctggagacgctggaggaggaggaagtgctgcgccggttaggcacagcggaggaggcgggcctcaccgacaacgaggccgcgcgacgcctccgtctccacggccccaacgtcgtcgtcctctcgcaccacgagggcagcatgcttcatggattcctaatggcgctcttctcgctctggggatgggatcatgtcttccccaagtacaataacatggtccgggtcatacttaactccatgtcgtgggttacagtactgactatagttgtgtctcttgctatcacctcagctggccaaagatcatgcgagctggccatcataattttcgtagtagctacatgcctcatagcatgctttactgcaatgcttgttttagagtatgctaaggctccgctggaggccaaagcccacgcaccaagggccaaggttctgagagatgggaattggagagatgtacatgcagcaaatctggtcccaggggatatcatatttctcaaagttggggacattgtcccagccaatgctcgcatactccgatttcagaaaatcgacacaatgacttgctgggccaaaaggtctgttgattgtgcgcatggcttcctcctatactatgcttggactgtttcctgtggccaaggaactgccgttgtcattgcaactggacgtggcattcccagaagtacattgcggctctacccacaacgttatgctcgacctgggcagcttaaagaaggagccatgcttactggctgcttctgtgcttccctggtacttgttggcacttttgctgagatagtcttaagatttttgttccaaaaacaaaattacagaggcatgccactcgacgcccattttatgccattgattggtggaatcccgatggcaatgcctacttttttttacctggcattggcattgggatctgtaaggctttgttttctggggattgctagccggggaacagttgcacttgaagatctagcaagtgtggatgtaatcctcttcaacatgactggtactttaacgtgtaatcagccctgttttgtacgggacaagattgagatgtttgcagatagcgttaataaagaccatgccatagttttagctgcacgggcatcaagatctcaacatgagttgtacattgaaccaattgatgcagctattctaagcctccttgatgatccggagcaggcacgactcggtgttcaagtcttagagcatcatgccagtttctttgttgcactgaaactgatgttccagactacatacatcgacgaaggcaatagattcaagtgttgcgtattcaaaggtgatcctgcaaaggttgctcatcactgtggcagcagcaaagaagttaaagagaaaataagcatgataatggatgaacttgcccttgatggatatcaggccatagctgtaggacatcaagtagactcttgttgggactttattgcccttctgccttacacagatgaccttagaagcgatagtgctgatgttgtcgatagccttatcgatctaggtttagatataagagtcctcacaggtcattctgttgtgcatatcgccatatcctgctgtcgagatttttgctattgtcattttctatgataaacatgtcttcatcatatatgtatattgttttgtcctctctacagaaagtccattgtcgaccacaaagcaggtttgtggaaagcttggaaaactaggtaccaatgtggtacctgcacatatagtgtttgagttagctcgcaataacagagaagtccattcaaacatcaacgggatttctgatctctttccaggtctatctttatcttctatgtacctcctgcaaagttttgtttttgcaagttcttgttaccattttgctatcttcatatcttagtacagaggacaaaagcgatatagtaagaagactaagaaatttcggttgtcattgtgcaatggttgggtatgaatttcttgatcatgatgccataggagagagccatattgggatttcagttgctgatgcaactgattacacaaaaagtgaatctgatcttgttttgactcagcctgcactgatgcctgtttcttcagcagtgcaaatcagtaggaagatttgtcagatgctaagaagctacactatattcaccatttcatcaactgtccatcttgtacgtcctttgcaatgttatttgaaagggtggaattgaacaagtcaccagataaatggagagttcagaaaatcattacaagcggtgctgcttttggaagctacatagttcttactactgccattttttatagggttgcaacaactgcaaacccttttgcatgtaaattcaaacatatatcactgatgggcagtgatgaggaaatcagatctgctttgttccttcagattagcacagtaaaccaggctattgcactctttgttcattctgatggttgctgtatcataagatggcctggaccttttgtcacatttgcctttgttgtttctcaaacggtggcaacacaaaaagttgtccatggcgacttgaattttgcactaacaaagggtattggctgtgttagggccggattgatatggttgtataacttagtcctacttttggccctggttttagtttgtcgcaaatggagacacgcaaagatgactagtgaaaagttgttgacaatatgcttgcgttcagctatcctacacatagttcttacctggtttctgtacgtaatacttgatgttagggtgcaacagccagtctctagtagatagatcgaacacatagttagggctttttccttctgcagtgtcatctgtaaaactctcaagttaattaatatcttgcataatagattttgcagttggttggcccttcatgattcagaacttgcaactgtgagaccactatattattttaagttaaaactttgctgaagc

SEQ ID NO: 9235 - DNA, 3156 bp, Zea Mays
ggttggcctgtctgctcggcccgccgtcgtctcagctcttgtgttttctgttacggaaaaaaaaagaagaaaaaacaagccggggacgacggcggcgaggacgacgacgacgagagggacggaactggaccagcgcacgtgccgagatggcggcgctggatgacaaggccatgacggacctggagacgctggaggaggaggaagtgctgcgccggttaggcacagcggaggaggcgggcctcaccgacaacgaggccgcgcgacgcctccgtctccacggccccaacgtcgtcgtcctctcgcaccacgagggcagcatgcttcatggattcctaatggcgctcttctcgctctggggatgggatcatgtcttccccaagtacaataacatggtccgggtcatacttaactccatgtcgtgggttacagtactgactatagttgtgtctcttgctatcacctcagctggccaaagatcatgcgagctggccatcataattttcgtagtagctacatgcctcatagcatgctttactgcaatgcttgttttagagtatgctaaggctccgctggaggccaaagcccacgcaccaagggccaaggttctgagagatgggaattggagagatgtacatgcagcaaatctggtcccaggggatatcatatttctcaaagttggggacattgtcccagccaatgctcgcatactccgatttcagaaaatcgacacaatgacttgctgggccaaaaggtctgttgattgtgcgcatggcttcctcctatactatgcttggactgtttcctgtggccaaggaactgccgttgtcattgcaactggacgtggcattcccagaagtacattgcggctctacccacaacgttatgctcgacctgggcagcttaaagaaggagccatgcttactggctgcttctgtgcttccctggtacttgttggcacttttgctgagatagtcttaagatttttgttccaaaaacaaaattacagaggcatgccactcgacgcccattttatgccattgattggtggaatcccgatggcaatgcctacttttttttacctggcattggcattgggatctgtaaggctttgttttctggggattgctagccggggaacagttgcacttgaagatctagcaagtgtggatgtaatcctcttcaacatgactggtactttaacgtgtaatcagccctgttttgtacgggacaagattgagatgtttgcagatagcgttaataaagaccatgccatagttttagctgcacgggcatcaagatctcaacatgagttgtacattgaaccaattgatgcagctattctaagcctccttgatgatccggagcaggcacgactcggtgttcaagtcttagagcatcatgccagtttctttgttgcactgaaactgatgttccagactacatacatcgacgaaggcaatagattcaagtgttgcgtattcaaaggttgctcatcactgtggcagcagcaaagaagttaaagagaaaataagcatgataatggatgaacttgcccttgatggatatcaggccatagctgtaggacatcaagtagactcttgttgggactttattgcccttctgccttacacagatgaccttagaagcgatagtgctgatgttgtcgatagccttatcgatctaggtttagatataagagtcctcacagaaagtccattgtcgaccacaaagcaggtttgtggaaagcttggaaaactaggtaccaatgtggtacctgcacatatagtgtttgagttagctcgcaataacagagaagtccattcaaacatcaacgggatttctgatctctttccagaggacaaaagcgatatagtaagaagactaagaaatttcggttgtcattgtgcaatggttgggtatgaatttcttgatcatgatgccataggagagagccatattgggatttcagttgctgatgcaactgattacacaaaaagtgaatctgatcttgttttgactcagcctgcactgatgcctgtttcttcagcagtgcaaatcagtaggaagatttgtcagatgctaagaagctacactatattcaccatttcatcaactgtccatcttgtgagttcaatttatgattattttctataatccttctaaagtacaggatcctgcaggtctaactccaatcttaattgtaatgaagtttggtgtccgtgtcattttacatttatggaactttgacttgtcaaatatcctggctttcatgattacagcttgtaattactgtgagcatcagttccaaaaggacaccaccattatttgcaatatgtattttctttttttattttccttgtttctatttttattttcaggtacgtcctttgcaatgttatttgaaagggtggaattgaacaagtcaccagataaatggagagttcagaaaatcattacaagcggtgctgcttttggaagctacatagttcttactactgccattttttatagggttgcaacaactgcaaacccttttgcagtgagtgcttttccttccgaagaaagttaacatcttgatttcaaggtgatgaagagctgattatttggtacttggacagtgtaaattcaaacatatatcactgatgggcagtgatgaggaaatcagatctgctttgttccttcagattagcacagtaaaccaggctattgcactctttgttcattctgatggttgctgtatcataagatggcctggaccttttgtcacatttgcctttgttgtttctcaaacgggccggattgatatggttgtataacttagtcctacttttggccctggttttagtttgtcgcaaatggagacacgcaaagatgactagtgaaaagttgttgacaatatgcttgcgttcagctatcctacacatagttcttacctggtttctgtacgtaatacttgatgttagggtgcaacagccagtctctagtagatagatcgaacacatagttagggctttttccttctgcagtgtcatctgtaaaactctcaagttaattaatatcttgcataatagattttgcagttggttggcccttcatgattcagaacttgcaactgtgagaccactatattattttaagttaaaactttgctgaagc

SEQ ID NO: 9236 - DNA, 3335 bp, Zea Mays
accaacccgacccaggactctcccatcgctcatcgcccgtgccctgcggtgttctactcactcccagctgcgacaatccccctcatcgcccgccccccctggtctcgtctctccttcgcgcatctcaccgccatctcactcccgaaccccccttcctttgcttcccgcgtctaatttagcgccagaacatttgaattccccgcaacttccgcttccagcggcttctcgaaccttccggaggcgccgccgatcgaccccggctccatccccttgcccccctagggtttcgcgttcccctcggggatgggggacgccgccaccgccgcagcggcggcggcagcgtcgcccgcttgcgccgcgcggaagcggcggcgcggcgacgacagcgcggggctgaggcgggtggcggagatcgtgatggtcctggccgcggccggggaggtacgcggcgggaggcagcccacggccgcggagcgcgcgctggcggccgaggcgcgggagactctggccaccgccgtcgccgagagggccgtgcggcccaaggatctgttcccgggggaagcggtgcgcgcggtcgtcgaggatctcgggctcaaccgctccaaggacccagctgccatggggtttcgcccgcccaaggcctccatcgccgataggctcatgcttactaagcgcaagatggaagaagtcaaggaagctccagtggttagcgcacctcaaacagtcgtctcaagtggaacgtctgagttccatggtttgaatggggctaccaagtttggtgttggagttcctaggaacccaccagttccatctttagctgctactggcccattaacctctacatccccagttaccttgaagccaccaggatcatctcctgtaaaaccagttgccaactcatcagttgttcctctagtcaatactggtccatcaaaccttaaattggacaaaaatgttagtggtcctctgaatttagcattcagtggagcaacggtcgtccactcaaacaagtcaactttagacacatctgctaggcccgatgtaaatgctgtacagagttccaatcagacggtgaaaaaccatgacacaaaaccagtggcagttcaagccgcgacaggtaaccctgttatgggtcatcgtgctacaccaggcgtggcatttgctccaccaaaacctactttcatcaatcacaatgagatagcaaagaatgttctacaatttcttcaccaacctgcaaaccatcctagctggactccaccatcaactgagtacatgcattctcgtttgtgctgtcaaatatgcaaagttgatatcattggtacagacaatttacttgtttgtgatgcttgcgagaggggagtacacttgaaatgccttcatcagtatggcaataagggcgtccccaaagctgagtggcattgttctgcatgcctgactcagagtaagggaaaacccttgccaccaaaatatggcaaggttacaaggactgtagttgcatcaaagactgctccacctggtggtggagcacagctttctttgcaggaatcagcagaaaacatggctgcaaaggaaaatcaccaaaagttggctgcaaatggaaatcttatgaagccattctccattcatggtggcagcacagtacccgacagtaatgtattggcactgagtgctgtcatggctggttcacaatcacaattagtttctaccttgagaccatcaatagtcgttaaagctgaaacaccctctaatggaaaggaaggaactgggcaaccatgcaatactgcaatacaacctaatgtgcgatcatcttctcttaacaacagattgagaagtgattcctgtttgaaccctgctgattcagcaaatgaaatcatgcatggtaagcatgctgcagaaatttctggtgttgaagcaaaggtcaagtctgaagcaaactctgaggttgttgtgagtacagatgaggaattggttcatagcagtggaacatcaatcgaaactgaacgagccaaggttgtcgctattgaagaaaacagggcacaatcaacctttgagacagataaaatgaaagttggggaaacaactatcaacacaggaacaacagatcaatgcatcaatactgaagaaaagctccccagtttagcaacttctgaggcacacacaatcactgacgtgaagatgactagcaatacaggaataccagtacagcaacacaacattgctactattgaagagaagacccagattgatgcagtgtctgatccacatccacatgcaatccaagatattcaagatatggaaatgggcaccaacaatggaccacccatagatcaaacaagcagtcttgttgaagaaaacccccctggacaatcctcttcaattgctgatgcgtgtgtcactgctaatactggaataccaacagatcaaacacagcatccaaatgagtcaactgaaaatgcagtaaagaaatctcccaacagagaactatataaagaaaaaccgggctgcaacataacctcagatattacccaaaaagtaacttcaaatggcatcatgtgccctgaggacaaaactttatgtgttcatgaagataaagcagtgggttgtgacacagaagcaaaagaagaaaactaatttagtagcaggttgcatccaattttcattttccagatggaactgttctgaatctaccattattttaccaacgtcagtgattgactgtgttctctacattctcttggacagcattatacatttagccattgccaaccatttttccaggaggtttgttctgtgccccttggaaacatgctcaccaggcttactccattcgtaatttactggtatccattgcctcctggtgtagtttagagaatcccagaacacaggaaatataatcgtgatgttgtactttatgtagattgataatcttgagttcctgactattgaattccatttccccctttatttgttccgtgctcatctggaatgctgtaactagatagggtttagctgagttaggactggattatcaagtcataataatgatacgtgccttcgccatcccttcggaccatgttccaatgtgatacaatctactaccatgcaatatatcaccatcagcctgctaacgcacgccactagctttaagtttccaatccttctgtcagtttgtaatgtttgcagctacttcatccgtttcaatttacacttcctatgtccaatctaatggtgtgtttggttgaaatgatgggatgggatgggacgattgtttggttcatggccatcaggtggggcgagttcaggtttccgtaggcaccaacgcgtcctggaggtcg

SEQ ID NO: 9237 - DNA, 2099 bp, Zea Mays
aattttcacttggcctcctcatcttttcctccttttcggccggcgtcatcgccgaacgcggatacaccgatacacataccccggctagctgtctggactctggagtgtcctccgggctaagcaaacccatagcccgatcagatcgatggcaccggcgccccgcgcttccagcttcttctcggtgctcctcgtcctcctctttgcgctgtcggtggggtgcgcgtccgccaccggcgtcttccaggtgcgccgcaagttcccgcgccacggaggacggggtgtggcggagcacctcgcggcgctgcggaggcatgacgccaaccgccacggccggctccttggcgccgtcgacttggccctcggcggcgtcgggctccccacagataccggcacagcctgtactacacccggatcgagatcggctcgccgcccaagggctactacgtgcaggtggacaccggcagcgatatcctctgggtcaactgcatccgctgcgatggctgccccaccagaagcggacttgggatagagctgacgcagtacgatccggctgggagcgggaccacggtggggtgcgagcaggagttctgcgttgccaacagcgcgggcggcgtgccccccacgtgcccctcgacgtcgtcgccgtgccagttcaggatcacctacggagatgggagcacaaccaccggcttctacgtcacagacttcgtgcagtacaaccaggtgtccggcaacggccagaccaccacgtccaatgccagcatcacctttgggtgtggtgctcagcttggtggggatttgggatcctcgaaccaggcccttgatgggattcttgggttcggccagtcggattcgtcgatgctatcgcagttggctgctgctcgtagagtgaggaagatttttgctcactgcttggacactgtgcgtggtggtggcatcttcgctatcgggaatgtggtacagcccaaagtaaagacgacgccgttggtgcccaacgtgacacactacaatgtcaatctgcaaggaatttctgttggtggtgctacacttcagcttccaacaagtacttttgattctggtgacagtaaaggcactatcattgacagtgggacaacactggcatatcttccgagggaagtttataggactttgttggctgcggtctttgataagtaccaagatttgcccttacataattatcaagacttcgtgtgttttcaattttctggaagtatagatgatggatttcccgtaatcacctttagttttgagggagaccttacactgaatgtttacccagatgattaccttttccagaacaggaatgatttatactgtatgggattcctggatggtggtgtacagactaaagatgggaaagatatgctcctcttaggagacctggtcctctcaaacaaactagtagtttatgacttggaaaaagaagttattggatggacagactacaactgctcctcgagcattaaaattgaggatgacaagactggctcagtgtacactgtcgacgcacaaaacatctccgctgggtggagatttcaatggcacaactccttaattctgttgatattaataaggacaatctggagctgtttggttatagcctaacgctggatctaggactaaagccccgtttgtttccttccaagattatataatccagctcgtggattatataagcacctattgacctgcttatagattatcataatctagatatccggattatataattcacctaataatctatattgtttgtttaactctcaatttatttaagctagattatataatatagatggtaaacaaacaaggcctaaaacatattttctgtaacaaaaaatagttgagttcagaagttcaacaaagagtacagaatattatatagattgtcccttgtgttttagacgtaaactgtagcaacatatcaagctactaaaatgactttagttgatgtcaggctgttttgcaccttctgcgtttctatcagatatatcatcaggtgtacgtgttactgtgcaatgtaccgtctgttcaggaaggatttgtgtaaatgtagtaattcaatcgtagaaactcag

SEQ ID NO: 9238 - DNA, 11391 bp, Zea Mays
aaacaacaatcacaaccctctctctccctctccttcacgtagccgcctctgaatccccacctctctgctctcccgtcggcctcctccgcgaccgatgtgtgtgccccgccgccggcccaaaacactagaggtgacgagcaggtaaggggttccgatcggagatggcggcggcggcggccgcacatagagccagcttcccgttgcgcctgcagcagatccttgctggaagccgcgctgtctcacctgcgatcaaggtcgagtctgagccgcccgcaaatgtcaaagcatttattgatcaagtaatcaatattccactacatgacattgccataccgctatcaggcttccgttgggagttcaataagggaaatttccaccactggaagcctttatttattcattttgacacatatttcaagacatacatttcttctcggaaggatcttcttttatctgatgatatgactgaggctgaacctatgccaaagaatgccatcttgaaaattttaatagttatgcagattattttggagaactgtcagaatagaagttcttttactggtcttgagcatcttaagcttctcctggcatcgtcagaccctgagatagttgtagcagcattggaaactcttgttgccttggtcaaaataaatccttcaaagttgcatatgaatggaaagctaattagctgcggatccataaacacccatcttctatcattggcccaaggatggggcagcaaggaggaaggcctaggcatatattcttgtgttgtggcaaatgaaggaaaccagcaggggggcctgtccttgttcccagtagacttggagagcaaatatcagcatcgtcttggttcaactcttcattttgagtataatttgggttctgcacagtaccctgaccaaactagtgacaagggcaagtcatctaatttgtgtgtgatacatattccagacatgcatcttcagaaagaggatgacttgagcatactgaagcaatgcgtggacaaattcaatgtgcctccagagcacaggtttgcattgcttacaaggataagatatgcccgcgccttcaactccacacggacttgtagtatctatagccgcataagtcttctttcgttcattgtacttgtgcaatcaagtgatgctcacgatgagctcacatatttctttacaaatgaaccagaatacataaacgagttaatcaggcttgttcggtcagaagattctgtccctgggcccattcgtgcacttgctatgctagcactgggagcacagctggcagcatatgcatcatctcatgagcgtgctaggatattgagtggctcaagtatcatttctgctggtggaaatcgtatggtgttgctcagtgtcttgcagaaagcaatattctcactcaatagcccaaatgatgcctcatctcctctaattgttgatgctcttcttcagttttttctgctccatgtattgtcctcatcaagttcagggactacggttagaggctcaggcatggttcctcctctcttgcccctgctgcgagataatgattcttctcatatgcatcttgtctgcttggcagtgaagactcttcaaaagcttatggagtacagcagccctgctgtttctctgttcaaagacttgggtggtgtagaccttttgtctcggaggttacatgtagaagtgcagcgtgttattggtactgctgatggtcataattcaatggttactgatgcagttaaatcaaaagaggaccacctgtactcccagaagcgattgattaaagctttgcttaaggctttggggtcttctacttattcccctgggattcctgctcgttctcaaagctcccaagataattcattgcctgtgtcactttcccttatatttcagaatgtagaaaagtttgggggcgacatttatttttcagcagttacagttatgagcgaaataatccataaagatcctacatgctttcctgctttgaaagaacttggtcttccagatgcttttctctcatcagtgactgctggggtaataccatcttgtaaagccctgatctgtgttcctaatggcctgggtgcaatatgcctcaataaccaaggacttgaggctgtcagggaaacttcagcactacgatttcttgtatataccttcactagcaggaaatacttgataccactgaatgagggcgttgttcttctagctaatgcagcagaagagcttcttcgtcatgtgcaatccctgagaagtattggtgttgacatcattattgaaataatcaataaactaagttcatctctgaaagatagaaacaatgaaacagccatcttggaagaaaaaacagatatggaaactgatgttgaaggtcgtgatttggtaggtggtatggattccagtgtggagggcagtaatgatgaacagttttctcatttgagcattttccatgtgatggtattggttcaccggacaatggaaaactctgaaacctgccggttatttgtcgaaaagggaggtctaaatgctcttttgacactcttgttgaggcctagcattacactgtcatctggagggatgcctattgctttgcatagcacaatggtgttcaagggatttactcagcatcactctactccacttgcacgtgcattttgctcgtctttaagggagcatttgaagagtgcattaggggaacttgataaagtttctaactcatttgagatgaccaagattgaaaaaggagcgataccttctttgtttgttgttgaatttctgctatttttagctgcctcaaaagacaatcgttggatgaatgctttgctctcagaatttggcgatgctagcagggaggtcctggaagatattgggcgagtccaccgggaagtgctttggaaaatttcgctttttgaagaaaacaagattgacgctgaaattagtttatcttcttccacatctgaagcccagcagcctgacttgtctgccagcgacattggtgatagcagatacacttctttcaggcaatatcttgatccaattttaaggcgaaggggttctgggtggaacatagagtctcaagtgtctgacctcattaatatgtatcgagacattggcagtgcagctagtgactctcagagagttggttctgatagatattctagtctgggtttgccctcaagttcccaggaccagtcttccagttcatctgatgcaaatgtcagcacaagatcagaagaggaaaagaaaaattctgagcattcctcctgctttgacatgatgagatctctctcctaccatatcaaccatctttttatggagcttggtaaagcaatgcttcttacatctcgtcgggagaacagtcctgtaaacctatccccatccgttatatctgttgctaacaacattgcttctattatgttggaacacctcaactttgaaggacattcggtaagttctgagagggagatgactgttaccacaaaatgccaatatcttggaaaggtagctgaatttattgatgggatattattagatcggccagaatcctgtaatccaattatggtaaattcattctattgctgtggtgtcattcaggccatcctgaccacatttcaggccaccagtgagttgctcttcacaatgagcaggccaccatcttcacctatggagacagatagtaaaactggaaaggatggaaaggatatgaattcttcatggatctatggtcccctcatcagctatggcgcaattatggatcatcttgtgacctcgtcttttattctctcttcatcaactagacaattacttgagcagcctatttttaatggatctgtaaggtttcctcaagatgctgagaggttcatgaagttacttcagtctaaggtgttgaagacagttcttcccatctgggctcatcctgagtttccagaatgcaacattgagttgattagttcagtcatgtccatcatgaggcatgtttgctctggggtggaagtgaaaaacactgttggcaatgatggtgctcgtttaactggtccacctcctgatgagagtgcaatttcattgattgtagagatggggttttctcgtgcaagagctgaagaagcattaagacaagttggaaccaacagtgttgaaatagcaactgattggttattctcacacccagaggatgaacttgctcgggcgctcgcaatgtctcttgggaattctgatacacctgcacaagagggaaatggtaggtccaatgaccttgagctggaggaagtaacagtccagctgcctcctatagatgaaatgttacactcatgttttcagctacttcagacaaaggaagcattagctttccctgtcagggatatgcttgttactatcagctcacagaaggatggccaaaaccgagtaaaggtgcttacatatttgattgaaaatctgaaacaatgtgtggtggcatctgagccttcaaatgatactgcactgtctgctcttttacatgttcttgctttgattctccatggagatactgctgctcgtgaagttgcctcaaaggcaggaattgtgaaggttgctttagatctgctttccagctgggagttggaacttagggaaagtggcatgattgaggttcctaattgggtaagttcctgtttcctttctgttgatcagatgctccagttggaaccaaagttgccagatgttacagagctagatgttctgaaaagggataattcaaatataaaaacatcacttgtgattgatgagagcaagaaaaaagattcagaatccttgtcaagtgttggattactagacatggaggaccagtatcaacttttgaagatctgttgcaagtgcatagaaaaacagttgccttcggcttccatgcatgctattcttcagctctctgcaacactgacaaaagttcatgcagctgctatttgtttccttgagtctggtggtctgaatgcattgctatcattgccaacaagtagtttgttttctgggttcaacagtgtggcttctacaataattcgtcatattttggaggaccctcacacccttcagcaagcaatggaattagagatacgtcacagtcttgtcacagctgctaatcgacatacaaatcccagggttaccccacgcaattttgtccagaatttggcatttgtcatatatagggacccagtgatatttatgaaagctgtccagtctgtgtgccagattgagatggttggagatagaccgtatgttgttctgttaaaggatcgtgagaaagaaaggagcaaggagaaggataaggacaaatcagttgataaggataaagcaacaggtgcagtcgctaaggtagtgtccggggacacagctgcaggatctcctgcaaatgctcaggggaaacagtctgatttgaattcaagaaacgtgaaatctcaccgcaagccaccccaaagttttgtcactgttatagagcatctcttagatctggtgatgtcctttgttccgccaccccgtccagaggatcaagctgatgttgtctctggtactgccttatcttctgacatggacattgactgcagttctgcaaaagggaaagggaaagctgtgtctgtcccacctgaagagagcaagcatgctatccaagagtctactgcatcccttgccaaagcttcatttttccttaagttgatgacagatgtgttgttaacttacacatcatccattcaagttgttcttcgtcatgatgctgatctgagcaacatgcacggtccaaatcgaacaaattctggtctaattagtggtggaatctttaaccatatcctgcagcatttccttcctcatgccacaaagcaaaagaaagagagaaaaagtgatggagattggatgtataaattggcaacaagggctaatcagttcttggtggcttcatctattcgttctgcagaggcccgaaaaaaagttttttctgaaatctgcaatatacttcttgatttcaccgactcgtctgcagcttacaaagccccagtagcaaggatgaatgtgtatgttgatttactgaatgatattctgtcagcccgatcaccaactggctcctcattgtcagcagaatctgcagttacatttgttgaagttggtcttgctccttcattattgaaaatgcttcaaaatcttgatttggatcaccctgattctgcaaagatcgttactgccattgttaaggccctggaactcgtcagtaaggaacatgttcattcagcagataatgcaaaaggagagaactcatcaaagattgcttccgacagcaacaatgtgaattcatcacctaataggttccaggctcttgacatgacttctcagcccacagagatgattactgatcacagggaaacatttaatgctgaccaaacttcacaaagttcagattcagtggcagatgagatggatcatgatcgtgatatggatggtggctttgctcgtgatggtgaagatgattttatgcatgagatggctggcgatggaactggtaatgaatctacaatggaaatcagatttgaaatttcacgcaatagagacgatatggctgatgatgatgatgatgatgacaacactgatgaagatatgtctgcagaggatgatgaggaggttaatgaagatgatgaagacgaagatgaggagaataacaatttggaggaagatgatgcccatcagatgtctcatcctgacacagaccaggaagaccgtgaaatggatgaagaagaatttgacgaggatctactagaagatgatgacgatgaggatgaggagggagtcatccttcgcctggaggaggggattaatggcattaatgtgtttgaccatattgaagtatttggtggtagcaacaatttgtctggggatacactgcgtgtgatgcctctggacatttttggtacaagaaggcaaggccgaagtacctccatatacaatcttcttggcagggctagtgatcatggtgttcttgatcacccacttcttgaagagccttcctcgacattgaatttttcacatcaagaacaaccagagaatcttgttgagatggctttctctgatcgaaatcacgaaggtagctcctcccgtttggatgctatattccgcagcttgcgaagtgggcgtaatggacatcgctttaatatgtggctagatgacggtccacaacgcaatggatctgctgcccctgcagtacctgaaggcattgaagaattgctgatctctcatttgagtcggcccactcaacaacctggtgcccagactgttggtggtactcaagaaaatgaccaacccaaacatggctcagctgctgaggcaagggaaggatcgccagctcagcaaaatgagaacagtgaaaatacaacgaatcctgtagatctgtcagaaagtgctggccctgcacctcctgatagtgatgcacttcaaagagttgtgtccaatgcaagtattgagcatgctacggagatgcagtatgaacgcagcgacactataacacgtgatgttgaagcagtgagccaagcaagcagtggcagtggtgctactttaggggagagcctcagaagtttagaggttgaaataggaagtgttgaagggcatgatgatggtgaccggcatggaacttcaggggcctcagaacgattacctttgggtgatattcaagctgctgctcgatcacgcaggccatctggaaatgctgtggctgtaagcagtagagatatgtctctggagagtgttagtgaggttcctcaaaatccagatcaagaacctgatcataatgctagtgaggggaatcaggagcctagaggggttggtgctgacacaattgatcctacatttttggaggctcttcctgaggacttgcgagctgaagttctttcttcacgtcaaaatcaagtgactcagacttctaatgaccaacctcagaatgatggtgatattgatcctgaattccttgctgcactcccccttgatataagagaggaggtgctagctcaacaacgtagtcaaaggatacaacaacaatcacaagaattagaaggacaaccagttgaaatggatgctgtttcaattattgcaacattcccttcagaaattcgggaagaggtccttttgacatctcctgacaccctcctagctacactcacacctgcactagttgctgaggccaacatgttaagggagagatttgctcatcggtatcacagtagttctctttttggtatgaactccaggaacaggagaggtgagtcctcccgacgtgacataatggcagcaggacttgataggaacacaggtgatccctccagatcaactagcaaaccaattgagattgaaggtgctcctcttgttgatgaagatggccttaaagctcttattcggttacttcgagttgttcagcccctatacaagggtcagctgcagaggcttcttgtgaacctttgcacgcatcgggataacagacaggccttggttcaaattctggtggacatgcttatgcttgatctgcaggggttttcaaagaaatcagtagatgcatctgagccaccatttaggttgtatggatgccatgcaaatatcacatattcacgtcctcaatcttcaaatggtgttcctccattggtttcacgtcgtgtgctcgaaacactgacaaacttggcaagaagccatccaaatgttgctaaactcttgctctttcttgagttcccttgcccatcaagatgtcgctctgaagcacatgatcataggcatggcaaggctgttctagaagatggtgaagaacggaaagcctttgcggttgttcttttgttaactctgttgaatcagccactttatatgagaagtgtagctcatcttgaacagttactaaacctccttgaagttgtcatgcataacgctgagaatgaaattaatcaagctaagctagaagcgtcatctgagaagccatctgagaatgcagtgaaagatgtcaaagataacaccagcatttctgattcatatggatcaaagtcgaatcctgaggatggtagcaaagcccttgctgttgacaataaaagtaacttgcgagctgttctgcgaagtcttccccaatcagagcttagattgctatgttcattgcttgcgcatgatggattgtcggacagcgcttatctccttgtaggtgaagtgttgaaaaagattgtggctctggcccctttcttctgttgccatttcataaatgagcttgcacgatcaatgcaaagcttgacattttgtgcaatgaaggagcttcgtttgtacgagaattctgaaaaggctcttcttagttctacatcagccaatggaactgcgattcttagagttgtgcaggctttgagttctcttgtcagtactcttcaagatagaaaggatccagaacagcctgctgagaaggaccattcagatgcagtttcccagatttctgaaattaacacagcattggatgctttgtggttggaattgagcaactgcataagcaaaatagaaagctcttcagagtatgcatcaaatctaactcctgcttctgcaagtgcagctacattaacagcaggagtagcacctccattgcctgcaggaactcaaaacatattaccatatatagagtcattttttgtgacatgtgagaagttgcgtcctgggcaacctgatgctgtacaagaggcttcgacttctgatatggaagatgcttcaacatctagtggtgggcagagatcatattcctgtcaagctagtcttgacgagaagcaaaatgcttttgtgaaattctcagagaagcacagaagattgctgaatgcattcatccatcaaaaccctggattactggagaagtcattctcgctgatgttaaaaattcctcgcctgattgattttgacaacaaacgtgcatatttccggtctaaaatcaagcatcagtatgatcatcatcatcataatcctgttagaatttctgtgcgtcgttcatatattcttgaggactcctacaatcagcttaggatgcgctctcctcaggacttgaagggtagactcactgttcattttcaaggagaagaaggaattgatgctggtgggctgacaagggaatggtaccaatcgctttcacgagtcatttttgacaagagtgcccttctatttacaacagtcgggaatgatttgacgtttcaaccgaatcctaattctgtatatcaaactgagcacctctcatactttaaatttgctggacgagtggttggcaaagctctcttcgatggtcagcttttagatgctcattttactagatctttctacaaacacatacttggtgtcagggttacataccatgacattgaagctatcgatcctgcatactacaagaatttgaaatggatgctcgagaatgacataagtgatgttttggatctcaccttcagcatggatgcggacgaagagaaactgatattgtacgagaaggcagaggtatttgctgtcactgattgtgagttgattccaggagggcgtaacatcagggttactgaggagaataaacatcaatatgtagatcgggtagcagagcatcgactgacgactgcaatcaggcctcaaattaatgccttcctggaagggtttaatgaactcattccacgggagctgatatctatcttcaacgacaaagagcttgaacttctgattagcggtcttccagatattgacttggacgatttgaaagcaaatacagaatattctggctacagcatagcctctccagtcatccagtggttctgggaaatcgttcaggggttcagcaaggaagacaaagcccggttcctccagttcgtcactggcacttcaaaggtaccgttggaaggttttagtgcacttcaagggatctctgggccacaaaggtttcagatacataaggcctacggcagcacgaaccatctgccttcagctcatacttgctttaaccaactagacttgcctgagtacacatccaaagagcagctccaggagcggttactattggcaatccacgaagcaaatgaaggtttcggatttggctaatcagttatactcgtttgtccgtgccctgagaactgcaataggcgagcagcacgtgtgtggctgatcacattatgaactccacgtgtgtgatgagagatggccggagagaacatgtccaggatagacgaatgcccgtgggagaggtcatcttacgctggaatgttatacctcccctaatctgttaaaacaactgtaaattccgaaggactatttattctaatattattagagcgaaaattctctctttcgctctcccaatcctgtccatctcctactgcctcttattccgtcgtctctctcttacgcttcgttctttcagttatat

SEQ ID NO: 9239 - DNA, 2008 bp, Zea Mays
cagctccaggccgcgctccaggccgctcccgctgtctgccggccactacagagacagccaaccctccagccctgcttcactggtgactggtgagtggtgagtaccatcttaatttgttgaaggaagaaggattgaggtgaggtgcttcctgctgtcatctgaacatatgcattcactggtgactggtgactggtgagtggtgagtggtgagtggtgagtaccatcttattgcagaatagattggaggagaaatggctgattttagcacggaagcatctgcagctggctctcaaatacgaagtgatggatatgatccactgaaagatccaaaaaggaaacccaaatctgatgatccaggctggaagtatgcctattatgtagagcctggcaagcgagagttgatccaatgcgccctttgcccgaggaaaattaaaggaggaattctgagggtgaagaaacatcttgtgggcggattcttgaggatgatgaagatgaagatgatgttgatgagggtgatgagaatgaagatgatgatgatgctgttgatgagggtgatgagaatgaagacgatgacaattttgtgcttgacgaccttgacatggatgatgaagaagaaacaaacaatagtggtggccgtggtgatgagcaagacaaggatgatgttggtttagatgatttggatgatgactgcccccgcctctacacccgccatccagcccgcacgtcgcaatcccgtcgcggccgccgcgaaccactcgcccgcacgccctacgcccatccgcccgcccgcacgctgcaaacccagccgcgaccatggcgaaccgcccgccctaccgcccggtcgggccaggcggcgtgtcaatctctgagatctacagggacgcacgacgctgccgatggcgaaacgaggaaaatccgcacctcggctccagatccgcccgtagccgccgttcggcttccgtggaacccaccggcgccggcagtccccacgatcattctgatctcgctcgctgcgctcctcatccgcatgctggtttccgtgggcccctactccggtcagggtgcggcgcccaagttcggcaactatgaggcgcagcggcactggatggagctcacactccacctcacgcccgccgactggtaccgcaacacctccgacaatgaccttgcctactggggcctggactacctgtccctctccgcctaccagagcctcgtccacgggcagctggtgccgtggtcgagcttggacccgaacttctcaaccgggggcaactttgagttcgccttcaacgaggccaacttctccaatcaggaattgcagattgaggtcatcgcgggggacgatgacgcgccggggtctaggggcgacgatgctggaggaggtggcctcgccgactgggcgcgccattgcaagcaccgacgctgggagttcttcaaggagaaaggtacacgacaatataggttataatgggaaatgaattggagaaggatgaagaggaatttcaatttggagttgctgcgatgtacatcaataggagaagctttcctgtaacttgtatttgcccagaagattgaactcctagcggctcacctgagggtcaagcaagtgaactacatcaggcttcctgaccatcctgggcaggctttacactattctcagactgcggctgctctcctctccagcagctcggggcgcttgattgacaatcccgacccttatctctgcggtggagccttgaagctctgctcatggacgtcgaaaaatcataggaccctcatgatgccagtggcaactagctaggaatagtgctattagtgtcgtgctgtatgtgtcaaggttattgcatttctcgtgcgactacaaaggatgacagaagaaattaactaaatgaaaagtattgttctttagttcaggagaaaatgacgatagtttaatttattcatattactataatatgcaggtcctgaataccagcgcatctaattaagaatttctaaatgtgag

SEQ ID NO: 9240 - DNA, 4366 bp, Zea Mays
tcgccttccgttccctctccagcaccgcaccacagctagcccgcgtgtcccccaatcatacgtaccaccgcgggggcgtgtccgcttgcatcctcctccctcccccgtcccgtctccaccctccacctcctctcgcgtccgccccgccgctcgcggatgcgccggcgcgctcccacccccaaaccctagcctcgatcccgatgggcacgccccgcgcggggtccccggcgtccccggtcaccggcgaccactacctcgacctgctcgtccgcttcgtggcgcgcaacgcgggcgcgctgctcgacggcaccgtcaccctccgcctccaccccgtcggactccactacgtcgcctcccgcctcgaggcgctccgggagctcgaggccgtgggcgccggcgccccagtcgactacctccgcgcctacgtcgcggaccttggcgaccaccgagcgctcgagcagctacggcggatcctgcgcctcctcacctcgctcaaggtcgtcgccccggggccccgccgcgaccccgcgccgctctcgatcctgcctttcgcgcgcctgcgcgtgctcgagctgcggggctgcgacctctctacctcggccgccaggggccttctcgagctccgacacaccctcgagaagctcgtctgtttcaattctacggatgctcttaggcatgtctttgcgagtagaatcatggatatcaaggactcccctgtatggagcaaactttcatatgtctcatgtgcatctaatggtgtagtactcatggacgagtcgttgcaattgttacctgcaactgaaaccttggaccttagtcgcaacaagtttgcaaaggtggacaatctgcagaaatgtacaaagttgcgaaatctggatctcggatttaatcatttgcgttcgatttcatccttgagtgagaattggaaatcctcggcactctacctctgttgcaaaacctctggttggaaggcaacccaatctgctgtgcccggtggtatcgagcacatgtgttcagtttttttcgtaatccagagaatttgaagctagatgataaaggtatgaacacacaagaatactgggaaaagcaagtattgtttgcatgcaggcaaaatcaacctgctggttatggattttattttcctgcaattgatgatcatgaagatgaagacatattgaatttgaagatgagaaaattttcccgacttgtgagcatagtggaggaagagagaaatctctgtgatggtgtagagcagcagtccacccactgtgatagtgacagttccaagaaggatgaaactgcagctgttgatcatgacctaataattgcttcgttgataaacaccgccgaaatgctgaagaaagaaaagtcaagtaattggctttgtgaatttaaggagtggatggatgacaatacagagaaaacagaaggcgacaacctatctgttggcttaactaatggcaatgggaagtatatcaaacaaaagaaaaggcagaaagcacacaaggagacttcaaataacatgtcggatttggtacaagtttcagaaggtggtagtagctcaaaccttttggaatcagattcatctttcacagataatgcattttctggttcaaatggagtcatcaaacaatcctcaaatgaacttaattttgaccaagatcatctaaaaatgcacttgaattcttttcaacgacctcctcctctagagttagtagccacttcacaaactgaccccttttctgagttggaaaatggctctagaaatatgctggcaaatgggacaccatccaatacaatgagcaagttaatagaatcaagtccaccccatacatattcaagtccacagtcacctccacaatacaaggaggacattctacatcgaagactttttatggaggaagaatttttgcagatttcaggacatcttcattctattggttcacttggtagtggtagcagctgcagcgatggttcttcgagtgattttggttcatgcaattctgaagatgattatgaagaaattcagacaaagatggagttgtctcttaatggccagatggttttatttccttctgtaaatggtgatgatcatgaggcgaataataacttagagcatttttcaggggagaatactttgtctgaccatccagaagaaggtgagccgagttgttcagatcacagagagtttgatattgaggagttccataacagtaaccagagaaatggccatctagggcattatttaggccatttaattgggcaaaaaggcaaggagaagtttaagtggagggtatttcctttcaagaatcataatggtaccaaactagaaaatccaaaaatgaatgacgatcaggtggctgagcatgttttagttgaaggaaatggccagttgacatgcaacccaagcaaaagtactcacaaggaaggctctaaaagtcattcttctaatatccttcataagaacaattcatctgtttgcacaattaacacaggcgaacacaacactcttgaggatttcttcaacttggaaatagcggacaaggatgggtttgaaacatgtgaacaagtagcttgttgcgcacacatgtttcaggattcaagtggtttagttcaaagagaggtagccttgctgcgaagttctcaaaacaaattgtatctgctactacttgatatggtttttgatggacaagaaatcatgccaagaattttgggcagctatagtctgcaaagtctagaaaaagtttcaattgggctgggactacaggcgctgagagtacacatgtcagatgatacaactcatctattcatcacaaggacttccaaggaagcgcaagatgtactttggctcttgagcgtaactaacttccccaaattaaaccacaagatacattttcaaagttgggagaacatccaagtcaaattgttcgagaaatgtattatacgcagaactgcaaatacgggaatatttctctactctatgttgatgttctggaggaatgacgttgaagaagactccctttttattagatccatctttgtcattgaaggctccatattggtgtgcattgaggacctagatcagtttggtggtatcccttatgattcaaatcccccatacttttcccttgatgcatcttgttctattagcaatatccgagaagtggtcatggatcagcgcaacaacaaatgtttgacattgattttggataatggtaggccaggagagtttcacaatagcatccaaaatcctcaaaacaagcagtctgaggaaatcggcacagtacatacatggaaacttaagtggttctctgaagaagcgtctctgaagttcatttctgtaattaaggctctctcctcgacagcagcaatttcgtctttacatgtaaagtgtatatcctgatgatgtcggttattgtagttctacggtgatttcattcattcttttgtggtttgtccatgtagctgttaatctgtacagtttgatagttgggttctaggtttgtgtttgctgtattctttgtagttattagatgattttcccaccctgaagttgtacagaacagagctagaagtgagtgtaagtgaatggggttgcagttttggcaacgggcggtttcgtaaagttggttcaaaacctcaggaggcgcgatggtttgatcaggaaaggaactcacgcgacagattgcgaagaatcacagtttagcagctacggcaaacaggcatatgaacaatgggactcgcatgctgaaactacaattacctatcggacctgcgtagtaccttcaaacttctgtgtctattttgctaccgctatttgaacagggttcaacctctgcttccccaccgacggcacatttattcatcatcgccagcatgtgaagccgtgacgggatcggcggcaggccgacatcagcgacaccttccagctgctgcacgacgagccccatggtcggccggtcgccttcttcatcctggatgcaccagcacgcgaccttgcagaccctctcgagctccacgttggcatccccggcgatcttgtcgtctagcagcccgaccacgtcccccgcgtgcagcctgacggcggcgtgcaccgggaagtacacagcggagttggaccctgtctccgaggagccgttgttccggcgtcccgagatgagctcgaacaggagcaggccgaagctgtacacgtcggccttggcggtgatcggcgcgcccgcgagccactctggcgccagatagcccatcgttccccgcatggtggtcagaacgcggctgaagtcgtggccgacaagcttggccatgccgaagtccgcaaccttggcgcccatctcctcatcaaggaggatgttctctggcttgatgt

SEQ ID NO: 9241 - DNA, 4390 bp, Zea Mays
tcgccttccgttccctctccagcaccgcaccacagctagcccgcgtgtcccccaatcatacgtaccaccgcgggggcgtgtccgcttgcatcctcctccctcccccgtcccgtctccaccctccacctcctctcgcgtccgccccgccgctcgcggatgcgccggcgcgctcccacccccaaaccctagcctcgatcccgatgggcacgccccgcgcggggtccccggcgtccccggtcaccggcgaccactacctcgacctgctcgtccgcttcgtggcgcgcaacgcgggcgcgctgctcgacggcaccgtcaccctccgcctccaccccgtcggactccactacgtcgcctcccgcctcgaggcgctccgggagctcgaggccgtgggcgccggcgccccagtcgactacctccgcgcctacgtcgcggaccttggcgaccaccgagcgctcgagcagctacggcggatcctgcgcctcctcacctcgctcaaggtcgtcgccccggggccccgccgcgaccccgcgccgctctcgatcctgcctttcgcgcgcctgcgcgtgctcgagctgcggggctgcgacctctctacctcggccgccaggggccttctcgagctccgacacaccctcgagaagctcgtctgtttcaattctacgtactcatggacgagtcgttgcaattgttacctgcaactgaaaccttggaccttagtcgcaacaagtttgcaaaggtggacaatctgcagaaatgtacaaagttgcgaaatctggatctcggatttaatcatttgcgttcgatttcatccttgagtgaggtttccagtcgaatcgtaaaacttgttgtgagaaataatgctttaactacagtaaacgggattgaaaatctcaagtcactcatggggcttgatctctcttacaatatcatctcaattttctcagaattggaaatcctcggcactctacctctgttgcaaaacctctggttggaaggcaacccaatctgctgtgcccggtggtatcgagcacatgtgttcagtttttttcgtaatccagagaatttgaagctagatgataaaggtatgaacacacaagaatactgggaaaagcaagtattgtttgcatgcaggcaaaatcaacctgctggttatggattttattttcctgcaattgatgatcatgaagatgaagacatattgaatttgaagatgagaaaattttcccgacttgtgagcatagtggaggaagagagaaatctctgtgatggtgtagagcagcagtccacccactgtgatagtgacagttccaagaaggatgaaactgcagctgttgatcatgacctaataattgcttcgttgataaacaccgccgaaatgctgaagaaagaaaagtcaagtaattggctttgtgaatttaaggagtggatggatgacaatacagagaaaacagaaggcgacaacctatctgttggcttaactaatggcaatgggaagtatatcaaacaaaagaaaaggcagaaagcacacaaggagacttcaaataacatgtcggatttggtacaagtttcagaaggtggtagtagctcaaaccttttggaatcagattcatctttcacagataatgcattttctggttcaaatggagtcatcaaacaatcctcaaatgaacttaattttgaccaagatcatctaaaaatgcacttgaattcttttcaacgacctcctcctctagagttagtagccacttcacaaactgaccccttttctgagttggaaaatggctctagaaatatgctggcaaatgggacaccatccaatacaatgagcaagttaatagaatcaagtccaccccatacatattcaagtccacagtcacctccacaatacaaggaggacattctacatcgaagactttttatggaggaagaatttttgcagatttcaggacatcttcattctattggttcacttggtagtggtagcagctgcagcgatggttcttcgagtgattttggttcatgcaattctgaagatgattatgaagaaattcagacaaagatggagttgtctcttaatggccagatggttttatttccttctgtaaatggtgatgatcatgaggcgaataataacttagagcatttttcaggggagaatactttgtctgaccatccagaagaaggtgagccgagttgttcagatcacagagagtttgatattgaggagttccataacagtaaccagagaaatggccatctagggcattatttaggccatttaattgggcaaaaaggcaaggagaagtttaagtggagggtatttcctttcaagaatcataatggtaccaaactagaaaatccaaaaatgaatgacgatcaggtggctgagcatgttttagttgaaggaaatggccagttgacatgcaacccaagcaaaagtactcacaaggaaggctctaaaagtcattcttctaatatccttcataagaacaattcatctgtttgcacaattaacacaggcgaacacaacactcttgaggatttcttcaacttggaaatagcggacaaggatgggtttgaaacatgtgaacaagtagcttgttgcgcacacatgtttcaggattcaagtggtttagttcaaagagaggtagccttgctgcgaagttctcaaaacaaattgtatctgctactacttgatatggtttttgatggacaagaaatcatgccaagaattttgggcagctatagtctgcaaagtctagaaaaagtttcaattgggctgggactacaggcgctgagagtacacatgtcagatgatacaactcatctattcatcacaaggacttccaaggaagcgcaagatgtactttggctcttgagcgtaactaacttccccaaattaaaccacaagatacattttcaaagttgggagaacatccaagtcaaattgttcgagaaatgtattatacgcagaactgcaaatacgggaatatttctctactctatgttgatgttctggaggaatgacgttgaagaagactccctttttattagatccatctttgtcattgaaggctccatattggtgtgcattgaggacctagatcagtttggtggtatcccttatgattcaaatcccccatacttttcccttgatgcatcttgttctattagcaatatccgagaagtggtcatggatcagcgcaacaacaaatgtttgacattgattttggataatggtaggccaggagagtttcacaatagcatccaaaatcctcaaaacaagcagtctgaggaaatcggcacagtacatacatggaaacttaagtggttctctgaagaagcgtctctgaagttcatttctgtaattaaggctctctcctcgacagcagcaatttcgtctttacatgtaaagtgtatatcctgatgatgtcggttattgtagttctacggtgatttcattcattcttttgtggtttgtccatgtagctgttaatctgtacagtttgatagttgggttctaggtttgtgtttgctgtattctttgtagttattagatgattttcccaccctgaagttgtacagaacagagctagaagtgagtgtaagtgaatggggttgcagttttggcaacgggcggtttcgtaaagttggttcaaaacctcaggaggcgcgatggtttgatcaggaaaggaactcacgcgacagattgcgaagaatcacagtttagcagctacggcaaacaggcatatgaacaatgggactcgcatgctgaaactacaattacctatcggacctgcgtagtaccttcaaacttctgtgtctattttgctaccgctatttgaacagggttcaacctctgcttccccaccgacggcacatttattcatcatcgccagcatgtgaagccgtgacgggatcggcggcaggccgacatcagcgacaccttccagctgctgcacgacgagccccatggtcggccggtcgccttcttcatcctggatgcaccagcacgcgaccttgcagaccctctcgagctccacgttggcatccccggcgatcttgtcgtctagcagcccgaccacgtcccccgcgtgcagcctgacggcggcgtgcaccgggaagtacacagcggagttggaccctgtctccgaggagccgttgttccggcgtcccgagatgagctcgaacaggagcaggccgaagctgtacacgtcggccttggcggtgatcggcgcgcccgcgagccactctggcgccagatagcccatcgttccccgcatggtggtcagaacgcggctgaagtcgtggccgacaagcttggccatgccgaagtccgcaaccttggcgcccatctcctcatcaaggaggatgttctctggcttgatgt

SEQ ID NO: 9242 - DNA, 4406 bp, Zea Mays
tcgccttccgttccctctccagcaccgcaccacagctagcccgcgtgtcccccaatcatacgtaccaccgcgggggcgtgtccgcttgcatcctcctccctcccccgtcccgtctccaccctccacctcctctcgcgtccgccccgccgctcgcggatgcgccggcgcgctcccacccccaaaccctagcctcgatcccgatgggcacgccccgcgcggggtccccggcgtccccggtcaccggcgaccactacctcgacctgctcgtccgcttcgtggcgcgcaacgcgggcgcgctgctcgacggcaccgtcaccctccgcctccaccccgtcggactccactacgtcgcctcccgcctcgaggcgctccgggagctcgaggccgtgggcgccggcgccccagtcgactacctccgcgcctacgtcgcggaccttggcgaccaccgagcgctcgagcagctacggcggatcctgcgcctcctcacctcgctcaaggtcgtcgccccggggccccgccgcgaccccgcgccgctctcgatcctgcctttcgcgcgcctgcgcgtgctcgagctgcggggctgcgacctctctacctcggccgccaggggccttctcgagctccgacacaccctcgagaagctcgtctgtttcaattctacggatgctcttaggcatgtctttgcgagtagaatcatggatatcaaggactcccctgtatggagcaaactttcatatgtctcatgtgcatctaatggtgtagtactcatggacgagtcgttgcaattgttacctgcaactgaaaccttggaccttagtcgcaacaagtttgcaaaggtttccagtcgaatcgtaaaacttgttgtgagaaataatgctttaactacagtaaacgggattgaaaatctcaagtcactcatggggcttgatctctcttacaatatcatctcaattttctcagaattggaaatcctcggcactctacctctgttgcaaaacctctggttggaaggcaacccaatctgctgtgcccggtggtatcgagcacatgtgttcagtttttttcgtaatccagagaatttgaagctagatgataaaggtatgaacacacaagaatactgggaaaagcaagtattgtttgcatgcaggcaaaatcaacctgctggttatggattttattttcctgcaattgatgatcatgaagatgaagacatattgaatttgaagatgagaaaattttcccgacttgtgagcatagtggaggaagagagaaatctctgtgatggtgtagagcagcagtccacccactgtgatagtgacagttccaagaaggatgaaactgcagctgttgatcatgacctaataattgcttcgttgataaacaccgccgaaatgctgaagaaagaaaagtcaagtaattggctttgtgaatttaaggagtggatggatgacaatacagagaaaacagaaggcgacaacctatctgttggcttaactaatggcaatgggaagtatatcaaacaaaagaaaaggcagaaagcacacaaggagacttcaaataacatgtcggatttggtacaagtttcagaaggtggtagtagctcaaaccttttggaatcagattcatctttcacagataatgcattttctggttcaaatggagtcatcaaacaatcctcaaatgaacttaattttgaccaagatcatctaaaaatgcacttgaattcttttcaacgacctcctcctctagagttagtagccacttcacaaactgaccccttttctgagttggaaaatggctctagaaatatgctggcaaatgggacaccatccaatacaatgagcaagttaatagaatcaagtccaccccatacatattcaagtccacagtcacctccacaatacaaggaggacattctacatcgaagactttttatggaggaagaatttttgcagatttcaggacatcttcattctattggttcacttggtagtggtagcagctgcagcgatggttcttcgagtgattttggttcatgcaattctgaagatgattatgaagaaattcagacaaagatggagttgtctcttaatggccagatggttttatttccttctgtaaatggtgatgatcatgaggcgaataataacttagagcatttttcaggggagaatactttgtctgaccatccagaagaaggtgagccgagttgttcagatcacagagagtttgatattgaggagttccataacagtaaccagagaaatggccatctagggcattatttaggccatttaattgggcaaaaaggcaaggagaagtttaagtggagggtatttcctttcaagaatcataatggtaccaaactagaaaatccaaaaatgaatgacgatcaggtggctgagcatgttttagttgaaggaaatggccagttgacatgcaacccaagcaaaagtactcacaaggaaggctctaaaagtcattcttctaatatccttcataagaacaattcatctgtttgcacaattaacacaggcgaacacaacactcttgaggatttcttcaacttggaaatagcggacaaggatgggtttgaaacatgtgaacaagtagcttgttgcgcacacatgtttcaggattcaagtggtttagttcaaagagaggtagccttgctgcgaagttctcaaaacaaattgtatctgctactacttgatatggtttttgatggacaagaaatcatgccaagaattttgggcagctatagtctgcaaagtctagaaaaagtttcaattgggctgggactacaggcgctgagagtacacatgtcagatgatacaactcatctattcatcacaaggacttccaaggaagcgcaagatgtactttggctcttgagcgtaactaacttccccaaattaaaccacaagatacattttcaaagttgggagaacatccaagtcaaattgttcgagaaatgtattatacgcagaactgcaaatacgggaatatttctctactctatgttgatgttctggaggaatgacgttgaagaagactccctttttattagatccatctttgtcattgaaggctccatattggtgtgcattgaggacctagatcagtttggtggtatcccttatgattcaaatcccccatacttttcccttgatgcatcttgttctattagcaatatccgagaagtggtcatggatcagcgcaacaacaaatgtttgacattgattttggataatggtaggccaggagagtttcacaatagcatccaaaatcctcaaaacaagcagtctgaggaaatcggcacagtacatacatggaaacttaagtggttctctgaagaagcgtctctgaagttcatttctgtaattaaggctctctcctcgacagcagcaatttcgtctttacatgtaaagtgtatatcctgatgatgtcggttattgtagttctacggtgatttcattcattcttttgtggtttgtccatgtagctgttaatctgtacagtttgatagttgggttctaggtttgtgtttgctgtattctttgtagttattagatgattttcccaccctgaagttgtacagaacagagctagaagtgagtgtaagtgaatggggttgcagttttggcaacgggcggtttcgtaaagttggttcaaaacctcaggaggcgcgatggtttgatcaggaaaggaactcacgcgacagattgcgaagaatcacagtttagcagctacggcaaacaggcatatgaacaatgggactcgcatgctgaaactacaattacctatcggacctgcgtagtaccttcaaacttctgtgtctattttgctaccgctatttgaacagggttcaacctctgcttccccaccgacggcacatttattcatcatcgccagcatgtgaagccgtgacgggatcggcggcaggccgacatcagcgacaccttccagctgctgcacgacgagccccatggtcggccggtcgccttcttcatcctggatgcaccagcacgcgaccttgcagaccctctcgagctccacgttggcatccccggcgatcttgtcgtctagcagcccgaccacgtcccccgcgtgcagcctgacggcggcgtgcaccgggaagtacacagcggagttggaccctgtctccgaggagccgttgttccggcgtcccgagatgagctcgaacaggagcaggccgaagctgtacacgtcggccttggcggtgatcggcgcgcccgcgagccactctggcgccagatagcccatcgttccccgcatggtggtcagaacgcggctgaagtcgtggccgacaagcttggccatgccgaagtccgcaaccttggcgcccatctcctcatcaaggaggatgttctctggcttgatgt

SEQ ID NO: 9243 - DNA, 4510 bp, Zea Mays
tcgccttccgttccctctccagcaccgcaccacagctagcccgcgtgtcccccaatcatacgtaccaccgcgggggcgtgtccgcttgcatcctcctccctcccccgtcccgtctccaccctccacctcctctcgcgtccgccccgccgctcgcggatgcgccggcgcgctcccacccccaaaccctagcctcgatcccgatgggcacgccccgcgcggggtccccggcgtccccggtcaccggcgaccactacctcgacctgctcgtccgcttcgtggcgcgcaacgcgggcgcgctgctcgacggcaccgtcaccctccgcctccaccccgtcggactccactacgtcgcctcccgcctcgaggcgctccgggagctcgaggccgtgggcgccggcgccccagtcgactacctccgcgcctacgtcgcggaccttggcgaccaccgagcgctcgagcagctacggcggatcctgcgcctcctcacctcgctcaaggtcgtcgccccggggccccgccgcgaccccgcgccgctctcgatcctgcctttcgcgcgcctgcgcgtgctcgagctgcggggctgcgacctctctacctcggccgccaggggccttctcgagctccgacacaccctcgagaagctcgtctgtttcaattctacggatgctcttaggcatgtctttgcgagtagaatcatggatatcaaggactcccctgtatggagcaaactttcatatgtctcatgtgcatctaatggtgtagtactcatggacgagtcgttgcaattgttacctgcaactgaaaccttggaccttagtcgcaacaagtttgcaaaggtggacaatctgcagaaatgtacaaagttgcgaaatctggatctcggatttaatcatttgcgttcgatttcatccttgagtgagttacatgtgctttcttgcaggtttccagtcgaatcgtaaaacttgttgtgagaaataatgctttaactacagtaaacgggattgaaaatctcaagtcactcatggggcttgatctctcttacaatatcatctcaattttctcagaattggaaatcctcggcactctacctctgttgcaaaacctctggttggaaggcaacccaatctgctgtgcccggtggtatcgagcacatgtgttcagtttttttcgtaatccagagaatttgaagctagatgataaaggtatgaacacacaagaatactgggaaaagcaagtattgtttgcatgcaggcaaaatcaacctgctggttatggattttattttcctgcaattgatgatcatgaagatgaagacatattgaatttgaagatgagaaaattttcccgacttgtgagcatagtggaggaagagagaaatctctgtgatggtgtagagcagcagtccacccactgtgatagtgacagttccaagaaggatgaaactgcagctgttgatcatgacctaataattgcttcgttgataaacaccgccgaaatgctgaagaaagaaaagtcaagtaattggctttgtgaatttaaggagtggatggatgacaatacagagaaaacagaaggcgacaacctatctgttggcttaactaatggcaatgggaagtatatcaaacaaaagaaaaggcagaaagcacacaaggagacttcaaataacatgtcggatttggtacaagtttcagaaggtggtagtagctcaaaccttttggaatcagattcatctttcacagataatgcattttctggttcaaatggagtcatcaaacaatcctcaaatgaacttaattttgaccaagatcatctaaaaatgcacttgaattcttttcaacgacctcctcctctagagttagtagccacttcacaaactgaccccttttctgagttggaaaatggctctagaaatatgctggcaaatgggacaccatccaatacaatgagcaagttaatagaatcaagtccaccccatacatattcaagtccacagtcacctccacaatacaaggaggacattctacatcgaagactttttatggaggaagaatttttgcagatttcaggacatcttcattctattggttcacttggtagtggtagcagctgcagcgatggttcttcgagtgattttggttcatgcaattctgaagatgattatgaagaaattcagacaaagatggagttgtctcttaatggccagatggttttatttccttctgtaaatggtgatgatcatgaggcgaataataacttagagcatttttcaggggagaatactttgtctgaccatccagaagaaggtgagccgagttgttcagatcacagagagtttgatattgaggagttccataacagtaaccagagaaatggccatctagggcattatttaggccatttaattgggcaaaaaggcaaggagaagtttaagtggagggtatttcctttcaagaatcataatggtaccaaactagaaaatccaaaaatgaatgacgatcaggtggctgagcatgttttagttgaaggaaatggccagttgacatgcaacccaagcaaaagtactcacaaggaaggctctaaaagtcattcttctaatatccttcataagaacaattcatctgtttgcacaattaacacaggcgaacacaacactcttgaggatttcttcaacttggaaatagcggacaaggatgggtttgaaacatgtgaacaagtagcttgttgcgcacacatgtttcaggattcaagtggtttagttcaaagagaggtagccttgctgcgaagttctcaaaacaaattgtatctgctactacttgatatggtttttgatggacaagaaatcatgccaagaattttgggcagctatagtctgcaaagtctagaaaaagtttcaattgggctgggactacaggcgctgagagtacacatgtcagatgatacaactcatctattcatcacaaggacttccaaggaagcgcaagatgtactttggctcttgagcgtaactaacttccccaaattaaaccacaagatacattttcaaagttgggagaacatccaagtcaaattgttcgagaaatgtattatacgcagaactgcaaatacgggaatatttctctactctatgttgatgttctggaggaatgacgttgaagaagactccctttttattagatccatctttgtcattgaaggctccatattggtgtgcattgaggacctagatcagtttggtggtatcccttatgattcaaatcccccatacttttcccttgatgcatcttgttctattagcaatatccgagaagtggtcatggatcagcgcaacaacaaatgtttgacattgattttggataatggtaggccaggagagtttcacaatagcatccaaaatcctcaaaacaagcagtctgaggaaatcggcacagtacatacatggaaacttaagtggttctctgaagaagcgtctctgaagttcatttctgtaattaaggctctctcctcgacagcagcaatttcgtctttacatgtaaagtgtatatcctgatgatgtcggttattgtagttctacggtgatttcattcattcttttgtggtttgtccatgtagctgttaatctgtacagtttgatagttgggttctaggtttgtgtttgctgtattctttgtagttattagatgattttcccaccctgaagttgtacagaacagagctagaagtgagtgtaagtgaatggggttgcagttttggcaacgggcggtttcgtaaagttggttcaaaacctcaggaggcgcgatggtttgatcaggaaaggaactcacgcgacagattgcgaagaatcacagtttagcagctacggcaaacaggcatatgaacaatgggactcgcatgctgaaactacaattacctatcggacctgcgtagtaccttcaaacttctgtgtctattttgctaccgctatttgaacagggttcaacctctgcttccccaccgacggcacatttattcatcatcgccagcatgtgaagccgtgacgggatcggcggcaggccgacatcagcgacaccttccagctgctgcacgacgagccccatggtcggccggtcgccttcttcatcctggatgcaccagcacgcgaccttgcagaccctctcgagctccacgttggcatccccggcgatcttgtcgtctagcagcccgaccacgtcccccgcgtgcagcctgacggcggcgtgcaccgggaagtacacagcggagttggaccctgtctccgaggagccgttgttccggcgtcccgagatgagctcgaacaggagcaggccgaagctgtacacgtcggccttggcggtgatcggcgcgcccgcgagccactctggcgccagatagcccatcgttccccgcatggtggtcagaacgcggctgaagtcgtggccgacaagcttggccatgccgaagtccgcaaccttggcgcccatctcctcatcaaggaggatgttctctggcttgatgt

SEQ ID NO: 9244 - DNA, 769 bp, Zea Mays
gtcctgaactccagcacgtacagcatactacagcagccacagggttgctgctgcaccgcgtttccttcccaggtccaggtcgccggcatctgcagagagagaaagagagagtccatgaaactcaacaggaaacctccatccatccatccgcctggccggctcactgacgacctgtgctatcgcttcttggacttgcacacgaaagcagcggcagcaaggcaacgcagtgcatcagcgttttcgtgacttgactgggcgtacacagctaaagaaggccgatacgctagcagggtgctcgaggagcggcgacgacggttgacgacagacatggtggaagtgctctcatgtatcaaggattggaagttggctgaccagcacaagcaacatactgtggagaaggaaaccaaagacctgaagcaacctttgaagatatgtacctagatgatgagcaacgagtatcaccagggagcaaaagaaaggaacatgaaggaggaggagatacgagaaaggaagcagcactaaagagttctaaaagcaaacaaccttaaacttattctctctttcttttcccacctatttatgttctcttatttgtaatatgctcatatggactgtggactgtggactgaactatgaacctataaataatttaaggagctggctgtactcttttcctttctagagttttctcacgaggtgtgagtttttacctagaaaggtttttaatgaggcagcattgcactaaggctccacaagtatttctgttaaa

SEQ ID NO: 9245 - DNA, 4248 bp, Zea Mays
gccctcattcctgtctacagaagtacagctaacaaaacaaaatacaggtgttggtggcgctgacgggaatgcctccatatggccggtgactgctgcgccatgcttcgatgggtcgctattagctgtggttacggtctctgaatacctcgcgctgcgacgagatttcagcggcggcggcgtctaccagtccatgtccatccagcagggttcagtctgtgtgagcaaggacgcttcactttcagtgctctctgtctgtaagttgtcacaacctactcgcatatccatgcgcgtcggcgttgcacgcatacagccatacaggggaaaaaagaggagaggagaaatcggcccagttgcacgcagcgaaggtagccgaagaaaaaaaaaattctcccgttcacctcgcctgcgggacaactggggcaacagccgccggccggtgccccctcccccctacgcccagctgcccagatccgagccctttgcccggcgattacaccaggaatgaagcgttttgtctacataaatgatgagtcttatcagaacgactactgtgataaccgggtttctaatacaaagtataccttattgaacttcgtgccaaaaaacctatgggaacagttcaggcgcttcatgaatcaatatttcttgttgatagcttgtctgcaactatggtcacttatcactcctgtaaatcctgcaagtacctggggcccacttatatttatctttgctgtttctgcaaccaaagaggcatgggatgactacaacaggtatatttcagataaacaagcgaatgataaggaagtgtggattgttaagaatggtgcccggaaacacattcaagctcaagatatccgtgtcggtaacatagtttggattcgagagaatgaagaagtaccatgtgatcttgttttgttgggaacttctgaaccacaaggcatctgtcatgttgagacagctgctcttgatggggaaattgatttgaagacaagagcaagcccaccaccatgcgtagggctggagtttgaacagctgcacaaaataaagggtgtgatcgagtgcccaataccagataaagacatacgaagatttgatgcaaacatccgcctgtttcctccattcattgataatgacatttgcccattgactattaataacacattgctgcagtcatgctacttgagaaatacagaatgggcttgtggtgtagcagtttatacaggcaatgaaactaagttgggaatgagtaggggtgtcccagaacccaagctaactgctatggatgcaatgattgataagcttactggtgccatattcttatttcaacttacagtcgttgtcgttcttggggctgcaggcaatatttggaaggatatggaagctcgcaagcaatggtatgttaagtatgatgacaatgaaccatggtatcagattctggttatacctctgcggtttgaactattgtgctctattatgattcccatttcgataaaggtttctttggactttgttaaaagtctctatgcaaagttcatagattgggatgatgatatttatgacctggaaaatgacacacctgcccgtgcagcaaacacagcaattagtgaggacttgggacaggttgaatatattttgacagataaaactgggacattgactgagaacaagatgatcttcagaaggtgctgtattgggggtaccttttatgggaatgaatctggagatgcgctcagagacgttgaattactgaacgctgtcgccaataattctcctaatgtcatcaagtttttgacagtcatgacactctgcaatacagtaattcctataaaaagtcctactggaccaattttgtataaagcccagtcccaggatgaggatgccctggttaatgcagctgcaaatttgcatatggttcttgtcagcaagaatggaagcaatgcagaaattcacttcaaccggcgagtgatgcaatatgagatacttgacattcttgagttcacatctgaccggaaaagaatgtctattgttattttggattgtcagagtggcaagttttttctcttgtccaaaggagctgatgaggcaatgcttccttgtgcttattctggacaaaagacaaagacatttgttgatgcagttgacaaatatgctcagctggggttgcgcacactctgcttgggatggcgtgagctggaaccagaggaatacactaaatggtctcaatcatttaaggaggccaatagctcattgaatgacagggagtggaaagttgctgaggtttgccaaaagctagaacatagcttggagattctaggtgtcagtgcaatagaagatcgcctccaggatggggtaccagaaactatcgaaatactgaggcagtcaggaatcaacttctggatgttaactggtgataaacaaagtactgccattcaaattgctcttttgtgcaacttgatttcttcagaacctaaaggacagctcttgcatatcaatgggaaaactcaagatgaagttgctagaagcttggaaagagttcttcttaccatgaggattacgtcatcagagcctaaggagctggcttttgtagtggatggctgggcactagagattattctatcacgctatactgaagcttttactgaactagcagttctttcaaaaactgcattatgctgccgtgttacaccttcacaaaaagcacagctagtgaagcttctgaagtcatgtgactatcgaactttggcaatcggtgatggtgggaatgatgtaaggatgatacaacaggctgacattggtgtaggaattagtggtagggaaggtcttcaagctgcaagggctgctgactatagcattggcaaattcaggttcctgaaaaggttgattcttgttcatgggcggtactcctacaatcgcactgccttcctgtcgcagtactctttctacaagtcattgttaatttgctttattcagatacttttttcttttctttcaggcattgctggaacaagcttattcaactcagttagtttgatggcttataatgttttctacacaagcattcctgttttaactactgtactggacaaggatttatctgaaaagacagtgatgcaaaatccagagatattactttactgccaagctggaaggcttctcaatccaagtacctttgctggttggtttggtcgatcattgtatcatgcaatcattattttcttaataaccatccatgcatatgctaatgagaaaagcgagatggaggagctctcaatggttgcactctcaggaagcatttggttgcaggcatttgttgtgacgttggagatgaattccttcacatctgtgcaacttctggccatatggggaaacctcattgccttctatgtcctcaatttctttatcagcagtatacccacttctggaatgtacactatcatgttcggcctttgcagacaaccgtcatactggataacgctggtgttgatcagtggagttggaatgggtcctgtattggctctgaaatatttcagatatacatacagacctagcgtgatcaacattcttcagaaggccgagcgttcacgggggccaatgtacaccctgctgaatctagagtctcagttgagatcagacaaagatagtatgatggtagccggttccacagcgccagccaagaataagagctctgtttacgagccgttgctttctgactccccgatggcatccaggagatctcttgcaccagcatcttcatttgatatcttccagccagcacattctagaacatctcacccaagaaacataaaagccaattaattttttggaacaacagttaactcgtaacagtatggcataccagaatgacaaaaaaaaaagatgtcagtcgaattagatatgttgcatatttctgttaatgatttagtagatattgcccaaaaagatataacgaaaagtcatacttaatcctttatagctgttagcaaaaatgggtagtgaccatttatgttctctatggggaataaattaatttctccaatccaccagatgcaaaaaaataaacttatgtcccagtcataccaaaaagacttgcgttgtctccggacccatccaattttaaattgcgatgtgctgtcgggcccaaattatgtgttgctgctgcgttttccctttcgctttccccagtttcactcactttttgcccatcatgtggttgtcatgcaaattggaatgtttgcactaatatctcag

SEQ ID NO: 9246 - DNA, 3579 bp, Zea Mays
tggctcccatggaggaatcacaggggacggtcgatgcctgttcaggtccgtcgcctacggcgcctgcctgaggagaggaaagcatgcgcccagcgacagcgcccagaaggaactggccgacgagctccgagccaaagtagctgatgagttcgtcaagcgaagaggagacaccgaatggttccttgaaggcagctttgagagttatgtgagacagatgagaaagcctcatgcttggggaggggaacctgagctgttcatgtgttcccacgttctcaggatgcccatcaccgtctacatgtatacgggcagctccgacggcccaaggatcatagcggaatacggccaggaatacggaaaggacgatccagtccgcgttctctacgacggctacgggcactacgacgcactccagccatctctcgtaagaacacaatcatcgagactgcgaggtgtgtaggtcaccgggggctgcgctgcctaagcttcttctacaggacagctgcgtaactgcgagcagctcaagatttgacgacgctatttttttactccagttccacacagccgtatagccaatacgaaactatgcctggcggctttgactgtaccagccttttctgttcttcaacgtttgatgtataaataaacacacacacacacaaaaaaaaactcgtcacccgagtcagaaaatcagttgagctactacctggtaccatgcccagcatcgagtgaccgaccgtgtaaagtttcttcgatcgtttttgctcaacaagaatgctgcatagaaaaaaaaaagctgaataatgctcaagttgtcatactaaaattctcttggacttcgtatggggtggcatgaacgctcggtcagtgctcggtttctgagttacggtcttgtcaaaatccagtgacacacaaaaaaaaagatgagctcgatgaaaaatggagcacagatgatattcctacaacaattttaccagcaacaacaatcccagtcgcgttgaaagggaggacttctttacacgaaagccagagccaccgcgtcgcggtaactaaattacaacatcgtcctacttgttatctcctagtcttcaagccgttggcaccccggtcgctagtccgtggaacaaccaagaaaagaggaagctgagtcatggaagccgctccacatgtcacgcacttctgcccgcggcctggtctcctgaagcaacagctctggtttaacagtcacattgttacggcgtaaaaaccctcctccgtctgcttctccagcatcagcagcagctcttgttgcctaggcaacagcagtttgcttggtcgtgttttagcttctgcaaggatccatgtttttttaggcatggtaagagatagtgtatttttgtttgtaggcatgtcgagataaagactcaagtcacaaatatatatatattttttgtttgcacaccaagcgatacgtacgtacctcaacttggtccttgagctctttgatgtactccacagcaaggtccaacatgtccgacgtattcgtttgctgcgtgttcacgagaaacaccaataaacacgctgacgaaaatgggcgatggcaacgaacaacaacgagaacaggttgttcagcaatcccgcacgggaaaaatctacggatgacgataatgaatggctatggctcattgcagatcttaagctcagcttaccttgtccatgttgggcacgaggtcttgcagcttcttcagcctcttgctgatcctcgtccttctttcctgaacgtacgccagcgaacaaggaaaacgaaattggtttctgtgctgacatccagctagcatcaaagctggcagagtgtggcaccatatattgcgccgtgcttttttttagcgaatcgtttgggaaggaccgaaggatcgagtagatgaactgaccctctcggcaatgctccgtgggtgagtcgcgcagccacgcctcgcacgcactctgcaggcgacggagtcctgctgcagctgcaggtagtcgtccatgccgggcagctccagggacgagttggacaggccgaactggacatacatacagcaaggccaaaaaaaaaacagctcactcccgtcagcatggaaccacgccgtcgatgatgcatgacgccggggagcggcaaagtaaggccagagctaggcacggaaagcggcgcgcgctgacctgcgggtcaatggtgctgaagttggtgaccatgtcgtcggcgccggcggcggggtccaccttgggcttcttgcagggggcagacgagaacatgatggagttggtgtcgtcccaggagccgacggagaaggtcctggagaggtaggaggaggactgcgcggcgtcgctggagctgttgcacccgccggcgcccacgatgctctccccgatgtcggccggtatcatccccatctccgagatctgcggcaggtcctgcctggagaagctccactgcgagctgagctgcgcgtggccgtggccgtggccggggcccagcgcggcgtcgctgcccgcctgcgtgtagctccccatcgctcctccgctcgccgccattcctgcagtgggcgcatccggaagatcgtcgaacacacgtcaaacaggtagactatagctgacccgtgcccgcatgtcagcgactgttcgtcgagcttgaggtaaaaggcattcttttggtatatttattttagtagtatcgttcctttttttcacgctttcttcctttttttcattttaagaaaaacaagaacattgtaccatcgatgatttttcttctttatcgcgttctagctagaaagtagttggatgaacggctggtgagtgctgctgacaagcgctgcccagcccccagcaggttcgccgtagctacagccggattcgcagcgggacggccaggaacggtcgccctcacgtcacctaggtcggcagcatataggccgcctttccgaaaaccgaaagagcagacaatggaggggacgggaccaatccgcgtgtatttgtttacgttaatttcatactgtggtcgcgataggattcttcggcaaggtgcgttgcatttgcactgcgcttgcgtactactgtgcgacgaacgatgttgcggcacggattcactaccaagggagctagggaagcattgttaatgagagccgagaacgctggacatgtgcgccggtgggtgggtgatcgacttcgcgtctcgttcggagctggagctggagctggagctggagaggagtattattctatacaacggccgccgggcacatgccaaccaaccaaatcagcgagaccaacgttatgctaatttactctagtattattctagcttagctgaagccgaaagcgcagtgattacagctaccgccatttactctagcagtttagttactgttactgttactcctaccttgggttcgaattcaacgtgctcctagcctgcctccctaatcacggcaaagccggaaaacgacgaccgagacacgtaccccagcaagcgcaagctggatggagttacgcttacgcaagggagagagagagagagcatacgcaccgtgcgggtcggtcatgaggcgggagagcagcccggcg

SEQ ID NO: 9247 - DNA, 4183 bp, Zea Mays
atggagaactgcgagcgaacgataaaggggtttttgacattgaaaaatcttgcatctgttttccttcaacaaggttttgagttctacgataatgctcttcactgttacctacaagctgtagagcttgattcaaatgattcagttgtctggaatcatctgggaacactttcttgttcaatgggtttgctgagcgtatcaagatgggcatttgagcaagggcttgtatgcagcccaaacaactggaactgcatggagaaattgttggaggtgcttatatcaattcgtgatgaagtcgcatgcctttctgtagcaaatttaatacttaatagttggccatcacatcatcgtgctttacatgtgaagaagaccattgaatgtgctgaaccggtaccttttgcacctcgtggtattgacatacttgaacccaagcatgcaaaactcatcttttcgaataaaagaaaatccgttgatgatgaaatctgtcaagaaatagggacaaagaagagtaaacacagtgctacattgcaattgaatgaagcaaaatggttggcccttttagatggtatcctaagcttaataagtgcaaacaccgagaaggctggtgaatataattgctcaaatactgttgataggtgttcaatcagtgagggtagtgccaaggggcttgcttataacattatagacgttgtcatatctacagatacattgaaaagtgtggaaactgctggtggaaatggaaatgattctcaccatggtgagattctgccatatgattgcaaagctacagttaaagagaaagatggtaattcagatagggaacatccccatgaaagacggagcacacgccttgagaggctgcgaagtcgcaaatctggaaaagatgaaaatggatctgatggtaaagatatatcccatgctatgacccagtttctagaatcatttattctaaaaggaccaagccctgtagaaaaggcttattgttctggaaatgccgatgcttcaaatcctgatactcataactatacatccaacgaggaggcaaatgatcttaagcaatttctatgcaagatatccaagaattttggccctcatcacattggttatatgttacttgaggagatggctcatctcaaagtgccattccaagattattttgtcaagttaattgaactggacaaacttactagaggctgggctgaagacagatctgcatcgtgcaatttatttctagctgaactgtactatgatcgggctttgtgttctggaagtccaccaacatcttctgagctgtctgattcatcttaccatctttgtaagatcattgaatcagtagctctggaactgccattcaacatatctgttagagaaatacattccaccaacttggatacggaaagtagcaggacaggtgaatcttcaagtgaattaatcgagagaagtcatgaaaatggtcacatcaacatgcttaatgaccaaaagtccaaacatgattcttcttcaaacatgaattgtgcattctggattcgcttcttctggctgagtggttgcctgtccctttcatcagactgcaaagagaaagcttataaggagttcaatattgccctgtcaatactaaaaaatagcaacaaaactaaaagctatggagaggtcattcttctacctcacaccaaacttgtaaaatcacttacaactgacaggattcttcgtgaaatcaacttgatcaggcttgaatctctactttggaataatgatgagaatatcaacaaaataactcatacagagttcatgcagttgctacctccacttttgctttccaccaaagatgcctacgttggaaatgcatatggtccacaaagagaaagcgagaatgttatttcacttgagttgtctgccttggatgtcttaatatctgcatgtgaaaaagcaaaaccaatgaacatccaggtatatcttgactcccatcgaagaaaaattcaagttctaactgtggcagccggcatggttggatctgtcacacccctgaaagcgaaaggttcaagcaatgtggaatttgtggaagcaatgaacaggaaccggctagaaaatgttgtggaagcagtcaaagatgtgtctcgaaatgccagtaaagcaaaagacataatcgatcaatgcgataattccgtaccaagtatcactattgtgttaattcataagtatatcagtcaaggttatcaagtcgataagtcgagtcgagtcgacaaggcgtccattaagcgtcgccttagcgtcgctttagcgctaaggcgtgctcacagggcaagacgtctagctcgccttccgccgtggcgtaaggcgtccgccgcggcacaatgcgtccgctgcggcgatgggcaagatggctggagcccactaatgtctatcgttggtgatattcaatcattgctcttgacaatcatgtgtgctgctgtcaagataatactatcgagaaaactctcatgctctggaacctcctatcaggttgaccacttggaatgttcctgtctcatagatgcagccattgcattttgcaagctccagcaccttgatcctacaatatccatcaaaactcaggttgacttaattgttgcagtccatgatttgcttgctgagtatgggctctgttgtgctggaagagatggtgaaggggaggaagggatgttcctaaagttcgcaatcaaacatctcatggctctagatgtgaaactaaaatctcaactcaattcaaatgggatggaagaagatgcagttccaaaagacgtcagagcagaagacagtgtggccgatgaaccatcggttagtgacaataagcagaactccgatgatgaggaagaatcggagttagatgagattcagtcatgtcttgatagtgccttggaccaggcttttttctgcctgtatggtttgaagatcaacccagattcttgcagtgaagatgatctcgctgtacataaaaatacaagccgcggtgattatcaaaccaaagaacagtgtgctgatgtgtttcaatatgtcctgccatatgcaaaagctctatctaaaactggcttggttaaattacggagagtgctgcgggctatacgtaaacactttccgcagccaccttatgacttatttgttaacaaccctattgataatttcttggatggacctgactcatgtgaaaaaatactctctgaaatttgtgaaagcaatgaatctagggaagctatcctgaatgtattgttcccaggtgaaagaggctatgaagcattcaaaaaactctccactgccagctctgagccttattcagatgtttatgagaacttatattatttcatagctcaagccgaagatattagtgccaccgacaagcatacaggttttgttttgaaaaaggaaggagaagaattcgttgaacagagtgccaatattttcaagtatgatttgttgtacaatccattgcggtttgaaagctggcagaagctttccaatctttatgatgaggaagttgatctgttgctcaatgatggtagtaaacatataagcatcttggattggcgaacaaacacggatttaatcagaagggttgagatgggccgtcgacatagtcgacgctgcctattgatgagttcactactggccaaaactgcccctgagcagagcgaggcacatgaactgttggctcttgtgtactacgatagccttcaaaatgtggtgcctttttatgatcaaagagctactttgccagtgaaggattcatcatgggagacattttgtaaaaattctatgaagcactttgagaaggcttttgaaatcaaggagcagtggcttcatgcgttttaccttgggaaactgtgtgagaaactggggcattctttttctaaggcattatcatactacaacaaagccatgatgctgaatccaactgcagtcgaccctgtttacaggattcatgcatcacgcttgaagttactttacactcaaggcaaacagaatcttgaagctatacaggaatcaggttgttgccgtgacctactgcccacaactgacctggcctggcttttcgtgaacttggcatgttatattagctgtctaacagctgtgggatgacaagcatgtttggagatttaactgcaatggtttgtttagctccaaatctgcctacaaagcttttttttgaaacgca

SEQ ID NO: 9248 - DNA, 1611 bp, Zea Mays
acacacgcacacatacacttctcaaaaaaatccctcccgctcccaccgccgtctcctcctcccaatcacattccgtttccattcgcgcggcccgcgccgccgtcatggccgccgcctccctcctcgaggccactcgcttcctctccaccccgcacccacgctcgcgctcgcgcccgctccctttcccgcccggcagcggcctacacccccacctcctcaggacccctcgcctctccactctccgcgtccacctccaccgtcccgctcctctcggcgcgcaggagccggcgaggcctggcgcgctcctggccgtagacgcgctcaggaggtccgtgctcgactccctcgcggcgctcaagcggcccgcgctcgcgctcctcctggccggtgtgctgctcgccgcggcatcggcgggcgggccgcacgcggcggcgctggccgcctcgggcgggcgcgtcggcgggtcggccttctcctcgcgctcctcctcgcctcgatcctacgggtacagcgcgccggctcccaggggcgggtacacggccgctcccttctactctccttcgcccttcgtatccgtcggcccagccctcggcatcggcttcgggggatcggggttcctcgtgaccctcatgggtttcgcggctttcctctacctggccgggttcctgtccgactcgtccggcgctaccagtgtgctcacagagacggagaagaccaccgtcctcaagctacagaaggagcttgatcaaatagctgagaaagcagatacatctaccccagctgggttgagctatgtgttgacagagacaacattggcattacttcggcatccggactgttgtatctcagcttactcatcggtggatgtgaaacgaagcattgataatggtgagaaacgtttcaatcagctttcaattgaggagaggggcaagtttgatgaagagacacttgtgaatgtgaacagcatcaagaggaataaaggaggcagccaaagatcaagtggttttagcaacgagtacattgtgataaccatattggttgctgctgagggagtacataaggtgccggttataaatagcagcaatgacttaaagacagctctacaaaagatgggtgccataccatcgcgcaaaatactggcagtcgaggtcctatggactccacaaaatgagaatgacactttgtcagagcgagagctccttgaagattacccgctcttaaggcctctgtagaaagaagctgctgtagattcagttttggcggttttcttattaactatagcgcagatcttgtgtttgtataaaagtgtataatttgttattgacgtcactgttagccttcatatcagaacatttagcgcatcgcagtacaagtctgcgattgtctgccggtagtcttggtcgctgttcctgacacaataacacaaaattgtaaatagattgttctgaaaagaacacgagaggctgcatctgtgcgtgtacccgttctgccatgcatatcttagataaaagatttgatgaaatattgcgtgtcagttccaactccaggacgcgcagtagaataccgttcgtgagatcactgtgtggcagactggcaggcaccttttttttg

SEQ ID NO: 9249 - DNA, 1670 bp, Zea Mays
gatatattcaattggatccaacctttgtggtccttttcttatatgaagatgcatttaatagatttgtcgatgagataaacacccttgcagcttatcaatggtgggaaggatctatttacagtatcctctgtatacttgcctaccccctggcttggtcatggcagcagtggcgtaggagaaagaaattacagagacttcgtgaatttgttcgctctgaatatgatcattcatgcttaaagtcttgccgttcacgtgcactctacgaaggcctcaaggtgactgcaaccccagatctaatgctagggtatttagatttcttccttgggggagatgaaaaaaggcctgatcttccacctcgtcttcgtcaaaggtttccaatgtccctgatctttggaggtgatggaagttacatggctccgttttcacttaatagtgacagtgtgcttactagtcttatgagccaggctgttccctcatggatatggcaccgtcttgtagctggattgaatgcacagctgcgtttggtccgtggtggaaatctgaaagtaacgtttcttccggtcatcaactggcttgaatctcatgcaaatccctctttagctgagaatggtatccgtgttgatcttgcctggttccaagctacagcattagggtactgccaacttggtcttcttgtttatgctgttgaaggagaagctgcacttaccgaacctgatggaagccctagagtaaaaatagagcaacacacacccacacagaacatgctcgctgatactcaactaagtcagtccaggattaaggatgctctaatgcgcaaaaggatcactggtggagttctcaatagtaatagcttaaggacactaaaagacaggagagatttgttttacccattttctcatatcttgcacaattcgaaaccagttgggcatcaggatcttgttggtttggtaatctcaatactgcttcttgcagatttcagcttagttttgcttacttttctccagctgtattcatattctatggtcgatgttctcttggttttgtttattctaccgcttgggattttgtcgccttttcctgccggtataaatgctctatttagtcatggaccgaggcggtcagcaggccttgctcgtgtgtatgcattgtggaacataacttcactggtcaatgttgttgtggctttcatatgtggttttgtacattataagttatcaaccaaaacacacccgagcgtgcagccctggaacctgggaacggatgaaagcggttggtggctcttcccaaccggactcatgctgttgaaatgcattcaagcaaggcttgttgattggcacgttgctaatttagagattcaagaccgtgcgatgggtaaaacaattatattattaacatgttccatggtcttcgctgacagcaaggctggtaaagctgtgagaaatcggtgtggtctgggtgatgtgccgtttgcagctttgcaattcatcgagggatgcaaaaaccttctgacatatctgacgctgtgtcacttgcagacctgtagtggtggatggatggctaagtgggtcacctaaacaaaaccgggtgctatgtactcggcagagaatgtcctcgacgatggatggacaactttaggggctgtttggaactggttttaagtctaaaaccac

SEQ ID NO: 9250 - DNA, 5102 bp, Zea Mays
aaatagctaaacccaaatcgataccaaacccagcccggaacgcacgccccccgccgccatcgccggcggccagccactacaagcgcggtgtccggaacctgtactgtactaccaaccccaacagcctggactctgatgagccccagttcatggcctgccatctctcccccctcttcaatctccgactcttgctgctgctcggcgctgtcctcggaaacgccgtccttgtccgcgccggcggggcggaggcgtcagatcgggctgagccggacccgtactcgatcctgacgtggcacgactactcgccgccgtcgcccccactcccgcccccggacccggcgtcgtcgacggcgacctgtgagggagacctccacgggaagggggacttccgcacgcactgcgaggtcttcgaggaggtggaactgggcgacgatatctacatcacggggaacggcagcctcgtgctcctctctggcgcctccctgacctgcgagaaggtcgggtgcgttatatctgccaatctctccggcgaggtgcacctcagccgcggcgtgcgcgtcagagccggcagggtctcgttggttgccaccaacatcacagtcgccgacacggtcgttgtgaacaccaccgcgctcgctggcgccccccctgaccggaccagtggcgttcccacagggacgcacggcgacggtggcgggcacggtggccgtggcgccagctgcttcgtcaaggaagggcagactcaggaggattcatggggtggtgatgcctatgcatggtctgacctcgaacacccttggagctacgggagcaaagggggctcgaccagtgttgagaaggactacggtggtgccggtggtggcatcgtgtggctgtttgctgatgatctggtcatgaatggcacagtgctcgccgccggtggggatagcaatgagaagggtggaggtggttctgggggaagcatctttataagggctgcatcgatgtatggtggtggcaagatcagtgcctctgggggtgatggtttggctgggggaggtggagggcgagtttctattaacgtttttagtagacatgatgacacccagatttttgttcatgggggaaggagttcaggctgtccagataatgcaggagctgctggaactctttatgaagcagtaccaaagagtcttattgtcagcaacaacaatttgagtacacagacagatactcttcttttagagtttccaaatcaaccactgtggacaaatgtttttgtaagaaatcgtgccaaagttgctgtccccttgctctggagtcgcgttcaggtccaagggcaacttagccttctttctggtgctattctaacttttggtctcactggttatccatactcggagtttgaactgatggctgaggagcttcttatgagtgactcaataattaaggtgttcggtgctttgagaatgtctgtaaagatgctcctaatgtggaactccagaatggaaattgatggcggtggagattcgatagttgcaacttctttgttagatgctagcaacctgatagttctgaaggaatcatctgtgatacactctaatgctaatcttggagtccgtggccaaggtgtcctgaatttgtctggggacggagacacaattgaggcacaacgccttattctatcgctgttctacagcatacaagttggacctggttctgttttacggggcccacttgtaaacagaagtagcgatgatgtggccccaaagctgaattgtgaagcagatagctgtcctgtggaaataatacatccaccagaagattgcaatctaaattcttcattgtcgtttacccttcaggtatgccgtgttgaagatattgatgtatggggtgtcgtacaaggaactgtaattcatttcaatagggcaagaagtgtcactgtgcatacatctgggaccatcagcgcaacaggctttggctgtcgatctggagtaggacaagggaaaatgttaagaagcggtgtatgtggtggtggtggacatggtggcaaaggtgggaatggtttttataagggagaccttgctgagggtggagctatctatggcaatgctgatctaccctgtgaacttggcagcggcagtgggaatgactccacagagttgtccacagctggcgggggtataatagtgatgggctcatgggattattctttgccaagtcttgccctctatggttcagtagaatcaaatggtggcagctatgctagtggctctgttggaggacctggtggtggttctgggggcacaattcttctatttgtgcacactttgtccttagctgaaagctctgtcctttcaagtgttggtggcttcggaagtactggtagtggtggaggtggagggggaaggattcattttcattggtctaacattcctactggagatgaatatgtgcctgttgcagctgttaagggatcaatacttacaagtggaggagtcagcaaagggttaggatattccggtggcaatggaacggtcacaggaaaagcttgcccaaagggtctttatggtacattttgcaaggaatgccctttgggaacatacaaaaatgttactggatcttctaaatctttatgctttccatgccctccgggtgaactccctcatcgtgctatatacacaaatgttcgaggaggtgctgctgaaactccatgtccatacagatgcgtgtctgacagatatcgcatgcctcactgttatacagctctggaggagttaatatatacttttgggggaccttggctatttggtctatttctttcaggcctccttatcttgttagctcttgttttaagtgttgctcgtatgaagtttgttggcactgatgagttacctgggccggcaccaactcatcaagggtcccaaattgatcattcctttcccttcctagaatcactaaatgaggtcattgaaactaatagggctgaagagtcacaaggtcatgtacacaggatgtatttcatgggtcccaacaccttcagtgaaccttggcatctcccacacagtccgccagaacaaataacagagatcgtatatgaagatgcatttaatagatttgtcgatgagataaacacccttgcagcttatcaatggtgggaaggatctatttacagtatcctctgtatacttgcctaccccctggcttggtcatggcagcagtggcgtaggagaaagaaattacagagacttcgtgaatttgttcgctctgaatatgatcattcatgcttaaagtcttgccgttcacgtgcactctacgaaggcctcaaggtgactgcaaccccagatctaatgctagggtatttagatttcttccttgggggagatgaaaaaaggcctgatcttccacctcgtcttcgtcaaaggtttccaatgtccctgatctttggaggaactcgtgccatatctgttacaggctgttccctcatggatatggcaccgtcttgtagctggattgaatgcacagctgcgtttggtccgtggtggaaatctgaaagtaacgtttcttccggtcatcaactggcttgaatctcatgcaaatccctctttagctgagaatggtatccgtgttgatcttgcctggttccaagctacagcattagggtactgccaacttggtcttcttgtttatgctgttgaaggagaagctgcacttaccgaacctgatggaagccctagagtaaaaatagagcaacacacacccacacagaacatgctcgctgatactcaactaagtcagtccaggattaaggatgctctaatgcgcaaaaggatcactggtggagttctcaatagtaatagcttaaggacactaaaagacaggagagatttgttttacccattttctcatatcttgcacaattcgaaaccagttgggcatcaggatcttgttggtttggtaatctcaatactgcttcttgcagatttcagcttagttttgcttacttttctccagctgtattcatattctatggtcgatgttctcttggttttgtttattctaccgcttgggattttgtcgccttttcctgccggtataaatgctctatttagtcatggaccgaggcggtcagcaggccttgctcgtgtgtatgcattgtggaacataacttcactggtcaatgttgttgtggctttcatatgtggttttgtacattataagttatcaaccaaaacacacccgagcgtgcagccctggaacctgggaacggatgaaagcggttggtggctcttcccaaccggactcatgctgttgaaatgcattcaagcaaggcttgttgattggcacgttgctaatttagagattcaagaccgtgcggtatatagcaatgacccaaacatattttggcagtcatgacccctgttgtaactgagggtccttctgggaagctttttacaactcgattttttgggagttgataaaaggaagagtgcgggcaaaggcctttctttattgaccaggcaaaagaaggaactacagaggttatatagatgcgtacttccgcatcccccgctgatcatgtgcagttgcaaacggtgttctgttgtatatataaaaggtgttcttgatccattctttgtaggatttagacaccatagagtttgtttataagcaatgtgaaagctaacctaaagagacatggggggatgtggatttgttgttcttttgctaccatgccctggcccttgatgtttgttgagatgggcagaggggcaactcaagtcatcgagatgcaaacgcctcttgttgtatgcgatcagatgggtaaaacaattatattattaacatgttccatggtcttcgctgacagcaaggctggtaaagctgtgagaaatcggtgtggtctgggtgatgtgccgtttgcagctttgcaattcatcgagggatgcaaaaaccttctgacatatctgacgctgtgtcacttgcagacctgtagtggtggatggatggctaagtgggtcacctaaacaaaaccgggtgctatgtactcggcagagaatgtcctcgacgatggatggacaactttaggggctgtttggaactggttttaagtctaaaaccac

SEQ ID NO: 9251 - DNA, 4668 bp, Zea Mays
cgtagacccgcccccggacgacgaacacgagaagcagcaggccaaaccaatcccgttcccgtcggcctctagcaggtcctccccaaatcccccgcgatccccgaaaccctaccctccagcgccgcaagcccgcaacacgacccttccgccacctccgtcgcgctcccgcaatccagggtcgcccggcattggttttggagcgggaggtttgagctcttctaagaatcggttttgcgaggctttcgatgggttcggaccgtgaaggccgcggctcggaggccgtggcggcgagtaagccgcggaagaggcaactggtgatggagtccagcgattccgaggccgacgagttctgcatctccacgcggcagaatgctagtggtgccgcgtcgttgggcaatgctggtgtcagcagccaaggcagtggcgatcggtcggaggagaaacctgtgacttctagtcctgagaagcttccaggggttaagtccagtgatgtagatggttcagacaagaaaacgggagttcagctggagagcagtagttcgcagcctgctgtcaagaggatcagagttgagactgtccatggtgatggcaatggatgcagtggaggcgcatctaagtgtgggactggtggaaaaatgctgcctcgggggctcccagcatggcggtttgagaggccagaagtaaggggagggcgtgttctggatgacaaaggtggggtgagtatgaaagcaagcagtgcttcaaagatgaaggagcaggtatcaagtttgggtgacaagagacaggcagagctgcagaaacatgaaagaaggacaccattgaagactgatcagggcaaagcaatcgattctggccaacaggaggttttaaggttgcaagggaaaaggggtgttttaaggatattgccaaagaatgataaggtgaccagggatactggtgatggtaagattctgtcaaggcaaactgaggtggatgaggagactggtaatggcaggattccaacaaagcgaggtgttttaaagctcctgccgaagaacaatggtgctgtgatggagagtaatgaatgcaagcttctgtccaagaaggttaaggtggatgaggaaactggggatgacaagatgccaatgaagaaaactaaggtggttgataaggagaccagtgatggcaagattcttgcaattacaactaacttggatgcagagtttggtggccataagttgccaatgaagaactgtactgtggacatggaaactgttgctgggaagtttcagcaaaagaacagtaaggcagatggagaaaccaaagggagatataaaggatatgaagagaaaagtggcgcccctgcagaatttcagaagcatgatgcaaatggtgagaagagagttctgggaaagctactctctcccgttgcgctgaggaaaagtgatccaagcgtagtgggagtttctttgggccagagaatgaaacaacaaaattcaaagcaacaactgaagaactattctctgagcttgaaagatgatagcactaaatcaagtgaacagaagaatctgaaaaaaagattgcttgagcataaagggtcatcagagagtttgtcaaagaaggcacaactgaaagctgttgatcagcaagccacatctggccctgtgctcaacaagcttgaaaagaagccaagaggaggacccctcaacaaacataagcaggatctcaggaacaagataaaacatgtgcttttagataatgggtggaaaattgacctaaggcagaggaaaaacaaagattatgaagactcagtctatgtttctcctaccgggactggctattggtcaatcactaaggcttatgcagttttccaagaacagtttcaaaatatgggtcgctcatctaaacttaataatactaaaccaggtgcttcagatgctatatcgaaggatgatctagcattgctaaaaaagaatatagtaaagagaaggactaataaggaaatttgtggtgctgaaaagaaacctggggttagcagaaacagaagctctaaagatatccttgctaatagagattttagaaacaagcatcagaacaaggaggatagggtaaaaattaaagatcggagatgtgggcttcttgtccgtgggagtacccatgatactgaagataacatggatggctatattccatatgaatggaagcgtacattatgttcatggatgatagatctgggggttatttctgaagacatgcatgtcaaatacatgaacagcaatagaaccagggaaatgttggcaggtaaaattaccagggagggtattttctgtgggtgctgttccaagattctcacaatagcgaagtttgaacttcatgctggttcaaaagagaagaagccctatgcaaacatctttctggaaggtggtaaggtatctttgttgcaatgcttacttgatgcatgggagaagcacacacaaagtgaaaataagggattttacaagatagataaaggcgacgatgaacatgatgatacttgtgctatttgtggggatggtggcgatttggtgtgctgtgatcactgtgcttccacttttcatttggactgtttgggaattaagcttccctctggcgattggtattgtcgcagctgtttatgtaggttctgtggttttccccaagaaaagccatcatcttctcctgagttattactttcttgtttgcaatgttcaaggaaatatcaccaaacttgttcatctggaaccgggacagactctggttgtaccatgcctggtacctctattgattgcttttgcagtccaggatgtagaaagatttataaacgattaaacaagcttcttgggataaagaatcatatggaggctggattttcatggagtctggttcactgttttgctaatgatcaggccatgcccaataaaaataaagaaaagttggcacagtgcaactccaagacagcccttgctttcacagttctggatgagtgctttcagccacacattgacgatagaagtggaattaatatgattcacaatgttgcatataattgtggttctgatttcagtcgtttagacttcagtggtttctatgcatttatcctggaacggggtgatgaagtaatagctgcagcatctgtaaggattcatggaactgatttagcagaaatgccattcataggcacaagaggcatgtataggcaccaagggatgtgtcgtcgactactgaatggaattgaatcggccctcggttccctcagtgttcagaaactagtagtatctgctgtgactgaaatggagaatacttggacaactggttttggttttaagcctgttgcaccttccaagaaacaaagaatgaagtcgttaaatctcttgattatgaatgggaccggtctactagagaagaggttgctgccaacacaaacagttgatggacagatcactaccaagacagctaatgctgttggatctgataagatggatgctaaaatgcttggtgaagcaagtggatctgtgacacccattcatgtttctagtgaacccgatgcctctgacaatcgtgaaattaatcgccatgagagtcctcatcctttaggaaactctgcaggcttgacattggaccagtctcctgctgcagacgaaaatgaagcgaaaataactacagaaaggacacccccagtatccataggtgatgctaagacagtcaaggtgcatacacttcctggagctacttgtggagttaacttgcagtgcatggttgaagcagagaacattcaacaagagaaatacaaagaaaccaatgggagattgattgctgaaaatactatttcagagcagaagtgtgaagatagatctaattccagtcgttcaaattcatgtgctactccggtgactgtggatcaatgttctcatttatctaatgagattgggaaaggtgacaactgtttatctagtgaagtttctgttggagctgctcccataacaggcaaaactgaatctagtttgacatctgttcattgcgctaaccaagaggatgagaaagcttacgcagcccctgtggacactaaaatacctttagtcattatggatgaaaagcctgataagcatgagtttaaaactatggttgtagggtgtagtcaaggctcaatggaacctaaaagtttggaaaatagaactagtattgtaaatggaacctcaatggacgcctatagagataaaatacctaatgaagatcacagtgcttctgcagttgacactggagtatctgtgaagctatatgctcagcaaatggagacgattgaggaaaaaactggctcagttttaccagattcggaacactcttctagttgcaaagatgtgttggtgaccttgactgagtcaaagccacttaaaaatgacattcttgaaatggatgatgcagttattaaggtaggaatgactggtcagagtttcaatgaagcaggaataacagctcctgcgctcaacatttcagatcctgttggtgaaaatgtggttaagcctactcaaacttgtggggagggtcaacttcgtggagaggatgtcatatacagtaataacgtcatggaagatgacctaacttctagagcatgctgatgtatgatcattgtattttctgctagaaaagtcaagcttcatctgaaatcaggcggtg

SEQ ID NO: 9252 - DNA, 5095 bp, Zea Mays
cgtagacccgcccccggacgacgaacacgagaagcagcaggccaaaccaatcccgttcccgtcggcctctagcaggtcctccccaaatcccccgcgatccccgaaaccctaccctccagcgccgcaagcccgcaacacgacccttccgccacctccgtcgcgctcccgcaatccagggtcgcccggcattggttttggagcgggaggtttgagctcttctaagaatcggttttgcgaggctttcgatgggttcggaccgtgaaggccgcggctcggaggccgtggcggcgagtaagccgcggaagaggcaactggtgatggagtccagcgattccgaggccgacgagttctgcatctccacgcggcagaatgctagtggtgccgcgtcgttgggcaatgctggtgtcagcagccaaggcagtggcgatcggtcggaggagaaacctgtgacttctagtcctgagaagcttccaggggttaagtccagtgatgtagatggttcagacaagaaaacgggagttcagctggagagcagtagttcgcagcctgctgtcaagaggatcagagttgagactgtccatggtgatggcaatggatgcagtggaggcgcatctaagtgtgggactggtggaaaaatgctgcctcgggggctcccagcatggcggtttgagaggccagaagtaaggggagggcgtgttctggatgacaaaggtggggtgagtatgaaagcaagcagtgcttcaaagatgaaggagcaggtatcaagtttgggtgacaagagacaggcagagctgcagaaacatgaaagaaggacaccattgaagactgatcagggcaaagcaatcgattctggccaacaggaggttttaaggttgcaagggaaaaggggtgttttaaggatattgccaaagaatgataaggtgaccagggatactggtgatggtaagattctgtcaaggcaaactgaggtggatgaggagactggtaatggcaggattccaacaaagcgaggtgttttaaagctcctgccgaagaacaatggtgctgtgatggagagtaatgaatgcaagcttctgtccaagaaggttaaggtggatgaggaaactggggatgacaagatgccaatgaagaaaactaaggtggttgataaggagaccagtgatggcaagattcttgcaattacaactaacttggatgcagagtttggtggccataagttgccaatgaagaactgtactgtggacatggaaactgttgctgggaagtttcagcaaaagaacagtaaggcagatggagaaaccaaagggagatataaaggatatgaagagaaaagtggcgcccctgcagaatttcagaagcatgatgcaaatggtgagaagagagttctgggaaagctactctctcccgttgcgctgaggaaaagtgatccaagcgtagtgggagtttctttgggccagagaatgaaacaacaaaattcaaagcaacaactgaagaactattctctgagcttgaaagatgatagcactaaatcaagtgaacagaagaatctgaaaaaaagattgcttgagcataaagggtcatcagagagtttgtcaaagaaggcacaactgaaagctgttgatcagcaagccacatctggccctgtgctcaacaagcttgaaaagaagccaagaggaggacccctcaacaaacataagcaggatctcaggaacaagataaaacatgtgcttttagataatgggtggaaaattgacctaaggcagaggaaaaacaaagattatgaagactcagtctatgtttctcctaccgggactggctattggtcaatcactaaggcttatgcagttttccaagaacagtttcaaaatatgggtcgctcatctaaacttaataatactaaaccaggtgcttcagatgctatatcgaaggatgatctagcattgctaaaaaagaatatagtaaagagaaggactaataaggaaatttgtggtgctgaaaagaaacctggggttagcagaaacagaagctctaaagatatccttgctaatagagattttagaaacaagcatcagaacaaggaggatagggtaaaaattaaagatcggagatgtgggcttcttgtccgtgggagtacccatgatactgaagataacatggatggctatattccatatgaatggaagcgtacattatgttcatggatgatagatctgggggttatttctgaagacatgcatgtcaaatacatgaacagcaatagaaccagggaaatgttggcaggtaaaattaccagggagggtattttctgtgggtgctgttccaagattctcacaatagcgaagtttgaacttcatgctggttcaaaagagaagaagccctatgcaaacatctttctggaaggtggtaaggtatctttgttgcaatgcttacttgatgcatgggagaagcacacacaaagtgaaaataagggattttacaagatagataaaggcgacgatgaacatgatgatacttgtgctatttgtggggatggtggcgatttggtgtgctgtgatcactgtgcttccacttttcatttggactgtttgggaattaagcttccctctggcgattggtattgtcgcagctgtttatgtaggttctgtggttttccccaagaaaagccatcatcttctcctgagttattactttcttgtttgcaatgttcaaggaaatatcaccaaacttgttcatctggaaccgggacagactctggttgtaccatgcctggtacctctattgattgcttttgcagtccaggatgtagaaagatttataaacgattaaacaagcttcttgggataaagaatcatatggaggctggattttcatggagtctggttcactgttttgctaatgatcaggccatgcccaataaaaataaagaaaagttggcacagtgcaactccaagacagcccttgctttcacagttctggatgagtgctttcagccacacattgacgatagaagtggaattaatatgattcacaatgttgcatataattgtggttctgatttcagtcgtttagacttcagtggtttctatgcatttatcctggaacggggtgatgaagtaatagctgcagcatctgtaaggattcatggaactgatttagcagaaatgccattcataggcacaagaggcatgtataggcaccaagggatgtgtcgtcgactactgaatggaattgaatcggccctcggttccctcagtgttcagaaactagtagtatctgctgtgactgaaatggagaatacttggacaactggttttggttttaagcctgttgcaccttccaagaaacaaagaatgaagtcgttaaatctcttgattatgaatgggaccggtctactagagaagaggttgctgccaacacaaacagttgatggacagatcactaccaagacagctaatgctgttggatctgataagatggatgctaaaatgcttggtgaagcaagtggatctgtgacacccattcatgtttctagtgaacccgatgcctctgacaatcgtgaaattaatcgccatgagagtcctcatcctttaggaaactctgcaggcttgacattggaccagtctcctgctgcagacgaaaatgaagcgaaaataactacagaaaggacacccccagtatccataggtgatgctaagacagtcaaggtgcatacacttcctggagctacttgtggagttaacttgcagtgcatggttgaagcagagaacattcaacaagagaaatacaaagaaaccaatgggagattgattgctgaaaatactatttcagagcagaagtgtgaagatagatctaattccagtcgttcaaattcatgtgctactccggtgactgtggatcaatgttctcatttatctaatgagattgggaaaggtgacaactgtttatctagtgaagtttctgttggagctgctcccataacaggcaaaactgaatctagtttgacatctgttcattgcgctaaccaagaggatgagaaagcttacgcagcccctgtggacactaaaatacctttagtcattatggatgaaaagcctgataagcatgagtttaaaactatggttgtagggtgtagtcaaggctcaatggaacctaaaagtttggaaaatagaactagtattgtaaatggaacctcaatggacgcctatagagataaaatacctaatgaagatcacagtgcttctgcagttgacactggagtatctgtgaagctatatgctcagcaaatggagacgattgaggaaaaaactggctcagttttaccagattcggaacactcttctagttgcaaagatgtgttggtgaccttgactgagtcaaagccacttaaaaatgacattcttgaaatggatgatgcagttattaaggtaggaatgactggtcagagtttcaatgaagcaggaataacagctcctgcgctcaacatttcagatcctgttggtgaaaatgtggttaagcctactcaaacttgtggggagggtcaacttcgtggagaggatgtcatatacagtaataacgtcatggaagatgacctaacttctagagcatgctgatgtatgatcattgtattttctgctagaaaagtggacatcaagaatagctggtagtgggcactcattggtataaaggagagatcgttgggctggcgactggcatggatggatttttactgtgtgcgaggcacttctgggagcgcggggaccgtccgcgggaaggcatgacacagttggctcttaagctttcctgacttttggttcttctacattgaggctgttgaccatggagcctttttttagtagtagaagtaagcaaattgaaccatggaagttctatacgacccacaatccgggtcaacattttgttgtagatatacatgtctggtagttttctgttgtcctcctggtcgacccgaactccttattaagagctggtacttggtacccatggtatgcatgtgaaattctgttccttgtacagagagtagaaaagaaaatgaaagccgtgccagcggttataagccgtcgcttgtttatccgtg

SEQ ID NO: 9253 - DNA, 1976 bp, Zea Mays
cagcctctccgctcattgatccgtgctgcaacgctgttgctccaagcgaagggaggctgtgcattctggtgctgatcttgaatctgctatagcaagttgtatgggatacaaatcagagggtgaaggtttcatggttggtgttcagatcaatccagtgaagggtttaccatctggatttccggagttgcttgaatttgtgcttgaacatgttgaggataaatcagcggaaccacttcttgaggacagcaattgaaaggtcatatgaggagctgaatgatgcagccccagagaaaataatgtacttcatcagtcttgtccttgaaaatcttgcgctttcaattgacgacaatgaagacatcctgtattgtttaaagggatggaaccaagccttggaaatggctaagcaaaaagacgaccaatgggcgctctatgctaaagcatttcttgacagaaacagacttgcccttgcgagcaagggagaacaataccataatatgatgcagccctctgctgagtatcttggctcgttactcagcatagaccaatgggcagtcaatatcttcacagaagaaattatacgcggtggatcagctgctactctgtctgctcttctgaaccgatttgatcctgttttaaggaatgttgctcacctcggaagttggcaggttataagcccggttgaagtatcaggttatgtggttgtggttgatgagttacttgctgtccagaacaaatcttatgataaaccaaccatccttgtggcaaagagtgtcaagggagaggaagaaataccagatggagtagttggtgtaattacacctgatatgccagatgttctgtctcatgtgtcagtccgagcaaggaatagcaagggagatcacagagagtgaacttcagcaatcaagttctccaaatgcagaagttggccatgcagtaccatctatttcattggccaagaagaaatttcttggaaaatatgcaatatcagccgaagaattctctgaggaaatggttggggccaagtctcggaatatagcatacctcaaaggaaaagtaccttcatgggtcggtgtcccaacgtcagttgcgataccatttggcacttttgagaaggttttgtcagatgggcttaataaggaagtagcacagagcatagagaagcttaagatcagacttgcccaagaagattttagtgctctaggtgaaataagaaaagtcgtccttaatcttactgctcctatgcaattggttaatgagctgaaggagaggatgctaggctctggaatgccctggcctggtgatgaaggagacaagcgttgggagcaagcatggatggctattaaaaaggtttgggcatcaaaatggaacgaaagagcatattttagcacacgcaaggtgaaacttgatcatgagtacctttcgatggctgttctcgtgcaagaagttgtgaatgcagattatgcttttgtcattcataccacaaacccatcgtctggagattcttctgagatatatgctgaagtggtgaaagggcttggcgagaccctcgtgggagcctatcctggtcgtgctatgagctttgtttgcaaaaaagatgaccttgactctcccaagttacttggttacccaagcaagccaattggtctcttcataaggcaatcaatcatcttccgttccgactccaacggtgaggacctggaaggttatgctggagcaggattatatgatagtgtaccgatggatgaggaggatgaggttgtacttgattatacaactgaccctcttatagtagaccgtggattccgaagctcaatcctctcaagcatagcacgggctggccatgccatcgaggagctatatggttctcctcaggacgtcgagggagtagtgaaggatggaaaaatctatgtagtccagacaagaccacagatgtaaaatagagaaagttcttgcaaatatctactctatgaaaagga

SEQ ID NO: 9254 - DNA, 2431 bp, Zea Mays
ttcgcgcccgctcgactcttcttcgccggcggcaaccgccatggctcctcctcgcccccctctcccaaccgtactctccgtcctcctccttctcctcctcgcggccggcagcgcaggcggcgtggagatcctcgccaagtcccttttggagagctgcgttgccgactcgggcgcgggggggcgcctctcctgcgacagaaaggtagtggtcgacatggccgtccccagcggatccaacggcggtgaggcgtggctggtcgcgcaggtcgcgcacgttaacgacacaaagcaatcgaagaccataagaaatccccctgtcatcaccgtcaacaagggcgccgtgtttgcgctctacgccctcaactacatcagggatgttgcttacaaaccagaggaacagtatgttgagacacgcaaatgtgaaccagatgctggttctgatgttgttagagcttgtgaaagcctgtttgctgtccctgtggtcctaaccgccgtgtaccttcatcttgtggaaacgtttttgagaaaattttcaaaggaaaagctaatacggctcactgtctaagatttccaggtgactggttccatgtttttggaattggaacaaggtcacttgggttcaacatcagggtacaagttaagaaaggttcatctgtatcggaggttgttgttggtccagagaatagaactgttgtttctaaagacaactttctgagagtgaatctcattggtgattttggtggttataccagcatcccagcatttgaggacttctatcttgtgacccctaggaagagtgctggtagtggtgagccacaaaaccttggtgctgaatatagaaagtggatgctgttggagagagttcgttttacagacggtgtcgaatgtaacaagattggtgttggttatgaggctttccaaaaccaacctaacttttgtgcatcgccatttgagagctgtttgaacaatcagctatggacctttttggagtctgacaaaaaccggataagcatgagccgacagccccaatatgttgtgcagggaaggtttcagaggatcaatcaacatccagatgcaagtgttcattctttttctattggagtgacagaagttattaatagcaatttacggatagagctgagtgctgatgacatagaatacatgtatcagaggagtccagggaatataacagacattagtgttccagcatttgaagtcttaagtcaatatggtactgcaaaggtcacaactaagaatattggtacactggaggcttcgtataccttgacatttcactgctcaagtggcatcagttttatggaggagcagtactatatcctcaaaccgaatgaagagagtacccgtttattttacttgcacgcatctacagatcaagcagcaaagtatcaatgtacagctattctgaaggcgtcggattctagtgaactcgacagacaagaatgtgttttttctactacggctacagttcttgataatggaacacagattatcggttcaaatggctacaaattgggtttctttgacaccatcaaaggctatttggttagcttctgggattttctgattgatttaatcagtggcaaatcctgcaggctgaacaaatgtcggagcttttttgacttcagctgccatgcgcagtacagatgcataacctggctcgtcatgttggtgctgctactttttatgttacccgcaggcgcaattgtcctgtatcttcttcatcagaaaggcttcttcgacccagtatacgactggtgggatgacctgctgggggcggactaccgcgcgcaccggaggcacaagaaaggccgccgccaccaccatcaccaccacgaccaccatcaccaccggcaccaccaccaccacgggcactcgcacggccatgaccaccacccccacagtcaccaccacgcgcaccagaggagaaagatcgagcccagccaccaccacgtcctacacaggcagcagcccgggacagcggcagaaggccaccggcacaagcacgacccggcgctcggcgtgcagcacagggaggccgggcacttggggcacaagcgtcggcatggcaaagcggtggtcgcggaggacgccctggacctggagttcagggaacgaaggccatacgaggtcaggcatgccgggcacctgcaccgcgaccaccaccaccaccaccactcctgggaagtgtaggaatagttctgaccgtctgaactttaagacatctagcgtaagatgaagttggtgtaccgtgggcacgggacatgcccttttgcatgcatgcagtgagttagtgggtgtttaatttctagtaaactaatttgtatcgcttcattttatttcattttagtctttaatttgcttaatattgaaactaaaatttcatattcgacaaattagaaaataaaataaa

SEQ ID NO: 9255 - DNA, 1217 bp, Zea Mays
caagtttcatcgctactcgtcttgtctgattcccccgagctagcctagccagcgagatggcggggatctctcgcgcgatcagggcctgcgccgccacgtcccagcgcaccctggccgctgcttcggcggtgacgctgccgaaggaggcgggggtgaaaccggcaacggtcgggcgcagggggcggggtccggaggacgggaggcgcgtgcagtgggcgttcctcgggtgccccggggtggggaagggcacctacgccagccgcctctcgcagctgctcggcgtcccacacattgccaccggcgacctcgtccgcgacgccctggcctcccctggccccttctcgaaaaagcttgctgagattgtcaatcaaggaaaactggtgtctgatgagatcatcataaatctgctgtcaagacgcctggaagagggagaagaaaagggtgaattggggttcatccttgatggctttcctcgaaccatgagacaagcggagatacttgaaggagtcacaaatattgacttggtgatcaatctcaagcttcgagaagaagctctggttgcaagatgtcttggcagaaggatgtgcagccagtgtggagaaaacttcaatgtggcctccattgatattgagggagaaaatggtggagctccaatgtacctgcctccactattgcctccgccacagtgtgaatcgaagctaataaccagagcagatgatactgaagaagtggtaaagaaccggctacgtgtgtaccatgatctgactgaaccagtggagggattctacaaagcgcgtcaaaagctcttggagttcaatatacctggtggaatacccgaatcatggcgaaagttattggaagccttgaacatagaagactccaacaatatgagatctgcagtagcatgatttttttttaggaatgcacattaaattaaacatctgtagcttatgtcaaagttagtcaatttttctgaacattccttatatctttagaaagcacggtcgaatttggattgagattagattatttggcgtagcactctaactgtacagtagatttgtgatcgatgggcaagatgaacgaaagcggtctgtaaaaggaaagaaatagttgttcgatgaccagacatttatttgtagcctgtaccatatatgaacttgttgaaagaggtgcataccagaagcaatttgaatcgttgtggatatgattgaagc

SEQ ID NO: 9256 - DNA, 2806 bp, Zea Mays
cctcctcctcctcccccttcccgagctcctctctcttgccgtccacgctcgactgcgcgagacactggtcaacgcccgggtggcaggcggctctggtggtgtgttgtgtgtgtggtggtggggtcgggtgagtctagctccgtcgcttgcgccggaagaacttgtcgggagctgtctctagccctcgggttccatggggaggaacggtagcgtgaagcgctcggcgtcttcgagcgctgcgggtgctgctgcggggccgccgtccttctctgtgaatcccgccgactaccggttgatggaggaggtggggtacggtgcgcacgccgtcgtgtaccgcgcgatcttcctgccgaccgaggatgttgtggctgtcaagtgcctggatctcgatcagctcaataacaacatcgatgaaatacaaagggaggctcaaataatgagcttgatagatcatcctaatgtaatcagggcttactgctcatttgttgtagagcacagcctctgggtgataatgccattcatgacagagggttcttgtttacacttaatgaagatctcataccaagaaggttttgatgagccggtcattggctccattctaaaggaaactcttaaggctctggaataccttcaccggcagggtcaaatacatcgtgatgttaaggctggtaatatccttattgatggtgctggggtagtgaagcttggagactttggtgtttctgcttgtatgtttgatagaggtgacaggcaaagatctaggaatacatttgtaggaacaccatgctggatggctccagaagtgctccaacctggcactggatataatttcaaagctgacatatggtcatttggaatcactgctcttgaactagcacatggccatgctccattttcgaaatacccccctatgaaggttcttctcatgacactccagaatgcaccacctggtcttgattatgaacgtgacagaagattctcgaagtcatttaaagagatggttgcaatgtgcttggtcaaagatcaaacaaagagaccaacagctgagaagttgctaaagcattcatttttcaaaaatgcaaagcctccggagttgactattaagaatatcttatctggtttacctcctctctgggaccgtgtaaaggctctccagcttaaagatgcagcacaattggctttgaagaaaatgccttcttctgaacaggaggctctctccctgagtgaatatcaacgcggtgttagtgcatggaacttcgatatcgaggatctcaaggctcaagcatcattgattcatgatgacgagccaccagaaataaaagaagatgatgacattccaagaaacattgaggttgaaaagatcgtagattattttttccctatagaagttatttgattattatctttagaaagcttgaactttatttccaagagaaatgattgcaaaatattttgcagagttggcatgtgctcatctttgctgtagaactctgagtttgttaatgttgattacttaccttgtttcaaagttgtaattttgttaggttgaagcaaaatgcaattgaatatctgtatataactgtcactttttggtccttcaacaggatttatcttcacggaaccatttggcaaagtcatctgcaaatgaatgcaactccagccagcgagcttttgccaccactttaaattcggatggaaacagccccaccatgaacgaagcttttgattttgatattagcgatgctgacactacaagaagggctgatggatatgaaagcaacacaaggcagaatgattcgttgccctctacatcaaagagagatccagagtcgaatcattgggcaagtgatggccagagacaactgacttctggtgggaacaatagctcaacatctgaaaggggctatggttttgagaggcaaaaactttgggcatggttaatggattgtcaatatttagttatgctgagtgcttattactgttcggggtatgacagggatgcatctgtgcaaatgatatctgacaaacaaagaagtgagatgagaaaaacagcaagccttagtggtccactttcactgccaactcgtgcttctgcaaatagtctgtcagctcctattcgatcttcaggaggttatgtagattcatcaggcgataagtccaaacgaagtgtagtagagattaaaggtcgcttctcagtgacatctgagaatgtcgatcttgcaaaggttcaggaaggtccacttagtagtctctcccggaaatcaccagagggttcactgttaagaaaatctgccagcactggtgattattttgttaatcctaagctgatggcagtggctgggagtagggaggcacatatatcaccattttcatggttggggcggaggaaactcggagtaatcaatggggactggggaatgttgaagttgaaggaggctgaaaggcatgatcttaatattaagagaaaaaaagatctcttagaagaccaaatacaagacgtcatgaaggcggcccataaatcacaggccaccaccagcggccccacacacaacccagagatccaccaacaaacacctaagaagcctaaggcctaaggccagtggcggaggaaataataatgagttatggctcaagaaagaaaaaaagagagaaaaacatgatgcaacacataggactcgaacctgaaatctgttggtagcaagcagtatgaatttaccactacaccaccacaacaacaacaacaacaacaaagtctttttgtcccaagcacgttgggtgggctagagatgaaacctcatatgaaaac

SEQ ID NO: 9257 - DNA, 2332 bp, Zea Mays
cccgcattccttggcgaaggagggaggagtagccgcccggcgatgttcacctgccgctgtgccgtcgtcgttgtcgtcgccctcgccgtgcttctactgccggccgcggcgacccagttggtttactgcgacgattccacctatgccgacaacagcacgttccaggcgaacctgaatctccttagcgcggcgctccccgccaacgcctccgcctcgccggcagggttcgccactggcgcagtcggtacggcgccggaacaggtcaatgggatggcgctctgccgcggcgatacgaacgcttcctcctgttcctcctgcgtcgcggccgcgttccggtacgcgcaggcgcagcagggctgccccctcacgaagggcgccaccgtctacctggacgattgtacccttcgcttcgccggcatccgattcctcgacttccttagagaggaccagtggctcgtcccagaattggtctaagaggcgcgcgtgccttacaaatttgtgaacttgttacaagtcccgcgattgaacctgcctctgggagcgtcaacgccacagatgcctggttcggcgccgccgtcgcggggatcttcacggccctggtcgaccgcgcagcggcggcgagcaacgcgacgaggaagtacttcgccacggcggagatggatttcgaccctaagctctacggcctcgcgcagtgcgcgccggatctgacgccggcgcagtgccagggctgccttggagacctccagtcgagggtgacggcgcagttcctgagcggacggcccctcggcaacaacgctttcatggtgtggtgctccctgaggtatagtgtgtcgccgttctacgctggccgggcgatgctacagcttccggcgccgccggcacctccaccaacgtccacgcccacgcttcattcttcagggaggaaagtgaatgcagcaggaatctctgcaggcatagcctgtgttgttgtgttgatgttgattctttcggtctttttctttattcgcttcaggctaaggattaaagtgaagaaaaatgatcactcactaaagaagattgggagagctcaatgcacgatctttgatttattgacactggaagaggcgactgaacatttcgcagagaaaaataagcttggaaaaggtggtttcggtattgtgtacaaggggatactgtctgacgggcaagagatagcagtcaagaaacttttaggaagagccgggagtgggttggatcagctacaaaatgaggtgcaagtactggcagagcttcagcacaaaaatcttgttgggttacagggtttttgctcgcatcataatgatacactgctagtttatgaatacatcaagaacgggagccttgacactattctatttgatgatagggaaggaaatgcacttaactgggagcaacagtacaacatcatctttggaattgccaaggggattttgtatctccatgaggactcaagcatgaggatcatccatcgggacctgaaggcaaataacattcttcttgacgacaacatggaaccgaaaattgcagatttcgggttggcaaggcttctaggagaaggccacacacatactcagacaggcagagttgttgggacattcggttatatggcgccagagtatgcatcacatggtagtgtgtcgcctaagattgacatctttagcttcggcgtcttgatccttgagatcgtgaccaggagaagcaactgcagctctgatgaccacagcactgtgaatctcctaagtgatgtctgggatcactggaagaaagggacgatgccacaaatgcttcaccggtcactggatgagtttgctcgaagccaagcgctgcgatgcatccacattggtctgctgtgcgtccagccggaacctgacgataggcctgacatatcagccgtagtgttcatgttaaccagggatagcatagagctccagccgccggggcagcctgcgttcttcttcggtagagaatcaccttcagctttacgattagatggtcaaagcagctatgtatatcaccgtgatggtttcaaattgggacagggcgtctcggtgaatggggttacactcagtgaactgtatcctagataggatcaaagtctggatactgagcacatggaatacagttaacatgttgaactcgataggtttctttgatgattagggtcttgctaatcccctctaacctgtctccatcctttagaaatgaagtaatcgatgtagatttactccgtttcgttttagttgtcgctggatagtgcaaaattgaactatctagcgacaactaaaaagaaacgaaggaagtacatatctaattg

SEQ ID NO: 9258 - DNA, 2339 bp, Zea Mays
atcttcagactagtctagcaagctagctcctcacggaacctgcgctccgatccgccacctctcttatctgaaaacctccagagtccagcctcccttccgattccacctccaagctcccagtcccagccatggcgtctcatgatcatcaccactcccactcccacgacgaccaccaccaccattcccacggggacggcggtggccatgcggctgggggatcgtgggtaggggaggacggacgcgtgtggcactcccacgacggcctcgcgccccactcccacgagcccatctactcccccggcgacttcaccaagcgcgcgccgccgctcgcctcgcgcgacttcgctgaccgcgccttcaccgtcggcattggcggccccgtaggcaccggcttaatctggggttaggtttgttcttgatggaggcttctggacatcgatgggatctttgtcgataaagcgcttgcttgtgctgattcataccctttcgttggttttgttcctgaagctccgtcctgacatttggagtggaaaactgccctcatgctagcattgtgcagatttctacgcgacaagtatagtcttgcagctgtcacaaatgatatattcacaaaagaagatggagaattcttaattaaacatggagcgctccctgaagaacgtatacgtgcagtggaaactggaggctgccctcatgcggctattcgcgaagacatcagcataaatcttggtcctctggaggagctatcgaacttgtacaaagctgatttgctactctgtgaatctggaggaggtatatttttttacttgatccaaaataaatgtaggtcatttctattgttatgcatgttagaatctacgccggagagacaaccctgcaggttgccggcgagctcctacctcccaggtaagtttctccaggtatgagaaacctcactggtactcacacgcacgcgaacactttagagagaaacacagcagatttggtggcgtcctattgacgccttttcttagcctctaaggccatatatttatagactatcataaggaaacaaactagctattacaagggaataatccagactgctatcagtcctgatcttgctgattggatccgtcaatataagactgatccactaccatacttgctatttcctaaaacagaataagtaaactagcaccaatcaaggattactttcctaacaatgcatatatccgtatcaacctacagaatgtttttactggatctaaactcaatctaggtcattcctattgtcattgatatatctgtgcaaagtgcaaacctacatacccatctaaacattatttcagagtaatagtttctacatggatcatgttgcttctatggctgtctcatgtttgatactggacattagaatatgctcctttcaagttcttgcgtaaaagaaaattttgcattctgattctactgttttttttggagcatcatgttagctgaaacctcaggtgtcctgaatatgtcaagcatccctctggttctgaaaaatttcaacaatccagcattaaagagtgccatttgtgccttttccatgcagataacttggcagctaacttcagcagagaattagcagactacataatctacattatcgatgtctctggtggggacaagataccaagaaaaggtggccctgggataacccaggccgatctgttggtaataaacaagacagacctagcacctgctgttggagctgatctgtctgtaatggagcgagacgcacttcgcatgcgcgaaggagggccctttgtgtttgcacaggtgaaacatggagtgggcgtggaggggatcgtgaaccatattctgcaggcgtgggagatcgcgactggtaataagcggcgataagatctcacgacttggggccatatgttggatgcagatttgattcagtcggcacttccacatgcatgtgtcatctgttcgtttctcaataaattctgcgtcatttgctgctgattgtacttgacaagtagagacatggatggactcttaaaattccatccatgtgttaaatgacatattcgagacatccttttctcaataaactctgcatcatttggtgaattgcacttgagaagtaaagacatggagccttaaaattccatacttgagtttaatggcacatttgagatatcctttttctccttaaaattccatagcttcgtggattcggtattaacgctctggactacgagtgggaggttaatagtctgcaagcccgctcagtgaatgcatgaacgctggcatgttgtgaagccgttcagtgaaagttctgaatatggaaaagaaaaaaaaaa

SEQ ID NO: 9259 - DNA, 1820 bp, Zea Mays
cgcgcgcgcatctctctctcaccctgtctcatcctgcgcgcccacacgcgctcctctctcactagcgccaggccgagccgccgccgcgccaccgccgggagcccgcgccgccaccgcgccgtcaccgcgacctagacaaaaacatgtacgcctcgtctgatttgcgtcagggccctcgtctgatttgctccgccgagaagaggaggacagtgtgcgtgttgaagctgtcggaggtaaggctcggcaacggcgacggctaccagcacggccagtgctggcgcgacgtctacgatgccatatgccaggcccggaggctcatctacatcatcgggtggtccatgttccacaccatccacctggtgcgcgacggccacgatgacatggcactcggcgacctgctcaggaggaagtcgcaggagggcgtgcaggtgctgctgctcgtgtgggacgatcccacgtcccgaagactccttggcatcaagatggaaggttacatgggcacaagggatgaggagacccggagatttttcaagcactcttcagtccagatactgctttgcccacgatctgcagggaagaggcacagctgggtgaagcaacaggaaacaggcactatccttactcatcaccagaagacagtgatcttggatgctgatgctgggaatcatagaaggaagatcgttgctttcatgggaggacttgatctatgtggaggccgatatgatacaccaaagcacactctatttcgaactcttcagacatttcacaaggaagactactacaacccaaattttgcggttgaagatgctcgcggcccaagagaaccatggcatgacttgcattccaagatcgacggtccagaagcatacgatgtcctgaaaaactttgaggagcgctggttaaaggcatcaaagcgcagtgccgctaagaaactgtcaaaattgtcgaggtcgcataatgattcgctgctgtggatcaacaagatacctgatattattgctattgacgacgaaatctattcaaatgacgatgatccagagagatgggacgtgcagattttccgatcaattgattcgaattctgtcaagggttttccaaaagatccacggaaggccactagtaagaatcttgtttgtgggaaaaatgtactgattgatatgagcgtgcatacagcatatgtgaatgccatccgaggtgctcaacatttcatctatattgagaaccagtacttccttggctcttcatttaactgggattcacatagagatgttgattttcgggtacaggatgtctctatgggtagagcaaataagggggacggtgcactccccccttcgtgtgtgttttaatcaccatttctaaaatttattctattgtgatgatgacagtccatcgccgccaagaggtcacaggagaagaactcgcagcccaagtcctcgtggtagttatggaggccatggcaagcgccccacaactaatcttatggtgacgaatcttggtccggattgtaggagttatcaccttcgtgaaccattttggtttattttgtaggattccgactctcatcaagtgactcctcccctcacgatgactttgcggacagatgtctcaattatagtggtggagctacgaacaacaatccgatgtcctgatcgagagcgatggagctaatgtttgaacttgtgtgtttgaccttgtgaactaaaaatgtgaactatggatgtgaacttatatgaatttgtgaacttatgtatttggacttatgtgaatttgtgaacttatgtatttggacttgtgtgaatttgtgatatgaatattgt

SEQ ID NO: 9260 - DNA, 2065 bp, Zea Mays
ttgggggtggggtaccgcttcctcctgtgttgaagcagcctttccctgtcttctctgcactacgctacgcccgcagtccccgcacccagcagcagagtacaatgtccacaggcaaatgcgataaggtgaggaagagagagcacgggatgggttgagaaacaagatggagggagaaagtgggcagcctgctggatcttggcatctcgccgccgctcatttccgctccacctgttctaagcgctgaggaagtaaaatatcatttatcggctagagtagtctctgttgctatccggcaccaatggcgactttggtccgtcatgattcaaggcagtactcgtggtggattagccatatcagccccaagaactcgaaatggctccaggaaaatgtcagcgacatggactcaaaggttaaagcaatgatcaaacttatcaatgaagatgctgattcttttgcaaagagagcagagatgtactacaagaaacgtccagagctaatgaatttggtggaggaattctatcgagcgtaccgtgcactggcagaaagatacgatcagtccactggggcacttcgccaggctcacagaacaatttctgaagcatttccaaatcagatgccatcaatgtcagacgagtcaccctctgctttcagccaagagatggagcctcatactccagatacgtctactctcacacgtgtggcatttgattacgatgatcttcagaaggatggagttggtgtgtcaccacaaagtttcacctccaagaggaatggtacacaccctgaggaaaccagtgcgctgtcatcgagtgttgaaaatgctcctcgtgctggttttgatggaaaggtatggaaaggactaacttttgaaggcccaaatgtcaaagggaaagatgatattagcaacgagatggcaaatttgcaacaagaagttgcaagactattagctgagagccaggatctgaaacagcagatgttttcagaatccgagcgggcaaacaaagctgaaaatgagatgcaaatgctcaaggcaacagtattgcaattaaatgctgaaaaagacacatcacttatgcaatataataattcctctgagcgaatatctacattggagtctgagctatcgaaggctcagtctgaccttgagaagttaactgatgaaatggctgcagatgtccagaagctaattaatgctgaaacactcaatattgctatacagtctgaggctgagggtttggatcagaagatgaagatgcagcaacaagcactagaacaaaagcttaaggaattggagagtttccgctcaagcttccaggaggagcatgaaaagcgcatgcaggctgaaagtgctctactttcccagaggaaggaacttgctcaatctcatgaagaagtgcagaggttggctatagaaataaagacagcgaatgaaaagttgaatgagttcaagcagaccaaggaggtccttgagtacactgtttgtgagctgaagaaggatgttgagcgccttacagaacaaaaccagtcctctgaggtgcttgtacagaaacttggtgaccagattaatacactcaaggattcaaataatgaacttcaaagtgaaatacaaagccttaagagcatcatttcacagctaaacactgagaagaatgcagctgtgcttcaacaccagcagtttgtggaactggtttcggtacttgaatctcagttgtcgaagctacagtcagagctagatgagactgagcagaaagtacagatgctgacacatgatcttgaaaagaagaaagaagaagcggacaatgtccatctcaagctgcaagatgaatgccataggcgtatgcaaattgaggcaactcttctcatgacagagggtctgcattcccagttgcaagaagaaatgcaaatgttgacacaagattttgacgggtcaacaaagaagctcagtgagttggaaaaaaataagttagacctggagagcatactgaaagaactgaataacaccattttaggtttgaactcggagaaggatgcttcactccttcagcaacagcagtctttacagaaa

SEQ ID NO: 9261 - DNA, 1541 bp, Zea Mays
tattcgtgacgacgcccgcagccgccgccgccgacgatggaggagcagcacctctcgtctgtccaccgctgaccgctcgtttgtcagcctagcaccggggtgcatgaacgcccagtatatgctacagcaccgccgcccctggccctgccgcctgcgccgctcgttgccctgtgcactccgcgggccttgggaatggccaaccaggatatttatcggtttgcccaccctctcctctcttctcttctctcccgcccgctctccctctctcccttctctccggcttccgattgggtattgtttattggcttctggctttaattaattactgtatttgcatgttcaggtatgttgttcatccatctcgtatgatgaagtgttttatgctcttttccaattattgttgcaagtagcaaaattagaacatgtccttatgtttagactatgaaagaaaacactcatttcaatttgtaggtgtatttttctgtttcagttggcatatcatcatgaggatgtgaattccacaggaagacccatgtgatcttattgctcccttagatcttccacattttttacagtcttattccttgccgaggggagtcctgctccagtagtggtctcagaaggggcaaataccatggatgttggcaggcctgtgcttgtgcagaatgcaccaaggacaagactggatgcagggacatgggggacgatggggattggattggggtactgtattgcagctgcagtagctgaacctgaatgactcgtggttgctgtggagggcgattctggatttggcttcagtgcaatggaggttgatgtgaacaagggcttcaacagtgatgctgttttagcaatggagacgatccattccctgtcagcttcaaaatcaagttacccaatggctgatctcacccaactcttcatgacagctacccaagaagggaaaagatcagaatcgcaaggccagattcttagggtggaatgctatagcttaatgccctaatctttatatgcctcttcttatatctgcacttccatgggcaccgggcgacactaaattcacaagataccccctccacctcaaggtgtggtatggagttctgtgtatcacaagaggcatctaggttgacctcactcttcttagtgttcatgcccactacgcaagacaacaccgcaacgccgatggagttggaagatttcattagtttcgactggatctggatgagatggactctgcttgtaaggagagagagagtgcatggcttgggaggagcatatttttgttcatccttttcatgagtcatgttacctgccatgtcagattatgtaacttcagatatttctgtttttgttagaaaagtaccaaaatagtttcacttcatggctactctcagatgtgttattgttgctgccactaatcatataagggtaacattgtatttgttagccaacaatttttgagatattaaagttggtgataatataattgttgtttgtttctatgtaatcgttgtgcactaatattttgctgaatattttat

SEQ ID NO: 9262 - DNA, 1766 bp, Zea Mays
ctggccagcctgcgtcaacaacacttgcaagcgcttgcctgctatagccgcgctcataattccacaacgatgaggaggcagagctcgctcgctcgctcatactcctcagtggcaccagcgccgcacaacggaggagtgaacagcaagcacttggttccgcccatggaggttgtgtcgtcggcggaggagggcggcaacgccggtggtgcagccgaggggctggacgacgacggccggccccggcgcaagggcacgttctggacagccagcgcgcacatcatcaccgccgtcatcggctcgggcgtgctctccctggcctgggccatcgcgcagctcggctgggtcgccggccccgccgccttgctcctcttcgccttcgtcacctactacaccgccacgctgctcgccgagtgctaccgcaccggcgaccccgacacgggcaagcgcaactacacgtacatggacgccgtgcgctccaacctcggcggcaccaaggtcctgctctgcggcgtcatccagtacgccaacctcgtcggcgtcgccatcggctacaccatcgcgtcgtccatcagcatgaaggccgtcaggagagccgggtgcttccacgtccacggtcacggcgatccatgcaggagctccagcaccccgtacatgatcctcttcggccttgtgcagatcctcttctcccagataccggacttcgatgagatttggtggctctccattgtcgctgcagtcatgtccttcacctattcttccatcggactgtccctcggaatcgtacagaccatctccaacggcgggttcatgggcagtctcaccagcatcagcttcggcgccggtgtgagctccacgcagaaggtctggcacaccctgcaggccttcggcgacatcgccttcgcctactccttctcgaacatcctcatcgaaatccaagacacgatcaaagcaccgccgccgtcggagtcgaaggtcatgcagaaggcgacgtgcgtcagcgtggcgacgacgaccatcttctacatgctgtgcgggtgcatggggtacgcggcgttcggcgacaacgcgccggacaacctcctcaccggcttcggcttctacgagcccttctggctgctcgacgtcgccaacgtcgccatcgtcgtgcacctcgtcggcgcgtaccaggtgttctgccagcccatcttcgccttcgtcgagcgccgcgccgccgcggcctggccggacagcgccttcatctcacgggagctccgcgtgggccccttcgcgctcagcttgttccgcctcacgtggcggtcgtcgttcgtgtgcgtcaccaccgtcgtcgccatgctgctgccgttcttcggtgacgtggtcgggctcctcggcgccgtctccttctggccacttaccgtctacttccccgtcgagatgtacatcaagcatcgccgcgtgccccgtggcagcaccaggtggatctgccttcagacgctcagcgtcacctgcctcctcgtctccattgccgccgccgccggttccattgctgacgtcatcgacgcgctcaaggtgtaccggccgttcagcggctaacctggaagaacgtggcgggatcagggatctgtgtaaaacgcaggactatgaacagctctgaaaaagcaggtgagctccactgcacaaccatatgcggttactataggcaagcaaagaagaggcgacctaacctctcttatcattgttagccgcaactcttatacattaaggggaacaccatttttctattttcc

SEQ ID NO: 9263 - DNA, 6127 bp, Zea Mays
gcagcagcaagtagtagaggaagaggcgcccgaataccacggtgcctccgcctcgaccgccccccgggctccgacgcccttcctcaccaccgtgccttgctcctcctcctgctgctgcgctccgccgcggagccctaggcggagctgcggaccccgtgaccccccgcggcaccgccccggagctcggcggaggcggcgggcacgtcctcctcatgcctttggcgccccggtcggagccgatcggtggccgcctgaggagacgcagcagctcggcgggcgccggcggagaggcggcgggcacgtcctcctcatgcctttggcgccccggtcggagccgatcggtggccgcctgaggagacgcagcagctcggcgggcgccggcggagaggcggcgggcgcggaggtggaggcggaggcggaggaggaggaaggggagaatggcgctcttccgcaagttcttcctcaagaagaccccggatcggctgctcgagatctccgagaacgtctacgtgtttgactgttgcttctcgactgattccatgggtgaggatgagtatcgggattacttgagtggcattgtcgcgcaattgcaggaattttttccggacacatcacttatggcatccaatttttggtctggggacaaaagaagccggatatcagatattttatctgagtatgacatgacagtaatggactacccacaacagtatgaaggatgtccgttgcttcagctcgagatgatccaccatttcttgaaatcatgtgaaaattggctatcagtggaaggacaacataacatgcttttgatgcattgcgagagagggggttggccagtgcttgcattcatgttggccggactgcttttgtatcgcaaaatatatactggcgagcagaggacactagaaatggtctacaagcaggctcgcagggactttatacagcagttctttcccttgaatccccagccttcacatttgagatatctgcactatataacaagacaaggaggtggttcagaatggcctcctattagcagacccctcatcttggattcaatagttctccatgttgttccgcggtttgacacagatggtggttgtaggccatacttgattgtacatgggcaagactcaagtcctggtaacaagagtgcaaaggtcctttatgagatgccaaaaacaaagaagcaccttcagcgttatggacaggcagaggttcccataaaattaagtgtgtcctgccatgttcatggagatgtggtacttgaattcatccatattggcgataatatagagaataaggaaacaatgttccgggtcatgttcaacactgcattcgttcaatcaaacatccttgaactgaatcgtgatgatattgatgttgcttggaatgtgaataatcagttcccaagggactttcgagctgaggtacacttttcagaccctgtttcatttaagcctgctgctaccatcgaggaggtagctgatgatggagacgagactgatgttgcttcggtagacacaggagaggagttttatgaagcagaggagtattggcatgatgctagaaaagacccagcaactcattcaattgatggtggaatatcattaaatgacattgcagaatttgatggtggggcaacaactgaagaaaggagcagcctagagaagcaccgatctgatgagggtgtgaagattgctgtctcccagaattttggtagtatgaatgaaaaagtggcaattgcacctacctcaagttttgagaatcaagaaggattgcagcagcctcgtgaagttcttccaaatgctaaactaagcaaaaataatgatcaagagaacagtgatgtgcatgatatacaggtggttgctacatctgttgattcagagggacacaagtttggatctaccggtcaggaggacacgaaaggtgtaattgcacaaactttagtcacgacagtcgatctaagtggcagtgatggaattcactgccagactgatgaacaaacaaaaatgtcagaataccctgatttggactacactgcttttggctctcctagaagtttgtcacgtacagatggggatgcccacatgagaactaagaaaaatgaagggttgcagaatggtgatattaagattatcactgagaacacaataagtgtggacaacgagctagtgatctatgaagagaaaactatagttgtcaatggtaatgcaatacaggtagtaaaaaacgttgtcaatgaagagagcatcgcggctaagataggcaaaccaattactgagagtaggacctcattggacaatgacaatggcaagattcaaactgctaaaccttctgatatagccaatggcaaattggatgggtgtagattagaatcttgccttgaaaccgtgcctaccaagaaaaccactgtccatgacagaattgttgtcttaccagccactggagtagcaactgagataaaagccaagcaagaggtgcttgttgacaaacaggattttggtatagttcttcctcaaagtcgaacagtagccagggctaggagtccgaggcttggaagtgatgaccgagggcaaatccctgataaagctgtgttatcagtattgaaggagatggtagtaggcaatgcaaagatggaagatcaaccaaagcttgccaaaccaaaaataatgcgtagatggatctcaccaaagaaggaatctgacgctacctctgtgcgcagaccatctcaccctccatctagatactacagttcaccagctgcactaggtattcgatccatatctacagatggtaaaatcagcgttgtgaatgatgcacctttattatcactaaaacaaccatatggcagcaacttgacacgagaagcaacatctgcacagtctgctccatcgcctccacaaaaatccttgttactaggtgcacaaagtgcatcaagaagccaggtttctccaccgccaccgcctccacctccacctgcaaccaactattcttcaagttctacgcctatgcacatggggttagcttcaacaggtttgtcaaacttacctcaaggtgcttctccacctaggtcaccggtagcacaaaaacatgcatttgcccctcccgctcctcccccgcccccacctccacccccgaggtcaggtgtaggtggaaatactccacctccgcctcctccaaggctaaataacagtgcaatcgctccaccgccacccccatccaccataacacgatcaagtgctcctcctccaccaccaccaccacaatcaatgtcacgttctgctcctccgccacctccgccgccaccaccatcattgtgttctaatgttccattgccacctctttcatgcacactttctgctccacctcctccgccgccaccaccactaccttctatggcacgttcagcagcaccatctcccccgccacctcctcctagccgaggagcacccccaccccttccccttggtcgaggagcacctccacccccacccccaccaccaccacctggccgaggagcacccccacccccacctcctcctggccggggagcatccctgcccccacctcctccccctagccgaggagcacccccgcccccacctcctcctgtttcacgtgcaggacctccaccacctccgcctcctccaggtgctcgctgtggacctccacctcctccaccccctccaggtgcaagtgctccacctccacctcctcctccaggtgcacggccaggagctccaccaccaccgcctcctctaggagcgcggccaggagctccacctcccccacccccacctggaggtggtggaagaggacctctaccacctcgtgcaccaggtgtgccaactccacctagagcaccaggtgtaccgctaccaccaggaagtaatccatcattaggcagaggacgtggggctgtacgccctatgggatcagctattggggctgctgcctcacgcaagtcaactttgaagccattgcactgggtcaaagtgacaagggcccttcaaggtagtctttgggaagaattgcagcgcaacactgactcgcagagcgtttcagagttcgatgtatcagaacttgagagcctttttcctgcagctgttccaaagtctgatgacagctcaaaatctgaacgtagaaaatcacttggatcaaaaccagaaaaagtgcatctaattgagttgaggagggcaaataacacagagatcatgctgacaaaagttaaaatgccactctcggatttggtgagtgcagctctcacgctagatcaatctaccttggatgttgatcaagtggagaatctcataaagttctgtcctacgaaagaagaaatggaacttctcaagaattacactggagacaaacagattcttgggaaatgtgaacagttcttcttagaattgatgaaagtgcctagaatggagtcgaaactgcgagtattctccttcaagatccagtttggttcacaagttgctgatctgagaagaaacttggatatcatagactcttcttgtaatgagatccgaacttctctcaagttgaaagaaataatgaagaaaatccttctccttggaaatactctgaaccagggaactgctagagagtactacttccacttaacatgataaatgccagactcaagtaggactgttctgtggtttgtaaaccatagctctatctttcctgaacttcaggatgtcatggcataatgctatgttacatagccagtgcatgttctccatcttctactcgatcaacaggtgtacaatgtttcagtttaaacctgtatactcgtcaccaatgtctttaaccaatattgttgtctttatgcatgcgaccaagaagttgaatagaatcgaagactcaatacacaatgaactgtattttgcatgaagatggtcagatgttccgtgagtgttgtatgggataggggctgcggttggcttccggttggacagtcttctaaaacttacagacacccgagcaacaaataataagatgacactaatgcactacctctgtaaggtacttgctgcaagatctccacagcttttaaacttctatgcggatcttgttagcttagacgccgcatcaaagatacaactaaaaatgttggccgaggaaatgcaagcagttagtaaagggctggaaaaggttcagcttgagtatgatgcttcagaaagggatggtccagtatccaaaatttttcgtgagaaactgaaagagttcaccgacaatgctggatctgatgtgcagtcgttatcttcattgttttctgaagtgggtaaaaaggctgacgcgttgatcaagtattttggcgaggatcctgtccgttgccccttcgaacaagtgatctccaccctcttaacttttgtaacaacatttcgaaaagcacatgaggagaacctgaagcaagctgaacttgagaagaaaaaagctgaaaaagaggcagaagcagagaaggccaaaaacgcacaattaactggcaaaaatcactctaaatcatcaaatccaagccgacaagctaagcaagccatagagaggacaagatctgtaagcagacgaggaagagatgctgggtgattatcccgaatggccggctattgtggctgtgcttctgatctgcttgcgaggcaaatgaacgaccgcatgatgcatttctggcaaggggagtttcgtggacggacgccgtggcatccgtcgggtgcagcgcgatcgcatcaaagaaactttacatgataccagctgcggactctcactggagaatgccggcttctttttttatccatatcgtccatcagggtccagtgctaacttctgactgctgtaaagagaaactgaaagagttcaccgacaatgctggaatcgttatcttcattgttttccgaagtgggtaaaaaggctgacgcgatgatcaagcattttggcgaggatcctatccgttgccccttcaaacaagggagaagcaccaaaaatttatcagcactctaaaccaaacaataagaccttgggagagaatggactcatgttggtcatagcatggtaaggtcagtttaactatttttgtttcaccctaagatctggtcctgtgtttggtgtaattgattaaagagttaaa

SEQ ID NO: 9264 - DNA, 6516 bp, Zea Mays
gcagcagcaagtagtagaggaagaggcgcccgaataccacggtgcctccgcctcgaccgccccccgggctccgacgcccttcctcaccaccgtgccttgctcctcctcctgctgctgcgctccgccgcggagccctaggcggagctgcggaccccgtgaccccccgcggcaccgccccggagctcggcggaggcggcgggcacgtcctcctcatgcctttggcgccccggtcggagccgatcggtggccgcctgaggagacgcagcagctcggcgggcgccggcggagaggcggcgggcacgtcctcctcatgcctttggcgccccggtcggagccgatcggtggccgcctgaggagacgcagcagctcggcgggcgccggcggagaggcggcgggcgcggaggtggaggcggaggcggaggaggaggaaggggagaatggcgctcttccgcaagttcttcctcaagaagaccccggatcggctgctcgagatctccgagaacgtctacgtgtttgactgttgcttctcgactgattccatgggtgaggatgagtatcgggattacttgagtggcattgtcgcgcaattgcaggaattttttccggacacatcacttatggcatccaatttttggtctggggacaaaagaagccggatatcagatattttatctgagtatgacatgacagtaatggactacccacaacagtatgaaggatgtccgttgcttcagctcgagatgatccaccatttcttgaaatcatgtgaaaattggctatcagtggaaggacaacataacatgcttttgatgcattgcgagagagggggttggccagtgcttgcattcatgttggccggactgcttttgtatcgcaaaatatatactggcgagcagaggacactagaaatggtctacaagcaggctcgcagggactttatacagcagttctttcccttgaatccccagccttcacatttgagatatctgcactatataacaagacaaggaggtggttcagaatggcctcctattagcagacccctcatcttggattcaatagttctccatgttgttccgcggtttgacacagatggtggttgtaggccatacttgattgtacatgggcaagactcaagtcctggtaacaagagtgcaaaggtcctttatgagatgccaaaaacaaagaagcaccttcagcgttatggacaggcagaggttcccataaaattaagtgtgtcctgccatgttcatggagatgtggtacttgaattcatccatattggcgataatatagagaataaggaaacaatgttccgggtcatgttcaacactgcattcgttcaatcaaacatccttgaactgaatcgtgatgatattgatgttgcttggaatgtgaataatcagttcccaagggactttcgagctgaggtacacttttcagaccctgtttcatttaagcctgctgctaccatcgaggaggtagctgatgatggagacgagactgatgttgcttcggtagacacaggagaggagttttatgaagcagaggagtattggcatgatgctagaaaagacccagcaactcattcaattgatggtggaatatcattaaatgacattgcagaatttgatggtggggcaacaactgaagaaaggagcagcctagagaagcaccgatctgatgagggtgtgaagattgctgtctcccagaattttggtagtatgaatgaaaaagtggcaattgcacctacctcaagttttgagaatcaagaaggattgcagcagcctcgtgaagttcttccaaatgctaaactaagcaaaaataatgatcaagagaacagtgatgtgcatgatatacaggtggttgctacatctgttgattcagagggacacaagtttggatctaccggtcaggaggacacgaaaggtgtaattgcacaaactttagtcacgacagtcgatctaagtggcagtgatggaattcactgccagactgatgaacaaacaaaaatgtcagaataccctgatttggactacactgcttttggctctcctagaagtttgtcacgtacagatggggatgcccacatgagaactaagaaaaatgaagggttgcagaatggtgatattaagattatcactgagaacacaataagtgtggacaacgagctagtgatctatgaagagaaaactatagttgtcaatggtaatgcaatacaggtagtaaaaaacgttgtcaatgaagagagcatcgcggctaagataggcaaaccaattactgagagtaggacctcattggacaatgacaatggcaagattcaaactgctaaaccttctgatatagccaatggcaaattggatgggtgtagattagaatcttgccttgaaaccgtgcctaccaagaaaaccactgtccatgacagaattgttgtcttaccagccactggagtagcaactgagataaaagccaagcaagaggtgcttgttgacaaacaggattttggtatagttcttcctcaaagtcgaacagtagccagggctaggagtccgaggcttggaagtgatgaccgagggcaaatccctgataaagctgtgttatcagtattgaaggagatggtagtaggcaatgcaaagatggaagatcaaccaaagcttgccaaaccaaaaataatgcgtagatggatctcaccaaagaaggaatctgacgctacctctgtgcgcagaccatctcaccctccatctagatactacagttcaccagctgcactaggtattcgatccatatctacagatggtaaaatcagcgttgtgaatgatgcacctttattatcactaaaacaaccatatggcagcaacttgacacgagaagcaacatctgcacagtctgctccatcgcctccacaaaaatccttgttactaggtgcacaaagtgcatcaagaagccaggtttctccaccgccaccgcctccacctccacctgcaaccaactattcttcaagttctacgcctatgcacatggggttagcttcaacaggtttgtcaaacttacctcaaggtgcttctccacctaggtcaccggtagcacaaaaacatgcatttgcccctcccgctcctcccccgcccccacctccacccccgaggtcaggtgtaggtggaaatactccacctccgcctcctccaaggctaaataacagtgcaatcgctccaccgccacccccatccaccataacacgatcaagtgctcctcctccaccaccaccaccacaatcaatgtcacgttctgctcctccgccacctccgccgccaccaccatcattgtgttctaatgttccattgccacctctttcatgcacactttctgctccacctcctccgccgccaccaccactaccttctatggcacgttcagcagcaccatctcccccgccacctcctcctagccgaggagcacccccaccccttccccttggtcgaggagcacctccacccccacccccaccaccaccacctggccgaggagcacccccacccccacctcctcctggccggggagcatccctgcccccacctcctccccctagccgaggagcacccccgcccccacctcctcctgtttcacgtgcaggacctccaccacctccgcctcctccaggtgctcgctgtggacctccacctcctccaccccctccaggtgcaagtgctccacctccacctcctcctccaggtgcacggccaggagctccaccaccaccgcctcctctaggagcgcggccaggagctccacctcccccacccccacctggaggtggtggaagaggacctctaccacctcgtgcaccaggtgtgccaactccacctagagcaccaggtgtaccgctaccaccaggaagtaatccatcattaggcagaggacgtggggctgtacgccctatgggatcagctattggggctgctgcctcacgcaagtcaactttgaagccattgcactgggtcaaagtgacaagggcccttcaaggtagtctttgggaagaattgcagcgcaacactgactcgcagagcgtttcagagttcgatgtatcagaacttgagagcctttttcctgcagctgttccaaagtctgatgacagctcaaaatctgaacgtagaaaatcacttggatcaaaaccagaaaaagtgcatctaattgagttgaggagggcaaataacacagagatcatgctgacaaaagttaaaatgccactctcggatttggtgagtgcagctctcacgctagatcaatctaccttggatgttgatcaagtggagaatctcataaagttctgtcctacgaaagaagaaatggaacttctcaagaattacactggagacaaacagattcttgggaaatgtgaacagttcttcttagaattgatgaaagtgcctagaatggagtcgaaactgcgagtattctccttcaagatccagtttggttcacaagttgctgatctgagaagaaacttggatatcatagactcttcttgtaatgagatccgaacttctctcaagttgaaagaaataatgaagaaaatccttctccttggaaatactctgaaccagggaactgctagagagtactacttccacttaacatgataaatgccagactcaagtaggactgttctgtggtttgtaaaccatagctctatctttcctgaacttcaggatgtcatggcataatgctatgttacatagccagtgcatgttctccatcttctactcgatcaacaggtgtacaatgtttcagtttaaacctgtatactcgtcaccaatgtctttaaccaatattgttgtctttatgcatgcgaccaagaagttgaatagaatcgaagactcaatacacaatgaactgtattttgcatgaagatggtcagatgttccgggctgcggttggcttccggttggacagtcttctaaaacttacagacacccgagcaacaaataataagatgacactaatgcactacctctgtaaggtacttgctgcaagatctccacagcttttaaacttctatgcggatcttgttagcttagacgccgcatcaaagatacaactaaaaatgttggccgaggaaatgcaagcagttagtaaagggctggaaaaggttcagcttgagtatgatgcttcagaaagggatggtccagtatccaaaatttttcgtgagaaactgaaagagttcaccgacaatgctggatctgatgtgcagtcgttatcttcattgttttctgaagtgggtaaaaaggctgacgcgttgatcaagtattttggcgaggatcctgtccgttgccccttcgaacaagtgatctccaccctcttaacttttgtaacaacatttcgaaaagcacatgaggagaacctgaagcaagctgaacttgagaagaaaaaagctgaaaaagaggcagaagcagagaaggccaaaaacgcacaattaactggcaaaaatcactctaaatcatcaaatccaagccgacaagctaagcaagccatagagaggacaagatctgtaagcagacgaggaagagatgctgggtgattatcccgaatggccggctattgtggctgtgcttctgatctgcttgcgaggcaaatgaacgaccgcatgatgcatttctggcaaggggagtttcgtggacggacgccgtggcatccgtcgggtgcagcgcgatcgcatcaaagaaactttacatgataccagctgcggactctcactggagaatgccggcttctttttttatccatatcgtccatcagggtccagtgctaacttctgactgctgtaaagagcgaatgcgtcgtcacacccagcgtagccaattcatcagggatctggaggaggccagaaaggacgaagcggcggcggtgccgtgtcctacggtcctacctgtcagttgccgcggtgtcctcctgtcctgatccacgtcgccgccactgacagactcctctctcaccgtggcacgaattgatgagccacgaattgaggattgatcaaggtcttggcatcaacaaagctgccagcggtttttcagcttcattttagtttgtttatatagatctgtgccttgatcgaggtaggacgattcctagttatgagtttcaatttcttgtacgccaaggactggatctggaactgcggtcggtcggttgtaacgttgctttattatatggcttcaaagaggctaggaaatgagactgaggcgctagaaaagaaggttgtggagtggggtgagcccagtgtgccgtccggcaagcagggtaaaaaggctgacgcgatgatcaagcattttggcgaggatcctatccgttgccccttcaaacaagggagaagcaccaaaaatttatcagcactctaaaccaaacaataagaccttgggagagaatggactcatgttggtcatagcatggtaaggtcagtttaactatttttgtttcaccctaagatctggtcctgtgtttggtgtaattgattaaagagttaaa

SEQ ID NO: 9265 - DNA, 6877 bp, Zea Mays
gcagcagcaagtagtagaggaagaggcgcccgaataccacggtgcctccgcctcgaccgccccccgggctccgacgcccttcctcaccaccgtgccttgctcctcctcctgctgctgcgctccgccgcggagccctaggcggagctgcggaccccgtgaccccccgcggcaccgccccggagctcggcggaggcggcgggcacgtcctcctcatgcctttggcgccccggtcggagccgatcggtggccgcctgaggagacgcagcagctcggcgggcgccggcggagaggcggcgggcacgtcctcctcatgcctttggcgccccggtcggagccgatcggtggccgcctgaggagacgcagcagctcggcgggcgccggcggagaggcggcgggcgcggaggtggaggcggaggcggaggaggaggaaggggagaatggcgctcttccgcaagttcttcctcaagaagaccccggatcggctgctcgagatctccgagaacgtctacgtgtttgactgttgcttctcgactgattccatgggtgaggatgagtatcgggattacttgagtggcattgtcgcgcaattgcaggaattttttccggacacatcacttatggcatccaatttttggtctggggacaaaagaagccggatatcagatattttatctgagtatgacatgacagtaatggactacccacaacagtatgaaggatgtccgttgcttcagctcgagatgatccaccatttcttgaaatcatgtgaaaattggctatcagtggaaggacaacataacatgcttttgatgcattgcgagagagggggttggccagtgcttgcattcatgttggccggactgcttttgtatcgcaaaatatatactggcgagcagaggacactagaaatggtctacaagcaggctcgcagggactttatacagcagttctttcccttgaatccccagccttcacatttgagatatctgcactatataacaagacaaggaggtggttcagaatggcctcctattagcagacccctcatcttggattcaatagttctccatgttgttccgcggtttgacacagatggtggttgtaggccatacttgattgtacatgggcaagactcaagtcctggtaacaagagtgcaaaggtcctttatgagatgccaaaaacaaagaagcaccttcagcgttatggacaggcagaggttcccataaaattaagtgtgtcctgccatgttcatggagatgtggtacttgaattcatccatattggcgataatatagagaataaggaaacaatgttccgggtcatgttcaacactgcattcgttcaatcaaacatccttgaactgaatcgtgatgatattgatgttgcttggaatgtgaataatcagttcccaagggactttcgagctgaggtacacttttcagaccctgtttcatttaagcctgctgctaccatcgaggaggtagctgatgatggagacgagactgatgttgcttcggtagacacaggagaggagttttatgaagcagaggagtattggcatgatgctagaaaagacccagcaactcattcaattgatggtggaatatcattaaatgacattgcagaatttgatggtggggcaacaactgaagaaaggagcagcctagagaagcaccgatctgatgagggtgtgaagattgctgtctcccagaattttggtagtatgaatgaaaaagtggcaattgcacctacctcaagttttgagaatcaagaaggattgcagcagcctcgtgaagttcttccaaatgctaaactaagcaaaaataatgatcaagagaacagtgatgtgcatgatatacaggtggttgctacatctgttgattcagagggacacaagtttggatctaccggtcaggaggacacgaaaggtgtaattgcacaaactttagtcacgacagtcgatctaagtggcagtgatggaattcactgccagactgatgaacaaacaaaaatgtcagaataccctgatttggactacactgcttttggctctcctagaagtttgtcacgtacagatggggatgcccacatgagaactaagaaaaatgaagggttgcagaatggtgatattaagattatcactgagaacacaataagtgtggacaacgagctagtgatctatgaagagaaaactatagttgtcaatggtaatgcaatacaggtagtaaaaaacgttgtcaatgaagagagcatcgcggctaagataggcaaaccaattactgagagtaggacctcattggacaatgacaatggcaagattcaaactgctaaaccttctgatatagccaatggcaaattggatgggtgtagattagaatcttgccttgaaaccgtgcctaccaagaaaaccactgtccatgacagaattgttgtcttaccagccactggagtagcaactgagataaaagccaagcaagaggtgcttgttgacaaacaggattttggtatagttcttcctcaaagtcgaacagtagccagggctaggagtccgaggcttggaagtgatgaccgagggcaaatccctgataaagctgtgttatcagtattgaaggagatggtagtaggcaatgcaaagatggaagatcaaccaaagcttgccaaaccaaaaataatgcgtagatggatctcaccaaagaaggaatctgacgctacctctgtgcgcagaccatctcaccctccatctagatactacagttcaccagctgcactaggtattcgatccatatctacagatggtaaaatcagcgttgtgaatgatgcacctttattatcactaaaacaaccatatggcagcaacttgacacgagaagcaacatctgcacagtctgctccatcgcctccacaaaaatccttgttactaggtgcacaaagtgcatcaagaagccaggtttctccaccgccaccgcctccacctccacctgcaaccaactattcttcaagttctacgcctatgcacatggggttagcttcaacaggtttgtcaaacttacctcaaggtgcttctccacctaggtcaccggtagcacaaaaacatgcatttgcccctcccgctcctcccccgcccccacctccacccccgaggtcaggtgtaggtggaaatactccacctccgcctcctccaaggctaaataacagtgcaatcgctccaccgccacccccatccaccataacacgatcaagtgctcctcctccaccaccaccaccacaatcaatgtcacgttctgctcctccgccacctccgccgccaccaccatcattgtgttctaatgttccattgccacctctttcatgcacactttctgctccacctcctccgccgccaccaccactaccttctatggcacgttcagcagcaccatctcccccgccacctcctcctagccgaggagcacccccaccccttccccttggtcgaggagcacctccacccccacccccaccaccaccacctggccgaggagcacccccacccccacctcctcctggccggggagcatccctgcccccacctcctccccctagccgaggagcacccccgcccccacctcctcctgtttcacgtgcaggacctccaccacctccgcctcctccaggtgctcgctgtggacctccacctcctccaccccctccaggtgcaagtgctccacctccacctcctcctccaggtgcacggccaggagctccaccaccaccgcctcctctaggagcgcggccaggagctccacctcccccacccccacctggaggtggtggaagaggacctctaccacctcgtgcaccaggtgtgccaactccacctagagcaccaggtgtaccgctaccaccaggaagtaatccatcattaggcagaggacgtggggctgtacgccctatgggatcagctattggggctgctgcctcacgcaagtcaactttgaagccattgcactgggtcaaagtgacaagggcccttcaaggtagtctttgggaagaattgcagcgcaacactgactcgcagagcgtttcagagttcgatgtatcagaacttgagagcctttttcctgcagctgttccaaagtctgatgacagctcaaaatctgaacgtagaaaatcacttggatcaaaaccagaaaaagtgcatctaattgagttgaggagggcaaataacacagagatcatgctgacaaaagttaaaatgccactctcggatttggtgagtgcagctctcacgctagatcaatctaccttggatgttgatcaagtggagaatctcataaagttctgtcctacgaaagaagaaatggaacttctcaagaattacactggagacaaacagattcttgggaaatgtgaacagttcttcttagaattgatgaaagtgcctagaatggagtcgaaactgcgagtattctccttcaagatccagtttggttcacaagttgctgatctgagaagaaacttggatatcatagactcttcttgtaatgagatccgaacttctctcaagttgaaagaaataatgaagaaaatccttctccttggaaatactctgaaccagggaactgctagaggggctgcggttggcttccggttggacagtcttctaaaacttacagacacccgagcaacaaataataagatgacactaatgcactacctctgtaaggtacttgctgcaagatctccacagcttttaaacttctatgcggatcttgttagcttagacgccgcatcaaagatacaactaaaaatgttggccgaggaaatgcaagcagttagtaaagggctggaaaaggttcagcttgagtatgatgcttcagaaagggatggtccagtatccaaaatttttcgtgagaaactgaaagagttcaccgacaatgctggatctgatgtgcagtcgttatcttcattgttttctgaagtgggtaaaaaggctgacgcgttgatcaagtattttggcgaggatcctgtccgttgccccttcgaacaagtgatctccaccctcttaacttttgtaacaacatttcgaaaagcacatgaggagaacctgaagcaagctgaacttgagaagaaaaaagctgaaaaagaggcagaagcagagaaggccaaaaacgcacaattaactggcaaaaatcactctaaatcatcaaatccaagccgacaagctaagcaagccatagagaggacaagatctgtaagcagacgaggaagagatgctgggtgattatcccgaatggccggctattgtggctgtgcttctgatctgcttgcgaggcaaatgaacgaccgcatgatgcatttctggcaaggggagtttcgtggacggacgccgtggcatccgtcgggtgcagcgcgatcgcatcaaagaaactttacatgataccagctgcggactctcactggagaatgccggcttctttttttatccatatcgtccatcagggtccagtgctaacttctgactgctgtaaagaggtgctaacactgacgctaactccattctttcttttgttttttcatgttaattgtccattctttctaacaacggtggtcaagtaatagtacagactggtgttttggtgggaaattgtaaaaaataggcattagggtagaaaatgtatggatataatgtaggagtatcagcctatcaggagtaaatatgagatgtaaagctcagcccgtagtttagatgtaaagttttgtactgagtatattctcactttctaatttctatgatcacgatgcagcgaatgcgtcgtcacacccagcgtagccaattcatcagggatctggaggaggccagaaaggacgaagcggcggcggtgccgtgtcctacggtcctacctgtcagttgccgcggtgtcctcctgtcctgatccacgtcgccgccactgacagactcctctctcaccgtggcacgaattgatgagccacgaattgaggattgatcaaggtcttggcatcaacaaagctgccagcggtttttcagcttcattttagtttgtttatatagatctgtgccttgatcgaggtaggacgattcctagttaggctttgttcgtttacaccaatcccgctctggattagcatggattggaattaaatccatacctcaatccatgccccaaaataatccatgactacttaattttttttgttcggttaaacccatcatggaatataaaccaaaggtttaggaattttttaaactatggaagacatggattctatccatagcccattaggtatggaacaaatccatgagatattgcacaagtttacattagaatccatggatcaaaagaataactagctttgaaagtcacatggatttgttgatggatttaatcccaccatgggattgggtgtgagatatggattcacccaatccatatccggattaaatccatggtgggattatatcccatgtaaccgaacaaggccttatgagtttcaatttcttgtacgccaaggactggatctggaactgcggtcggtcggttgtaacgttgctttattatatggcttcaaagaggctaggaaatgagactgaggcgctagaaaagaaggttgtggagtggggtgagcccagtgtgccgtccggcaagcagggtaaaaaggctgacgcgatgatcaagcattttggcgaggatcctatccgttgccccttcaaacaagggagaagcaccaaaaatttatcagcactctaaaccaaacaataagaccttgggagagaatggactcatgttggtcatagcatggtaaggtcagtttaactatttttgtttcaccctaagatctggtcctgtgtttggtgtaattgattaaagagttaaa

SEQ ID NO: 9266 - DNA, 2140 bp, Zea Mays
atggcgctcttagttgttagatcccataaagggaaagtgatgggatacacttctccatttttccttttggcttttactacccagttccaactaacaaggaaaatcgagggtcaactgatctttatattatcaggtggatgcaatcaaaaccaagatgcaagtgcatgcgtcactgggttcgagatcgactacagccactgggtggacgagcagaaaaggcacatggcagagctgacgtcgacgctccaggggcagcagacgtcggagctggagctccgcctgctggtggagacgtggctcagcaactacgagcgcctgtttaggatcaaggcgacggcggccaacgcggacgtgttctacgtcatgtcgggcttgtggaagacccccgccaagaggttcttcctctggatcggtgggttccggccgtcggatgtcctcaaggatgttgctttgagccgtggtggatctcccggtgtgatgacatggggctgggtctgggagctcttctcaaatctgggggttctcggatttggttcagcttctcactttgtttttaatgagaagaagcagacaacaaattatagtgaaggctcctctcgtcccccgttgcttggtggatcacccccacggaaccagcctagccaaagacagggtgactattcttacctgaatagagtatttcgtgatctctttatccaggaaggtgaaagaaccagtggagctgctgggccctcaatgaataagatggagaaggccccaggagaagcgttcggtagaaggaaccctagcggtcctatgaaccagaccgacagttatgcgcaacagccacacgagaccgtatccatgtcgctaaagaaaattgtaagctaaacttcccttccctccgcctcctgtatggtctatgaacatctagcgtcgtcgtgcagtcctcacgtatctcatgagctttaaccatgcattatccatttctccagatgcatagcattgattgatctgggaaaggactatggagagatcactccaaatatctataaatagatccgtgccttttggacctccacttgctgatgacatgatcaaggacataaatagatcactaaaatattgtcaaagacccaaccaaagagagggctgcaaggtggtgtctatattgttaagctgaggaggctgaaatgatttcaatcgttgattatgcatttcagcgaggaacacaacgtcagaaaaggcaattgttagttgaactgtactcccctgaacttcagctattcaaggatctgactgtgcaaagttcctcctgatacaatttccaagcttgggttgcagatatcatctgtcctgcttcatatgactattgtgattgataaaatcttggagaaaggtaccgttgagtacttaatagtgcacacggccatattggactactttacaattgcagataagacctcagcctcggatgctatttgtcaacttatcccccttcttactcaaggggcattaatcatagatggagatgaacctacaaacgctccagaactaccaaagaaagcaaaagctaagaagaaaaggtcgaaagagccacttattgttcggatcatgcagacaagggaaggattaaaactaggaattagttgcctcaagtatggcagtgcaaagattagctttggaagatacacgattggccaagcttgagcatggatgaaaattcctagatgatcgcaaagattgttgtggtttgtaatgatgcaatcattggccactctgagcatcaatatgttgctacagggatgcccacaaaagctgctctgaaggacaatgcttccaccagcgcggccgtagaggcggaagcaaggggttgggcttctgtcggtgctggacagcgtgatgccaaacgtgccagccactcttgctgtcgtccgcctccctcttccacgataggttcgcccgcaccgagcctagacgcagatagctctcgaccgtccgctacagtgctgtcgaagagacggtaatggaggaggcctcgcccgagacggtggaggagccactgctggtgagcgcaatcagagggaaaaaggttgagagggcaccaatctggctcatgaggcaagccgagagtgcctcaagattctgaaggtttccgtca

SEQ ID NO: 9267 - DNA, 4971 bp, Zea Mays
taatctctctcaaatacccccacttttttcttcttctttattttagcttcaagtcttcaacattcctctgcagcagccagcagccaccagtgaggccgtgagggtgagtcgagtcgagtccaccaccaccaccaccaccaccaaatagccaaacacgcagtggtgctgctctctagtcctcccttcttccactccgctaaccccccgtcgcaagcacgcacgcgcgcgctcatcggattcggctacgcgccggcgagatccgggccgccgcagcacggtccggcagacgccgccgaaggcgcaagccgcgatcttgtcgccgcgggagctgcattggcgccccacgcggccgttccggcgtttcttgggaggttgcggcggcgggaggagttcgtgtccgggatccgccagatccgtgctcgccggcggcggcagcagtggtggtggccgccatggaggccgatgcgccgctcgacctcgcgctcttccagctatcccctcggcgtcagcggtgcgagctagtggtgtgcggcaatgggcggacggagaagatcgcgtcagggtcggtgaagccgttcgtggcgcacctgcgggctgcggaggaacaggcgtcggctcagccaccgccgctggccatccggctgcagctggagcggcccgccccgtggtttagcaagggcacccttgagaggttcgtgcgcttcgtgagcacaccggaggtgctggagttggcgaacacctatgatctggagatgtcgcagctggaaggggccaggaagatttatgcgcagggaggtactggagatgctacttcaggtggagctgctgaaaatgttacagcctcagcggcagcggcggcagatattacaaagaaagaacttcttagggcaattgatgtgcgtctaagttcccttaaacaagatctggccgcagcttgttctcgagcatcctctgctgggttcaatcctatcagtgtatctgagcttattctttttgctaaccattttggtgccagtcggctgagcgaagcatgcacaaagttcatgtcactttgccagcggcgtcctgacatcagtcctcaaactgcacagccagcagtttcatcacactggaaggtctttgacgatgggaatgtccgtggttcttcgagttcagacatgtctatagatgaaccactagttgatctcagtgaatccaagaacaaatctacagtcagtggaagtggctctcaggtccacagactaagcaacatccaaggtttagaatctgctgcagcacagcaacccaagccaaccatccaacaagcagtagataaacaagaagcagaaacagatgcgtctcctgcaccttctaaaggagagctttcaaggcggctgagtgtgaaggacaggataaacatgtttgagagccagaaaaaggagcagactccaagttctggtaacagcaactctgccggtactggtagagtggttccagggaaaggtgagcaccgcagggttccttctggcgcctccatggagaagttagttagaaggtggagcagtgttagcgacatgagtattgacctcagcaacaatgagagtagtagcttaaatgacaaaaaggataatggaactcctgccgggactccaacatctactgatttggaggccgactctaaagtaagagctaatgaggactctaatggacagaaggattcaatcacgtcacactcttggccttgtcaaaaggataatgtaccaatggatctggccaccacagatttgtgcccaccctcaattttaagtaatacacttgctcctcataaagagagtatatatggtgatggtgcagaaaacgacatggttatgaactctagcattgaaagtgaagcatcctttgggaaagaaccgggggttattcaaggacacacaaggatgtcaaatcatgctacttcaaatgtttccactcaagaccgtctaaaatcttctgcaaagtcagttgaagaagccttgctgaaaaataaagttattgtaactagtgcatcgtcagaggagcatgtctgcatgatagacaaggaaatcacagctgttgctcatgaagtaccagttgcaagtgaacagattccccagaatgatattagaggtctccatacaaaagatattcacactgaagcagaagtgactggaaggaaggatcagccttcacgatcatttggaagggtatctggtggtgttaatcctaaaccaaaagcctcatccaattcccgagctaatgctaaaggctcatctgttagggatgcgattgcctctacagaaactgagttccgtgacgttagtttgcagcggaatcgtctaccacggaagtcagaagatgtagggaaaaaggttacagctggttctgattcagattgctctggtcgtcagggaaaaaatttgagcaggcaatcatccattaccgatcaggaactaaacttgcaggctagagtgacaagaccaggaaaagggaaccaagatcggcatggtgaattgcaaatgaaggccaatgagttggagaaattatttgctgaacacaagttaacatcctcccgacgaggtaaacctacagatgtgcaggttgaaagcacacctatggtgagtgaggtaaagccgacaatggttcttcatgagacaattcatacaaaacaagttgtaaaggagagtataactgtcaatgattttgatgccggtgagcttctgaagatggtgaataatcaagaatttaacattagcacaccacaaaaacttggcattctaagtttagaagagtcgagagggaagttttatgagcattatatgcagaagagggatgcaaaactgaaggaaggctggaagctgcagagagaggagaaggaagcaatgttaaaggctatgcatgacagcctagaacggagcaaggctgagttgcttacaaaattctctcggtctgcagatgtccctgactcaacttatgtttcccattgttctcagaagattcctccttcgcgatcagcaagaaaaaataaagatcagggggttggctcattcttggtggaagaggaaatgaatagtgactacctatctggtgatggttcttccaggagtgctgattccagaaagcatttttcaaataaagttgcttctacccaaaatgcatctgctggtcctatccataaacgttcatcaagaaccgcaagctctggttatgctaatcgcaggaatccaccagaaaatcctctcgcacagtctgtccccagtttttctgacttgagaaaagaaaatacaaagccttcacctggagtcagtagagtgagtgcaagagttcagcaaaagtcttttgcccgtagcaagagtattattgaagagtcaaagagcatattgaaagaagatcaatcgaggaggtcacaatctatgaggaagaaccaaattcctgatgagcttaaggacatttcgtcagggaatgatgatatttacaattgggctccctcaagaatttccaagaatcaatcagagggaccttttgcttacagtacccgtagatcgggtccaccaaagccttttcttaggaaaggcaatgggactcaccctgttattggtatagctggatttcaggctgcagctgccatgatggcgaatgccctccagcatggtgacagtggtgattttgaagatcagcaagaggattcccctgatgatgccaaagaagaggaagaatatgaaagcatggaagaaaatcttagagaaagtgactttcctgctgattctgacagtgagaacccaagagtgagtcatgaatttggaaattcagatgacccagggtcagaaaacggtgatgctgattttccaagcaaaacacctgccattggcagtactaagttcactgcttttacaggaaatgttcacaatccagctggtgatgttccagcaccctggagttctcgtcttccacagctgttcccttacacgaatgataattcagatggtgacgcctttgctgattcaccatcgggaagtccatcaccatggaattctcattcactggatgaaataacagatgctgatgtatctcggatgcggaaaaagtggggcagtgcacagatgccttttgctggtgtcaatgcacctcaacagccacgcaaagatgtttccaaaggattgaagaaattgtggaaatttggtaggaagactagaggcggtgacggtttagtaaatgattgggtatctgcctccactgcctcagaatgtgatgatgacatggaagatggacgggatctggtagtaggatcttctgatgatttcagaaagtctcgaatgggttatcttgcttcatatgacggttttgttgagaacgaggttttttctgaacaagctccattccaaacccacctgcaaatttcagattgagggaggatcagctgactggaagttctcttaaagcgccgcgttctttcttctccctgtcaacattccgaagcaagggaggtgatgccaggctcaggtgatcctcagaagacaccagaggtgtggtgtgtataaaatatcttgtcaagttaggtatggttatcaaattttcagggtggtacgtggatgctgctagcttgtgattatatatatattgtgtatctatggcggttcatataagctaccagttgagctctctccattgttgccgtttgattattcttttttcccctgtgtagagttggacttttgcaatctgttctttcaactggcccaggactcctgtattttttttcattgtttttgtgatatatctgtatctccctctcaacttgtttcttcattcacatatatcacaaattcaagatatatggtaattttgccaactatagcaaaccacctgagatgctagctctgcttgtgataaaattgaaacgagtttgtgacaaaattgaaacgagagtcgagccgagttgaccaagagctgagcgagctcacaagatacaagtatttt

SEQ ID NO: 9268 - DNA, 1492 bp, Zea Mays
ccgcatccgacgacaacgccatcacgccgtccagctcatcgtccacctgaagcccaacctgccacttccatccatcgccgctcactcccacgatcagcgtcgtcgccagtcggcaccatgggttccgacttcaaatcgatccccttgatcgaaaggccatggtattgatgagtcactgatgagggaagtcaggaatgtaacccgtgaattctttcagcttccttatgaggaaaaattaaaaattaagatgacacctcaaagtggatatagagggtatcaaaggataggggaaaatattaccaagggtaagcctgatatgcatgaagcaatcgattgttatactcctattagacctggcaaatatggagatctcgctaaaccaatggaaggatctaacttatgacatttcaagaaagataatgcgaggtatagccttggctttgggaggggcaattgatgcttttgaaggggatacagctggagatcctttctgggtgttaaggttgattggttatcccgtagatattccagaagagcagcgcactgatactggctgtggagctcatacagattatggacttctaacactggttaaccaggatgatgacatatgtgcccttgaggtgcaaaatcgttctggtgagtggatatatgcaacgccgattcccggaacctttgtttgtaacatcggtgacatgctgaaggtttggacaaatggaatatatcagcccacccttcacagagttgtcaacaattcccagcattaccgtgtatctgttgcattcttctacgagtccaacttcgatgctgcagtagagcctgttgagttctgccgggagaaaaccggcggtgctgctaagtacgaaaaggttgtgtacggggagcatttggttcagaaagtattgacgaacttcgtcatgtaaatttgctaagtacgacaaataaatctgcattgcagcatcagaactccagacctatttggtgtgtagtgctgtaccagaaaggtagtaacggactaaagcatgcgcccgtctctgaaatttgaccttaacaagagtcgcagacttgcagtgcaggtgatatcacaaggaaatcggggggagatttgttctctctgctgcacggagttgtcgacaaccctgtcgctgaaatctgaatttagcatcagacaactggagatgctacgagtccgtctctgaaatctgaatttagcatcaggcgcgaaattgcctccatttcttcgccaaaccatctaatgatggaagctttgtagctggcaaggccatctcgtgtgacgccgcagccagacgatgccagcgtagcaagttacctaccattagcactggttaactagctagccatactagtgaattactctattccgatcaaatgttggagaattcttttctcatagatactttgatgaaaagaattggtaccaggaaggctatgttcggttctaccacaattcatatgtatcgagcgagtttca

SEQ ID NO: 9269 - DNA, 1551 bp, Zea Mays
ccgcatccgacgacaacgccatcacgccgtccagctcatcgtccacctgaagcccaacctgccacttccatccatcgccgctcactcccacgatcagcgtcgtcgccagtcggcaccatgggttccgacttcaaatcgatccccttgatcgaaaggccatggtattgatgagtcactgatgagggaagtcaggaatgtaacccgtgaattctttcagcttccttatgaggaaaaattaaaaattaagatgacacctcaaagtggatatagagggtatcaaaggataggggaaaatattaccaagggtaagcctgatatgcatgaagcaatcgattgttatactcctattagacctggcaaatatggagatctcgctaaaccaatggaaggatctaacttatggccaaaatacccatcaaattttgaagtactgctggaaaattatatcaaattatgtagagacatttcaagaaagataatgcgaggtatagccttggctttgggaggggcaattgatgcttttgaaggggatacagctggagatcctttctgggtgttaaggttgattggttatcccgtagatattccagaagagcagcgcactgatactggctgtggagctcatacagattatggacttctaacactggttaaccaggatgatgacatatgtgcccttgaggtgcaaaatcgttctggtgagtggatatatgcaacgccgattcccggaacctttgtttgtaacatcggtgacatgctgaaggtttggacaaatggaatatatcagcccacccttcacagagttgtcaacaattcccagcattaccgtgtatctgttgcattcttctacgagtccaacttcgatgctgcagtagagcctgttgagttctgccgggagaaaaccggcggtgctgctaagtacgaaaaggttgtgtacggggagcatttggttcagaaagtattgacgaacttcgtcatgtaaatttgctaagtacgacaaataaatctgcattgcagcatcagaactccagacctatttggtgtgtagtgctgtaccagaaaggtagtaacggactaaagcatgcgcccgtctctgaaatttgaccttaacaagagtcgcagacttgcagtgcaggtgatatcacaaggaaatcggggggagatttgttctctctgctgcacggagttgtcgacaaccctgtcgctgaaatctgaatttagcatcagacaactggagatgctacgagtccgtctctgaaatctgaatttagcatcaggcgcgaaattgcctccatttcttcgccaaaccatctaatgatggaagctttgtagctggcaaggccatctcgtgtgacgccgcagccagacgatgccagcgtagcaagttacctaccattagcactggttaactagctagccatactagtgaattactctattccgatcaaatgttggagaattcttttctcatagatactttgatgaaaagaattggtaccaggaaggctatgttcggttctaccacaattcatatgtatcgagcgagtttca

SEQ ID NO: 9270 - DNA, 1804 bp, Zea Mays
ccaacctgaagatggccaccacgacgtaccagcattttcggagcccatcttcaatgccgcggcggaagcccgcacatcgagattcagcaagcatgagaaggggagaggaaaggcaagacctatctttcattgaagggcgtaacattcaggatcgcaaaaggcggcgcgagttcgagtggaattatggggttcctgattctttgggagagaaaagagagaaggttgtttaccaggatgcagggaggaagggaagataccaccggagggatgaggatagggaggatccgggccgtggaggtcgccatcttcggagcaggtcttggtgggatgggagaggctctcattgtcggggggctgttgatgactgctactccaacaacaacaagcatctttttaggggcagttcctcctatcgcagccgcgatctttcccaaaattcttggggacatggctcttggctttccaaccaggtggctgcggtaaaaccgcagcacatgggcacgtactcgttaaagtcttcaagcatcggcaagaacgtctcttttgcctcccccatcgcaactgttctaggtgcggcaaacacaggagacctgagggggccctctgtttttatttctaacacccctagtactgtctcttgtgcttttcatgacccaatgttggatgaagcacttctctcttctggtgttgtaggggggcacaactcttcggtgatgtgctgggagctgcagaattctgtggctcgggaggggagcgcggcgtcccccccaaccatgatggaagtggatggctctgacaagaggaccaacactgctgttcctgaaccatctttgcttccttctgagcttgtgcagcattttgatcaaccactgtccaaaggaaagattaaggccatcaagaccttgctggaaaatgggaagcagttgaagaagaaggtgcaaaatcgttctggtgagtggatatatgcaacgccgattcccggaacctttgtttgtaacatcggtgacatgctgaaggtttggacaaatggaatatatcagcccacccttcacagagttgtcaacaattcccagcattaccgtgtatctgttgcattcttctacgagtccaacttcgatgctgcagtagagcctgttgagttctgccgggagaaaaccggcggtgctgctaagtacgaaaaggttgtgtacggggagcatttggttcagaaagtattgacgaacttcgtcatgtaaatttgctaagtacgacaaataaatctgcattgcagcatcagaactccagacctatttggtgtgtagtgctgtaccagaaaggtagtaacggactaaagcatgcgcccgtctctgaaatttgaccttaacaagagtcgcagacttgcagtgcaggtgatatcacaaggaaatcggggggagatttgttctctctgctgcacggagttgtcgacaaccctgtcgctgaaatctgaatttagcatcagacaactggagatgctacgagtccgtctctgaaatctgaatttagcatcaggcgcgaaattgcctccatttcttcgccaaaccatctaatgatggaagctttgtagctggcaaggccatctcgtgtgacgccgcagccagacgatgccagcgtagcaagttacctaccattagcactggttaactagctagccatactagtgaattactctattccgatcaaatgttggagaattcttttctcatagatactttgatgaaaagaattggtaccaggaaggctatgttcggttctaccacaattcatatgtatcgagcgagtttca

SEQ ID NO: 9271 - DNA, 1957 bp, Zea Mays
ccgcatccgacgacaacgccatcacgccgtccagctcatcgtccacctgaagcccaacctgccacttccatccatcgccgctcactcccacgatcagcgtcgtcgcttatccgcaaatatctctcttcctctttgcagtcggcaccatgggttccgacttcaaatcgatccccttgatcgaatttggtatccccgtttgggctgcacgttccatgtgggttcaggcttgagagccagctgcccccgtttcttgttcgcctcctgccgccgccgccgcagtgccagtaacttctgcaagcgaagggacgcaactcctcaaggatttgattcatatatttgactctggcttcagtagatacagcttctgttattcgccctctctctgtgcttcgatctctcggttttataacgagcgtacttgtttgttcccaccactgccagatatcggcccgcttgtcgaaaagattgatgatccaagcatggccaacgataaggatttactgcaggttgtccggttactggatgatgcttgcaaggaggccggattcttctatgtgaaaggccatggtattgatgagtcactgatgagggaagtcaggaatgtaacccgtgaattctttcagcttccttatgaggaaaaattaaaaattaagatgacacctcaaagtggatatagagggtatcaaaggataggggaaaatattaccaagggtaagcctgatatgcatgaagcaatcgattgttatactcctattagacctggcaaatatggagatctcgctaaaccaatggaaggatctaacttatggccaaaatacccatcaaattttgaagtactgctggaaaattatatcaaattatgtagagacatttcaagaaagataatgcgaggtatagccttggctttgggaggggcaattgatgcttttgaaggggatacagctggagatcctttctgggtgttaaggttgattggttatcccgtagatattccagaagagcagcgcactgatactggctgtggagctcatacagattatggacttctaacactggttaaccaggatgatgacatatgtgcccttgaggtgcaaaatcgttctggtgagtggatatatgcaacgccgattcccggaacctttgtttgtaacatcggtgacatgctgaaggtttggacaaatggaatatatcagcccacccttcacagagttgtcaacaattcccagcattaccgtgtatctgttgcattcttctacgagtccaacttcgatgctgcagtagagcctgttgagttctgccgggagaaaaccggcggtgctgctaagtacgaaaaggttgtgtacggggagcatttggttcagaaagtattgacgaacttcgtcatgtaaatttgctaagtacgacaaataaatctgcattgcagcatcagaactccagacctatttggtgtgtagtgctgtaccagaaaggtagtaacggactaaagcatgcgcccgtctctgaaatttgaccttaacaagagtcgcagacttgcagtgcaggtgatatcacaaggaaatcggggggagatttgttctctctgctgcacggagttgtcgacaaccctgtcgctgaaatctgaatttagcatcagacaactggagatgctacgagtccgtctctgaaatctgaatttagcatcaggcgcgaaattgcctccatttcttcgccaaaccatctaatgatggaagctttgtagctggcaaggccatctcgtgtgacgccgcagccagacgatgccagcgtagcaagttacctaccattagcactggttaactagctagccatactagtgaattactctattccgatcaaatgttggagaattcttttctcatagatactttgatgaaaagaattggtaccaggaaggctatgttcggttctaccacaattcatatgtatcgagcgagtttca

SEQ ID NO: 9272 - DNA, 2044 bp, Zea Mays
ccgcatccgacgacaacgccatcacgccgtccagctcatcgtccacctgaagcccaacctgccacttccatccatcgccgctcactcccacgatcagcgtcgtcgccagtcggcaccatgggttccgacttcaaatcgatccccttgatcgattcaggtatcctgatcagattctgctctgcgctgccctgagacatccaaatttcttttcctcgcatttccacctcaatcgcgctgtaacaccttcctcccatccccaacctcaagaatttggtatccccgtttgggctgcacgttccatgtgggttcaggcttgagagccagctgcccccgtttcttgttcgcctcctgccgccgccgccgcagtgccagtaacttctgcaagcgaagggacgcaactcctcaaggatttgattcatatatttgactctggcttcagtagatacagcttctgttattcgccctctctctgtgcttcgatctctcggttttataacgagcgtacttgtttgttcccaccactgccagatatcggcccgcttgtcgaaaagattgatgatccaagcatggccaacgataaggatttactgcaggttgtccggttactggatgatgcttgcaaggaggccggattcttctatgtgaaaggccatggtattgatgagtcactgatgagggaagtcaggaatgtaacccgtgaattctttcagcttccttatgaggaaaaattaaaaattaagatgacacctcaaagtggatatagagggtatcaaaggataggggaaaatattaccaagggtaagcctgatatgcatgaagcaatcgattgttatactcctattagacctggcaaatatggagatctcgctaaaccaatggaaggatctaacttatggccaaaatacccatcaaattttgaagtactgctggaaaattatatcaaattatgtagagacatttcaagaaagataatgcgaggtatagccttggctttgggaggggcaattgatgcttttgaaggggatacagctggagatcctttctgggtgttaaggttgattggttatcccgtagatattccagaagagcagcgcactgatactggctgtggagctcatacagattatggacttctaacactggttaaccaggatgatgacatatgtgcccttgaggtgcaaaatcgttctggtgagtggatatatgcaacgccgattcccggaacctttgtttgtaacatcggtgacatgctgaaggtttggacaaatggaatatatcagcccacccttcacagagttgtcaacaattcccagcattaccgtgtatctgttgcattcttctacgagtccaacttcgatgctgcagtagagcctgttgagttctgccgggagaaaaccggcggtgctgctaagtacgaaaaggttgtgtacggggagcatttggttcagaaagtattgacgaacttcgtcatgtaaatttgctaagtacgacaaataaatctgcattgcagcatcagaactccagacctatttggtgtgtagtgctgtaccagaaaggtagtaacggactaaagcatgcgcccgtctctgaaatttgaccttaacaagagtcgcagacttgcagtgcaggtgatatcacaaggaaatcggggggagatttgttctctctgctgcacggagttgtcgacaaccctgtcgctgaaatctgaatttagcatcagacaactggagatgctacgagtccgtctctgaaatctgaatttagcatcaggcgcgaaattgcctccatttcttcgccaaaccatctaatgatggaagctttgtagctggcaaggccatctcgtgtgacgccgcagccagacgatgccagcgtagcaagttacctaccattagcactggttaactagctagccatactagtgaattactctattccgatcaaatgttggagaattcttttctcatagatactttgatgaaaagaattggtaccaggaaggctatgttcggttctaccacaattcatatgtatcgagcgagtttca

SEQ ID NO: 9273 - DNA, 1651 bp, Zea Mays
acggcgacgtcgcgacgagccccggcggcagctttccagctgctccccaaccccaacgcaacgcagccgcctgcatgctctccagctgtgtgatcactggcgagcttaagagagactagtgcgcgctgacagatgcgctcaccatgggcaaggccggcagcgttttccctagccctgcgccggcaaccaggtccagccgctgccggtgtgggtgtggcgcggtcgttgaaaaggtggtggtcaacggcaagtgcgtatccgtgctgttcctggcagtcagcgggttcctctcggccttcttcctgctgcttcgtctccggacatcaggagacgtccccgatgatcctggcatactcgccgaaatcgaggcaggcttcattttgtcagtgccacactcacaggtagcttcacagactggaatgctcgaaaaagagatatatacccaaataggtgtccccaacagcaaggtttcagtttccatgcaaccatacgtatatgcagacaccacttatgtgaagtttggtgttcttccagacccaagaaatacctccatgagcacagaatccatcgacgcactgagagcgtccttgataaaacttacgctacagcagctgaatctgtctctgacaccgtctgtttttggagacacgttttgcttggagattctagggttcccaggagggatcacggtactgcttccgcatagtgctccgcatgctgacttgagagaacctctcttcaatgtcacgtttaactcgaccattcatgaaataaggggggttcttgaggagatgaagattgagcttggatccacactagagcaaacaccagatgaggaattatatgtcgagttaacgaatatgaatggctcaacggttgcaacaccagttacagttcaagtttccatctcccccgttgaccacagcatctatctaggaaactacaggctcgaacagctagccagaatcataacaaactggagtgcaaggaaccttggcctaaatacctcaattttcggcgagattataggtttgacgttgtctccactcctacaagccttccttccatccagtgctcctagcttctctccaatatcaccgccatccatgccctggcctccaataccggaggggccaaaaatctacccttccagggaaatctcatgccctcctttggttaaaattcaaaatgcaaccactcaacatcgcagactaatgcgtgtgccatccaagacgatttctccacaattgtcgacacggtttcataggaagcacacatctgagggcaagaaaaatagtattgcagtgccagcaacaacattcgctgcaccagcacccaagcagaaatgaatgcttgatctctaggtgcctcaaaggttccataagtttccaaacccctgcctagttacaccaaggtgggtatgaagtagctgtgtgtgtgcctaggctaaagttgtaagaaatctccgtcaagtgtaagtagaaaatgggaagttagtagccagaaagctggataactcccaaacttcatgtataatagtatggcaatagctaaagaaatggctggccatctgtcaattatgataattttccaaactcgtgcatctccatgaagaatgtcattctaacaaaatttccaagagccacctgca

SEQ ID NO: 9274 - DNA, 1658 bp, Zea Mays
aggagaaaggttgccatctcgtgtgtgtgtgtctgttggatggatctctgtgagccatgccctctttgtcttcttgcttttgctttcttggtcccttcccttctcttttctagcagagctctcgtggttcttggccttccgtgtgtctgccagcgctgccagctttcacataaacaagttggggaagcagttgaggttttctaattcttcttggaaggattgagatctccagttctgataatgggttcttttgggatgaactggaatcagaaggaccccatggtgtgggattgggaacatctagtaccgtctgtctcaaatgcagttacaaggcacggatctgctaattcatctggtggtactcttacttctaactcagagctagggcatggttcatccaagagctctatttcagcgtccattgattcaccctctggagtagggaacagcttagagttcaacttcgccgctgttgagaggcatgttaagaacacgggcacgaacggcagagtcgatgactcggggaattctccatcgtcaatgatagctttcaaccaaggagagccattaatcagcctgaaacttgggaagagggcttacttcgaaaacgcctgcggaggacaggatgccaaggtttctgcagcttcagacgttacttctgcagccagcgtggtcaagaagactaaggtgtctcagcagaatgcaaagaactggtactgtcaggttgaagggtgcaaagttgacctgtcttctgctaaagattacaatcgcaagcacaaggtctgtgtagtccattctaaagctaccaaggtggttgttgctggtctagagcgtcggttttgtcaacagtgtagccgatacaaggcagcggacaaatcttttctttagtcaaccactttatggccaagtgaggagcaatgcagggtcttcatgggataacttgggaggcttaaaattcatggagacgaaacatccgccagtgcatccaacaaaaacagcatcccctgatgaactgcatttctcagccctccagataactagtgctgcggctcacaccggacatcatcatgatctcgatgggttcatggcgttcaagggaaccagcacaaaggtccttaaccaaggcgtggaggcttgggcggccgcttccagctcgaacaacggaggcccagaaggtgggcgtgctctctctcttctgtcagacggctcgtggggctcgagttcagccgtcatccagcagcccacatctcacgcggacgccggtgcattgctgccgcccctcgccaccgttgccgtctccaacgccgccgccgccgccgggcatcctctggacccgtccccgggaaggttctggccgcaagacgatcatcccccgctcgtcgacggacccgccacgcagattccggagctggcgcacctccggatatggtgaaaggaaacgcatgtgatgcggtgactggtgacatgccagttcgagggcctggctgggaacacatctggttggttagcctgccgctctggcttgaatttgccggcgacgacagtctttgtttgtatcttttgatcagaacggacacagacatgtttgcacaatataatgtgacgagtccctctttggggttgaggagtgaggagatggagaacgataggaggcaaaa

SEQ ID NO: 9275 - DNA, 616 bp, Zea Mays
aacaggagtgcatgctgtcccaaagcctgaactggattgtgtgtggggggttttggattgaattcagcctgctgcgatctctttgctgttgtaacttttgggatttatcgagccgtttgcactgggagagtcgcatataggcatatgagcagtatgagggaactggatttctgtcctcatgtacactaggcaaatggctaccttgttcttcaaatagatgttgaagaagatattacagcttcagagaatcagagctctcttttttggtgcttgtaatgttacaaagaagccccgacgatgatgtgaatcagagtagcacttcgtgcattctaatctgtgtactgtggttcgcgaaactaagattgaatgtgtcgagtgtttctgtgtgggcggttgtttgcctcttctgtactctgttgttcttcttctctgtttaatgaaataattcacagctctcctgcatgttatgttcgatcgagagagagagaaagagaaaaaaaatgtttgcacatagctgtgttgtgctatcatcttccatatttctgcaattctgctcctaactgggaatggttttccctgcggtgaatatgaattggccatttgggtgtgcgtggaa

SEQ ID NO: 9276 - DNA, 1190 bp, Zea Mays
cagcttaaccacatacatatctatattcaaactacattgtataaatattacaatctacaatgtaaagcgatataaaatggtgttttagtgatcatatatgtatattgtacagttcactcatattgatcgtcaaaaacactttttgcgttgttttgtactataaattatattgtttgtatagtgtattttaaatattagtatcattacgagtaatctggttcttaccgtctctaatccggagtccctacccccgacctcgcgatcgcagttcgggttgccatatatacatacaacaacacccggtcccaaagaaaggccacacacagccgcactcgcacagccgccaccaccacctggtccacgtcgccggcggcaatgtgggcccacctggccgtggcgctgttcgtggcgttagccgtggctcccccggcccgcggctccgacgtgccttcgttcccgctgtcgcaggcgcagtccccgtccaactcctcgtccccgtccaacgccgcctcgcggccgtgccacctggacctctcggccgagctcttcggcggggtagccgcggcgtgcggcgccggcgggggcccgggctcgctggaccgcggccgctgctgcccggtcctggcggcctggctcttcgcggcgcacgcgcgcaccgcgctgtccgtgcccccggcgcctccaccctcggcgctagcgggggacgagggaatggggcccgacggcggcgacgacgggcccatggtaccgtacgacaaccagaggtgtgtcgacgcgctgggcgccgcgctggagcggcgcggggtggcgctgccccggcccaacgcgacgtgcgacacggtgctctgcttctgcggcatccggctccaccagatcggctcgctccgctgccccgctgcgttcgccgtcaaagctggcgccgcggccaggaacgccacgcccaccgccgcggtgaaggccctggagaagagctgccgcaacgcctcctacgccggctgctcgcgatgcgtgcagtccctgcaaaagatggctggctgctggctccaaggggtgtgcggatgacggcagtaaattgaaaacgtagagcctctttgccaagacttccacgggctttgacttcactactagtagcagaaacacagatgaagcttttaaatttttattttgttaaaataatttgaattgttgcc

SEQ ID NO: 9277 - DNA, 8688 bp, Zea Mays
tcggaagtgacgaaaggcgaaaagcccaagaaggcctccgcccgcctgatcgcctctctgctctagttgctactcctgctgctacagtgctgcccctctcgctctgacttgtgaaaagtcctgaggatacaaggtagtaagcggcatctcgtctcgtctccccagtccccaccccgagatcgctcgtcgccgccgccgtctctttactgaacagggattccctcgcggaccgcggcccgaccgcctccccgaagctagggttcgagggaggttatgccggcgctgtcgcaggcacggatccgggcggcgtgacgcggatccgccggacgctggcagggtcggccatggcgtcctccccagtcaagttcttctcggtgttcctggccgtctccgtcgtcggatggatcgtcttcacgtttgcttcaagattgttagcttggttcttgagccgtgtattctctgcttctgtcggatttcgagttgctggtttcaactgtttgagggatgtaacaataaagttctgtaagggttcagttgaatctgtttcgattggtgaaataaaactaagtttccgcaagtctctagtcaaactaagttttggtgttatctcaaaagacccgaagttgcaattgcttataaatgatctcgaaattgtaactagatcatcttctgaaaataaaaagatacgaaagtcagcaaagcctcgctctacaggaaaagggaaatggctggttacatcaagcatggcaagacttttatcagtttccgtgacagatctgataatcaaggtaccgaaaggcgctcttgacatcaaagaactaacggtggatacatttaaaattgctgggcctaatcatactcttggtgtcaagttgcatcttttacctttgaatatactccttggagatttgggattgactactgatccaatgggcagttgtagtctgtttgatgctttccagtctgatcaagcttctgtatctaactcagagaaaagcttggccccatttgtttgtgaagatttgttggttacttgtaaccttggccatgaaaaggagaaaggtattaaaatcattaacctggaattgaaatgtgggtatgctattgccaacattgatgaaaggatgtttcacaagaagcgcacgattccagaatataacactgtctctttgaacaccggagattctatcacagatacttcagcgctcaaacaaacatcgaaaagcaaatctattctaccgctgttaaagaaacacatgctcacatttccagataaggttagcttcagtgtgccgaagcttgatgtgaagttcagacacctgcatgaaggacttagtgttgacaacaacattacagggatccagtttacttgtgcaaaatccctaccacaagatgattttgaagaagcgacaccacacttcgatgttcaaattgatcttagcgaaattcatttaattagagaaggttctagttctctgttggaagttctgaaagtttttacaatagcttctttggatgtccctgttgacccatttcttccaatcagagctgagattgatgccaagcttggtggtacccaatgcaatattatgttaagcagactgatgccatggatgcggcttcattctttgagaaccaaaggaatgaaactttctaaaagaaactccaatcaagaaatttctcaaaaaaaggagatgaagccaattttgtggacttgcacggtcgctgccccagaaatgactgtcttgctttacagtctaaatggattggtcttgtaccatgcttgttcccagtcatcacatttgtttgcaaataatattgcaagcaaggggattcagatacacacagaacttggtgaattgctggtgcacatggaggaggaatatagagagttattaaaggaaaacatatttggtgtggatacttactctggttccctaatgcatattgctcggatgagccttgattggggatatagggaaagtgatgtccaagatatggttgaaactagcaggaatgcacttgttttttcgattgatataagtgatatggaagtgaaatttggcttcaagcatttggaatcaattgtgcttaatttgatgtcgtttaggactctatttaagagtctccagctatctggcggaagtgctaaagaaaagaatttggagcgtaaaggggagaagaaaatgaaaggtgtgaagaaactgaaattaagcctacaaaaattctctattacatactgtggtgatgcaaacataataagtatgccaattgctgatccaaagcgtgtgaactacggctctcaaggtggtcaagtaattgttagtgtttctgctgatggcacaccacgtagggcaagtataacatcagttttaccagactgccacttgcggttctccgcatctttggtaatatctcatctctctatgtgtatagacaaggagagaaagacaacagaagcggaattggaacgggtgaaggcaatctatgaggaattacctgaggatcgctctggtgtcagagtaactttactagatatgcagaatgctaaaattgttcgccgatccagtggtcatgcggaagttgctgtttgttccctctttagtgctactgatatttatttgagatgggaacctgatgctcatttagcactatatgagacattcatccgctttaagcatttcctacatcataatgtgtcccaaaattctgaaaagatgattaatactgaagttgcaagtaccaaatcaaatgaacatggcaacataactgccggtttcattaattctcagaaatccaacagaaaagggtcaatttttgccattgatgtggacatgttaagggtatctgctgaacttgctgatggtgttgaagcaaacatgcatgtacagtcaatctttactgaaaatgccaagataggtgtactgtctgaaggtctttctcttacttttaatggcgctagagttctaaagagcacccgtatacaaatatcctgtatacctttcagcactgggagtttacttgatgcaaagattgaaccatcatccaaaagagactgggttgttcaaggtctagatgtccatatttgcatgccttacaggttgccattgcgtgccatagaagatgctgttgaagatatgtttcgtgcccttaagcttgtctcatctgccaaaagaagtataatctgtcctgatgaaaaggaaaaatctagaaaggttaattctgggggatccaaatttggatctgtgaaatttgtattgcgtaaattgacagcagatatagaggaagagcccatccaaggttggctcgatgaacattaccatttgatgaggaacaaaatctgtgagctaggtgttaggttgaattatcttgaggaagctatatcaggaagtgtagatccgagcaatcacagctctgagagaaaagttctctacaatggtgttgaagttgacattcatgacaccacagctcttcaaaagttgcaggaagaaatccataagcaagcatttcgatcatattatgtgtcttgtcagaacatggtacttgcagaagggtcaggagcgtgctcagaaggttttcaagctggattcagacaaagctcgcgaagagcttctcttctttcactttctgcttccgatctggatgttactttgaccaggatagatggtggagagctaagagactatacttctcctctgttctcttcactcagtgggaaatgtcaaggccgtattgtgcttgctcagcaggcaacatgttttcaaccccaaatacaccaagagttgtatattggaagatggcaaaaggtcacgatgctacgttctgccagtggtactacgccagcaatgaaaatgtactctaatttacctatttatttccagaagggagagatatcttttggagttggttatgagccatctttcgctgatataagctatgcatttcaagtagccctgcggaaagttaaccttagcactagagcaagctgttctggtctagcagtccaactgcctaaaaaggagcgcagcttaccatggtgggatgacatgagatactacttgcatggaaagataattttatatttcaatgagaccaaatggaagttcctggcaacaactaatccttatgagcatgtggataaactccaaattgtctctgaatacatggagatccagcaaactgatggtcgtgtggatgtttctgcgaaagaattcaagatatacataagcagcgtagagagtattacaaagaaccgccgcataaaagttccatctcgtgtgcccagaccttttatatatgctcctctattctccctaaatgtggttattgattggcagtgcgaatctaggaatccattgaatcattatttgcatgcactccctgttgagggggaacctcggaagaaagtttatgatccatttcgatctacttatctctctcttaggtggaacttctccctcagaccattgcaatcccagtatggtaatggcccaccacctcccttttatggaaataattcaatgctccgtgggatcatgtctggtagtccttgcaaaatgactgatgatgacttccctaccatgaacctgggagctcatgaccttgcttgggttttcaaatggtggagcttgaattacagcccccctcacaaacttcgttccttctctagatggcgtcgttttggaattcctcgggctactagatctggtaacctctcgctggacaaagttttggttgaattctttttccgtgttgatgctactccctgttgcataaggcatgcacctttaagtgaggatgatgaccctgcttttggtttgacgtttaagatgtcaaatttgaagtacgagttatgttacagtcgaggtaaacaacagtacacatttgattgtaaacgtgaatcactggaccttgtttatcgtggtctggatcttcacaggccggaggtttatttgatgcgagataacaatttgtcttcagttgaaaatgtatccaaagtaaggactatggtccaacagtcacatggaaaatttgttcatgacagatgcaacatgggtaatttccaagaaaagcatgaggatggcttcctcttgtcttcagattatatcacgataagaaggcaaacacgtaaagcagatcctgaaagacttatgggatggcaggatactgggaggagtcatgagataacatatgttaggtctgagtttgaggatgacagtgaaagtgaccacactctatctgagcctagcgacgacgacgatgattttaatgtggtgcttgctgacaattgccaaagagtatttgtttatggccttaggattttatggactattgagaatcgagacgcggtttggtcgtgggttggaggaatttccaaagcatttgagcctccaaaaccctctccttcacgacaatatgcacaaagaaagatgattgaagaaaggaatgctgagggctccaaggtgccgcaagattccagctcttccatacatgtgggttctccatcagtgcaacatctggatgcttcgggttcatcttcctcgttgcatagtaaagccaatcgctcctctgatgtggctgtaaatcatgacatttttgatgattcggataaaggagggacagcccaatatatggttaatgttattacaccccaattcaacctacactctgaagaagcaaatggaaggtttctacttgctgcagccagtggtcgtgtactggctcgttcatttcattcagttgttcatcttgggaaagaaatactagaacaagcacttggaacaagcagtgcacagattcttgagttacaacctgaaatgacctggaacaagtcggaactctcggtgatgcttaaagatgttcaagctcatgtagcccccactgatgtggatcctggtgctggtctacagtggctccctaaggttctgggtagctctgagaaattgaagcgcacaggtgccttgttagagagagtgtttatgccttgtcaaatgtatttccgttacactagacacaagggtggaactgcagacttgagggttaaaccactgaaggagctacgctttaactctccagacattactgcaacgatgacctctcgccagtttcaagttatgtttgacgtgcttagaaatcttctattcgcaagacttcccaagagtagaattagtgatgaactagaaatgtttggttccaaatgagcacaacttaatagtgttagtttcctgtcacaggcctaggaaaaacagtcttcagtatccatcagatgatgaagatattgaagaagaggctgacgaggtagtacctgatggagttgaagaagtggagcttgcgaaaattacactcgaacagagggaaagggaaattaagttactgcttgatgatataaggtctctcactggaaatggtgataatgggaccgatcactgtcattctgcagaaaaaggtgattgtttatggatgatcaacagcgggaaagcttcattggtggaaggactgaaaagggatttcgcaaacctacaaaagtctagaatatttgcatcatcagcattgaggaaagcactttcaaatgcttcacaatcacatttggagaaagaaaagaacaaaaccacttcttgtgccatgcggatttctatgaaaattagcaaggttgtatggagcatgctcgcagatggaaacacttttgcagaagctgagatcaatgatatggtgtatgattttgatcgggattacaaagatataggcattgccctgtttacaactaaatactttgttgtgcggaattgcatggttaatgcgaaatgtgacaccttattgtctgcctggaacacacctcctggaaaaattaacatgcttcgtgtggatgccaagcaaggtgctcctaaggatggaagttctccacttgagctcttccaggtggagatctacccactgagaatatatctatctgaagcaatgtatagaatgatgtgggattacttcttccctgaagaagacgattcacaacgaagacaggaagtttggagagtttcaacatcaaccgggcctagaagaacaagaaggctctcttctggtgtcgatgctgttacttctagcagctattctgtcagagatcatgaacttcctgggaaatcaagtacaactgtatctacatcaacaaatgtttcaagttggcaaggtatactcagcgataactcacaggtgtcaaagtttcagagtataaaagcaaatatggtatgtggttcgcatcaagagttgcaccggtcgtcttcatttgaaaggaattgggaagaaagcgctgcagaaagtgttgcaagtaatgatgtggtatcactcctgaattcttcaattgtttcttcaaaagtagatgctagcaattctgtcttagagaaccctgttgtgggaagtgagatgtggagaagtaaaacgaaagattctaagcctgccaagtctggacgtctatctcacgaagaaaagaagcttgggaagtctaatgatgaaaagaagacaaaacctcggaagtcaatggaatttcataacatcaagattggcaaggttgaacttcttgttacatacgagggatcaaggcttgctattaatgacctaaggttgcttatggatactttccacaaggcagaatttactggtacatggaggcgactattctctagagtcaaaaaacatatcatctggggagttttgaagtcggtaaccggaatgcaggggaagaagtttagcaaccatagggaaacacttgagggttctattcctgaaaatgatcttaacttgagtgacagtgatgttggtcaacctggaagacatgatcaattaacagcttcatggttgaagaggccaggcgatggtgcaggtgatggatttgtcacgtcaattagggggcttttcaatacacagcgccgtaaagcgaaggcctttgtgattcggacaatgcgcggtgaagggcataatgacgaatatcaagacgaatggagcgagagcgatggtgaatacccttttgcgaggcagcttacaattacaaaggccaagaagctcatacgaaggaagttccgtccaagggtgcaaaagaacccaggtctgtcgatgcaagattcactcccatctagtccgcgggaaacaactccatatcaaagtgactcctccaggtcatcttacgaggacttccatgagcagtaaaacaatctggtgatgctgctttcagcttctacatttggtcgataagatgcagccatttatattggttatagtagggtgtatgtatatagtaggatgtaccatcaaaatccaatgtatcatgtatagtggttaggcaatactccgtaattatgtgcttgtaagttaataagaggccagctcgtactcctagaaaacaaaacccgtgatctatggcatggggcattctcattcccttgtacttcaggactagtatggattgtaaattcaacggtgaaggtgttgcaacatttattcagtaaagtatccttgttgaagaatttgtaaaaactatggcagaaacaatagggaaggagcaagtgactaggtgcctaggtgtattatgattcttttgctgactagttggaagttagaaatgcattgctccacgtcaaaaagaaatgcgtggcagacaaggttgttgcttaacagatcggtgagctatgaaatgctatctgttca

SEQ ID NO: 9278 - DNA, 1909 bp, Zea Mays
tcatctcttataggcaatgcatagtggctgcatatatatcaaattagactagctaccactcctcccaacgcaaggaaccaagactgtgtcgaatggccgccgcgcaggagaaacgcttggcgatcatcggagccggatcgagcgggcttacggcgtgcaagcacgcgctggccaagggcttccgcccagtggtcttcgaagccgctgatgccgtcggcggcgtgtgggcgcgtacgctggcctgcacgaggctccagagtccagcagaagcgtaccggttctccgacttcccgtggccgccggaagtaaggcccgaggagttcccgcgcagcgaccaggtggcggcgtacatggccgcgtacgcccggcagttcggcgtcgtcgactgcgtcaggttcggcagcaaggtgctcggcgccgagtacgtcggagcgtcggaggcagaggtggcggcgtgggagcagtggtcagggaacggcgaggcgtttggcgacggcaccggtgtgtggcacctcaccgtccagcacggcgaaacggaggagactcagaaatacgagttcgatttcttgatcatctgcctggggaggtacggcattgcaaaggttcctacattcccacaaggcagaggcccagaagtgttccaggggcaagtgctccattccatggactactcgcgcatgccacacgcggatgcccatgagctgatcagaggcaagcgcgtcgtcgtggtcggctccggcaagtccggcatggatacagtcgcgcagtgtgccagagccaacggtagcaagtacccatgcaccatggtgtacagaagcgccaactggatggtggatcccaaccttgcctggggcgctttcttcaagaagatgataggcagtagactggcagagctgatggtgcacaagcccggagaagggttcgcgctgagcctcctcgccacggtgctgacgccgatgagatggctgatggccaagctggccgagacgtactacagggagctgatgccgatgcgcaagcacgggatggcgccgggctacaacctctcggagtcgatgctgctgggctggcgaattggcctgctcccggacaggttctacgacatggtggagcaaggcggcatcgtgctccggaggtgcgactccttcggcttctgcgccgacggcctggagctggacgacggcacaggggagcgcgtcggcgccgacgtcgttatcctcgccaccggcttcgacgacgaacggctcctcaccagcgtgttcgtgtcgccgtggttccgcgagatcatcgtgccaaagccctcccacaccatgcttcctctctacaggcactgcgtgcaccctaggataccgcagatggcggtggtctgctacgtggagagcgcggcgagcatctacccctacgagatgatggccaagtgggtggcgcacctgctcgacggtgtggtgcgcctgcccagcgtcgcggccatggaagagaacgtggcggagtgggagcgctgggggcggtgggccaagcgccgcagcggcgctttcttcgtcaagtcatgcatcgccgccgtcacgacgtggtacagcgaccagctgtgccgggacatgggacgcaatcccaggaggaagcggagagggctcctcgccgactggctgcagccgtacgggccctcggactatgccggcatccagtgaactgatgaggcgagccacaagtgatcatcagcgtccagcgcgcgcatgcatgtactattttatttatttaagagaaatggaatttggcaatttcagcgccgtttagtatggatcggtgtaacaattgtcttttggtttccatctttggcagacatttcgaacatgataacgaagttgccatccagacttataattcaaaaattgctatttatgttttgtatcgg

SEQ ID NO: 9279 - DNA, 1662 bp, Zea Mays
ctccgttttgcctctcaggggcccatcctagatagaggaggggttccttgaccgtaccaatagcttgaagaaaccatgcctatacaaaacaccaacaggagaactggggcctggggtgaggagggcgcttctctaggcacggcagtgccagtgtgccactggtgaggtgagacttgggagttgagaggcatgtgaccctcttcactcgcttgaccctcctcttcactcgcttctcccagaagtcacgcaccaaacaccaccaccaaagaaggcgagaacgtactccgtccctcccctcccctcccctccccttcccctcgaggctccaggaccgtctcctcgcctgctcatccgccgctgcttcccttctctgggctcggagaaccggagagaagcgcgcgcggccatggcgtccagcgcctctcggttcatcaagtgcgtcacggtcggcgacggtgccgtgggcaagacatgtatgctcatctgctacaccagcaacaagttccccactgactacatacctacggtgttcgacaatttcagtgcaaatgtagttgtggatggcaccactgtgaatttgggcctttgggataccgctgggcaggaagattacaaccgcctgaggcctctaagctaccgaggtgcagatgttttcgtgcttgcattctcacttgtgagccgagctagctatgagaatatcatgaagaagtggataccagagcttcaacattatgcacctggggtgcccgttgttttggcaggcacaaaattggatcttcgtgaagacaagcactacttgatggaccatcctggattggtgcctgttaccactgcacagaattttggtgaccctgctatttgcaccttccagggggaggaacttcgtagacaaattggtgctatgtattacattgaatgcagctcaaagacacagcagaatgtcaaagctgtgttcgatgctgccatcaaggtagtaatccagcctccaactaaaataagagaaaagaagaagaaaaaatcacgcaaaggatgttctatgatgaacatcttcggtggaagaaaaatgctatgcttcaagtcctgaatggttcaagggggtcttacatggactgataccacgagtgttaccccaagttcgcgaagcttgaaatcttgatgtgcttgttgcgcatgtgcaagcagagattgaagctgagaaaattggtgttggtgtcaccccagaagctcaaaatatattcgatgcgctgtccaagacgcttccggtgcagtgggacaagactgacattgttgtaatgaaggaggttcgtgtacgcagcccgtacctgcctgaaaatgttagtggaggaacagctgcagcaaacgaacgcgttaagaaagtgattgactttgaaaggaaaagattacattcacgtgcacctggccaattctcttaacctaaaagtattgatttttttttacattagcatgtgtttctgatactgcggcccgttttattattctcatcggtggggttttccataaaatatttcagcaaaaatgtggtaataatcacatcaactagcttgtttatgaactgtttgatagatgacttgttgtaattgaattgattataagccctctgtatttaggactgttagattgataataatctcctcttttttg

SEQ ID NO: 9280 - DNA, 1924 bp, Zea Mays
tggaaattcaatgcttctggggactactcttctagttcagcctacaaagttcttctccttggagcggttgattttggcccggctgagcggatttggaagtcttgggctccgggtttatgcaaagggtgggaaaaccattgttttcactcgcacaaagaaagatgcagatgaggtatcattggcactgacaaccagtattgcttctgaggcacttcatggtgatatttcacagcatcagcgtgaaaggacactaaatggatttcgtcaagggaaatttactgttctagtagctacagatgttgcggcccgcggtcttgatataccaaatgttgatttgattatccattacgaattgccaaacgatccagaaacttttgtccatcgttctggacgcactggacgtgctgggaaagcaggaactgcaatcttgatgtttaccagcagccagaaaaggacagttatgtcacttgagcgtgatgttggttgcaagtttgagtttataagccctccgtccatagaagaagtgctggagtcatctgctgagcatgtcattgctacattgcgaggggtgcacccagagtcaactcaatactttcttggagcagctgagaaattaacagaagaactaggacctcatgcccttgcttctgcactggcacatctgagtggattttctcagccaccttcttcacgttctctgatcagttatgagcagggatgggtgacattgcaactaactagagaaccgggatatggcagaggcttcttttctcctagatctgttactggttttctatctgatgtttgttcagctgctgcagatgaagttggcaaaatatacataacagcagatgagaatgtccaaggagcagtcttcgatttacctgaggaaattgcaaaggacctgcttactatggaggtccccccgggaaacacattaaccaaaatttcgaagctgcctgcgttgcaagatgatagtcctgctactgatagctatggtcgcttttcaaacgaccgaggttccaggaacaggcgttccaggggtggaggtgcttcaagaggccggggtggttgggacaccgacagtgaggaccgataccggcgtggtggcaggagcttgaggtctgacaacgatagttggtcagatgatgactggtcaggcggtgggagaaaatcaaaccgttcctcctcatcctttggtggccgctcatcatcctacggcagccgtggctcaccatcaccatccttcggtgtccgctcatcatccttgggcggtagggagagcagaagcttcagtggcgcttgtttcaactgcggcgaatccggtcaccgtgcatcggactgcccaaacaagtagatggcgcattcttccctgcccaagcaagtagacagctcgagcatcaggacgcacgcagagcgaaaacccaagcgcgcccctgatcgaccagtatactacgcctgacagccagctacagtttttgtgtggctgtctcgtcaggactgaagattttggcatgctgattccagttatttagatccagaggagtccttactctacagggatatgttgagtctcagtagaattgtgtaaccagtaaccacacacacgaacaatggcggaggactaaaatataaaatcatagctggcatattgaacacgtaacatatattgcagttggcatggctcttttcttttccttccaatttgactccagtggtcgcactgtgtcgatcgtttttacatgcactactacacatgcagcctcctttgcttgctggcagctatgcatagttgcgtgtgcgacacagcatctccaagctctggcaatcgcttgtcaaatgtctgctcctcagagttgtcctccgtatcaatcctctttctgtacttttctagtcttctctagagattttatcttatatatct

SEQ ID NO: 9281 - DNA, 1363 bp, Zea Mays
gtctgcctctcaaatctcaccgcctgctcttcttcggtcccggctcgggctcctccatatgagcgcgcgctaggttctctctcgtcgtctctcgtggcggctggcgacgactggggaccgccggtaggcgcccaggccttcgtcgcgctggtctttctagggcccttcgccggcgacgatcaccctccgcgaccagtctggatctgcccttggtcaagattcaaatatggcttctgcagggttggctcgggtgggtgagtggtgcgactcgtcctctcatgaggctcgtcaccttgagcaacatgccgatcctgcagcagctgcacctggaggagcagctcctgcgccgcacatcggacaactggtgtgtcatcaacgatggcatggcccctgctaccattctcatgggaaggaagattcaatcatgtattggtctccttgtgccccatgttgagttgctaatttggttttgcgtgatggcaggactgcaggagagtctcggagcttgtcgacatacagccggtcctctgggaccaagtgccgattgtgaggaggttcagtggaggtggcacgtcattgttgattggggaacggtggttgtgactttcatttgcaacaagaatgccgttgccgggctgcagatttatggcaaaaaatttgacagatttggtgaatttcatctgcgtgagaatgactatgcatttagtcactcgaaagtttggcggaaatgctcaatcaataacaaaaaatcgttgggttcatcacacgtcgttcttgtgggattatgatgtaaaaaatatggattatctcaaaatcccaaagcgtgcacctgaatatcgactggcaagaaaccacagatttcttgtgccgcatgaaggagtacataccttcgcggtcagttttcaccgatgaggtcactgcggccctgggagaacacttctcagttcagcccgtggatctacaagcagttctttccggtgatgaaggatccgtgccttctacaaagctgctgtcacaacaggacctagaaagaaattgtttcgtccaaagaatcccttaacaatatagaaagttgaagcgtgaccatgcttgtcgtttttgttgtgaaatatgagcagttttgtcgagctgtgaattcattcaaacattatggtcaacccagtacgtacatacgaatgcccaccaccatctttagtaacaaatggttatgttttggattgtaggtctaccgttccaagcttgggttacacgttatttgcctatgggctctagaccgagtgctaaaactatgagagactggctccaacatactctgtaaatggttatgtactctaaattataaagaaattttttgtcttcttat

SEQ ID NO: 9282 - DNA, 1769 bp, Zea Mays
gtctgcctctcaaatctcaccgcctgctcttcttcggtcccggctcgggctcctccatatgagcgcgcgctaggttctctctcgtcgtctctcgtggcggctggcgacgactggggaccgccggtaggcgcccaggccttcgtcgcgctggtctttctagggcccttcgccggcgacgatcaccctccgcgaccagagcttgtagaggttatggaaggtatgggtgtgccttcaccaccgacagttgggactccgtcggcctcgccctgccgcattacgtcccccgttgatgataccaatgcgtcgcttggccaagaaccagagtgcgcattgacatatatcagacaggacgatcctgacacattcattatctcgggaaattttcatccaaggcatcaaatcgattgggattcaattgaagtagaagaaaggtggaatgaggaaggaagacaggatgttactagtgaacgaggattgtatattcaactcggtttgcataatgaagatgagagggtatttaagcaaagggaagatgattcaagtgctcattgtgctggaaataatagggaagaatttcacgatgaagcttcaactgccatgccttgttctgattttgtattagatgggacaaggactatctatgatatgaacaatcctgtaatggagcctggtagctttctggatctgcccttggtcaagattcaaatatggcttctgcagggttggctcgggtgggtgagtggtgcgactcgtcctctcatgaggctcgtcaccttgagcaacatgccgatcctgcagcagctgcacctggaggagcagctcctgcgccgcacatcggacaactggtgtgtcatcaacgatggcatggcccctgctaccattctcatgggactgcaggagagtctcggagcttgtcgacatacagccggtcctctgggaccaagtgccgattgtgaggaggttcagtggaggtggcacgtcattgttgattggggaacggtggttgtgactttcatttgcaacaagaatgccgttgccgggctgcagatttatggcaaaaaatttgacagatttggtgaatttcatctgcgtgagaatgactatgcatttagtcactcgaaagtttggcggaaatgctcaatcaataacaaaaaatcgttgggttcatcacacgtcgttcttgtgggattatgatgtaaaaaatatggattatctcaaaatcccaaagcgtgcacctgaatatcgactggcaagaaaccacagatttcttgtgccgcatgaaggagtacataccttcgcggtcagttttcaccgatgaggtcactgcggccctgggagaacacttctcagttcagcccgtggatctacaagcagttctttccggtgatgaaggatccgtgccttctacaaagctgctgtcacaacaggacctagaaagaaattgtttcgtccaaagaatcccttaacaatatagaaagttgaagcgtgaccatgcttgtcgtttttgttgtgaaatatgagcagttttgtcgagctgtgaattcattcaaacattatggtcaacccagtacgtacatacgaatgcccaccaccatctttagtaacaaatggttatgttttggattgtaggtctaccgttccaagcttgggttacacgttatttgcctatgggctctagaccgagtgctaaaactatgagagactggctccaacatactctgtaaatggttatgtactctaaattataaagaaattttttgtcttcttat

SEQ ID NO: 9283 - DNA, 1776 bp, Zea Mays
atggagtcatcgctggcttggcctctctgttcttcttcctcccccaaccccgctgctctccattctagccgagttgttgctcttcttccaccgacctcgctgctcacctccgcagcattgtctagatccccaccgtcgctggccttcttcgaggcccagatccccattgtaggccccttgcttcttctcctcaaccggagcttccaaaactcccttgcagagcttgtagaggttatggaaggtatgggtgtgccttcaccaccgacagttgggactccgtcggcctcgccctgccgcattacgtcccccgttgatgataccaatgcgtcgcttggccaagaaccagagtgcgcattgacatatatcagacaggacgatcctgacacattcattatctcggcatcaaatcgattgggattcaattgaagtagaagaaaggtggaatgaggaaggaagacaggatgttactagtgaacgaggattgtatattcaactcggtttgcataatgaagatgagagggtatttaagcaaagggaagatgattcaagtgctcattgtgctggaaataatagggaagaatttcacgatgaagcttcaactgccatgccttgttctgattttgtattagatgggacaaggactatctatgatatgaacaatcctgtaatggagcctggtagctttctggatctgcccttggtcaagattcaaatatggcttctgcagggttggctcgggtgggtgagtggtgcgactcgtcctctcatgaggctcgtcaccttgagcaacatgccgatcctgcagcagctgcacctggaggagcagctcctgcgccgcacatcggacaactggtgtgtcatcaacgatggcatggcccctgctaccattctcatgggactgcaggagagtctcggagcttgtcgacatacagccggtcctctgggaccaagtgccgattgtgaggaggttcagtggaggtggcacgtcattgttgattggggaacggtggttgtgactttcatttgcaacaagaatgccgttgccgggctgcagatttatggcaaaaaatttgacagatttggtgaatttcatctgcgtgagaatgactatgcatttagtcactcgaaagtttggcggaaatgctcaatcaataacaaaaaatcgttgggttcatcacacgtcgttcttgtgggattatgatgtaaaaaatatggattatctcaaaatcccaaagcgtgcacctgaatatcgactggcaagaaaccacagatttcttgtgccgcatgaaggagtacataccttcgcggtcagttttcaccgatgaggtcactgcggccctgggagaacacttctcagttcagcccgtggatctacaagcagttctttccggtgatgaaggatccgtgccttctacaaagctgctgtcacaacaggacctagaaagaaattgtttcgtccaaagaatcccttaacaatatagaaagttgaagcgtgaccatgcttgtcgtttttgttgtgaaatatgagcagttttgtcgagctgtgaattcattcaaacattatggtcaacccagtacgtacatacgaatgcccaccaccatctttagtaacaaatggttatgttttggattgtaggtctaccgttccaagcttgggttacacgttatttgcctatgggctctagaccgagtgctaaaactatgagagactggctccaacatactctgtaaatggttatgtactctaaattataaagaaattttttgtcttcttat

SEQ ID NO: 9284 - DNA, 4705 bp, Zea Mays
gtctgcctctcaaatctcaccgcctgctcttcttcggtcccggctcgggctcctccatatgagcgcgcgctaggttctctctcgtcgtctctcgtggcggctggcgacgactggggaccgccggtaggcgcccaggccttcgtcgcgctggtctttctagggcccttcgccggcgacgatcaccctccgcgaccagagcttgtagaggttatggaaggtatgggtgtgccttcaccaccgacagttgggactccgtcggcctcgccctgccgcattacgtcccccgttgatgataccaatgcgtcgcttggccaagaaccagagtgcgcattgacatatatcagacaggacgatcctgacacattcattatctcgggaaattttcatccaaggcatcaaatcgattgggattcaattgaagtagaagaaaggtggaatgaggaaggaagacaggatgttactagtgaacgaggattgtatattcaactcggtttgcataatgaagatgagagggtatttaagcaaagggaagatgattcaagtgctcattgtgctggaaataatagggaagaatttcacgatgaagcttcaactgccatgccttgttctgattttgtattagatgggacaaggactatctatgatatgaacaatcctgtaatggagcctggtagcttgtacgcatcaatggagcagtttagacttgcaattagacagtacgccataaataaagaatttgagttgggcattgaggctaccaacaagactagattcagagggtactgtaaagggcctgattgtccttggagcattcatgcgaggtctgagatgaaaggatcacccactattcaagttattgtcttaaacgatgagcacacatgtacatcgagcgggagacgcaagacaacgacaccaacaggtgcttgggttgcggcaagggctcttccactacttatgaaaaaaccacatatgggtgctaaggagttacaaagtatgttgcaagatacatttggatgcactattacatatgatacaatttggcatgggaaagagaaagctctgaagcaattgtttgggagttgggaagagagtttccaacttctatggtcttggagagaagcagttatacagaagtcaccggatagtattatcgagttggatgttaaaatggatgagggccggccattttttagcagatttttttgtgcacttggtccttgcattactggtttcaaagagggatgtagaccttatcttagtgttgactcaactgctcttaatggaagatggaatggtcacctgtgttgtgccataggggttgatggacagaattggatgtaccctgttgcttatggattctttgaggcagaaacaacagaaaactggacatggttctttcagcagttgcgcaaggctgtgggagatcttcctctactagcattgtgttcagatgcttgcaaaggtctaaaaaatgccatgaacactgttttccctcaagctgaaaaaagggagtgtttcagacacctaatgcagaactacgtgaagcaatttgttggatccgagtacatgtatcctgcagctagagcatataggagggaggtgttcgaccattacttttccaatgtccaagaaattcccaaggtgtctagttggttatatgagcatcatgatagtttgtggtatcgtagtgggtttaatccagccatcaagtgcgactatgttaccaacaacatagcagaagtgttcaacaattggattaaggattggaaagatctgcctgtctgtgacttggctgacaagataaggaaggaaatcatggagttgtttcataggaggagggaaataggacagaggttgcaaggtcgaatactaccctccgtggtccatatcctccatgtaaggactagaggtttaggtcacttaacagttaagaaagctgacaattacattgcggaggtgagggataataataatgtgcactctaagcacattgtgaatgctcaattgagacaatgttcatgcaacgagtggcagcatacggggaagccatgtcaccatgcccttcgcttaataacaacacaacaatttagagatgttcggatggaagattttgtggatgactactactcagttgataagttcatgaaggcttactcgagggtagtggagccaattggtgacaaatctttctggcctacagtgccatttgcaaaagaggtgtgtgcttctattgggaagcgtggagttggccgtcaaaggaaaaacatgattaaagggtgcctagagggaggaagtggtaagaagccaaacgaaaatgaaaatgtcaaaactaagaagatgattcgtgggaagttcaagtgtccaaactgtggtgaattgggacacaggaaagccagctacaaatgtcctttgaatggaacaaaaaaacggaaaaggagagcaaggaaaaatgttactaaaggttggttcccaaaagatgttgaggcatgatgatggtgcatgcactagccacacaaccacccccatgtgatgattgtgatgccagtattgcgaaaatctctccactttcatctcccagacctatctagaggctagtgctggaccagtgtaccctaggagctgggtgccaggtgcggtggcgggcggggcctagcaaagcatgacgctgtaggagggatccagtcatccgatacgtcagcactccggcacagcagtaggcatctcggaagctggcagggccacagggcaccacgcccaaggcttagccgcgcaggcactgagcagccaagtagtcaggcagtcagtgagcagcagcagacggcagcaaggctggaagcgcgaagtacctatataggcatataagtttagttcgaccgggagtttacttctctgttatctgtgacttgcccgaccccgacttgatgtgcattgtagattatcagaaattgattaatgatttaatcacagattttaatcaactcaacacgtcgagaagaatatttttgtgctcatagttttttagttcaagcaatgttaatactagtggtacttccctgagttcatatcaatgcttagtcttgggctcctcagaaatgcaaattctttctttggcttgcaattagaaacaagtgttggactgctgataatctggagaagaggggttgcagcacccaagcagctgccctttgtgtgaccaagaaagggaaacgatacaacacatcatcactacctgtgtttttgcccggcaattctggtttcttatctttgacactcgggatgagtcacctcgctcttagggctgatgagcggtcgtttgaggactggtggaggaaggccagcaacagtacaaggataagagaaaagggatcaactgtgtcattattttgggggcttggtgcctctggctgcatagaaatagaacgttttttatgggaatcatccattcagagggtgcagcaacatttcagtgacgagttctcctgttggctcttggtgcgcgccaggagtttgggtcagcttggtctccctagttccatgatctggatctgcccttggtcaagattcaaatatggcttctgcagggttggctcgggtgggtgagtggtgcgactcgtcctctcatgaggctcgtcaccttgagcaacatgccgatcctgcagcagctgcacctggaggagcagctcctgcgccgcacatcggacaactggtgtgtcatcaacgatggcatggcccctgctaccattctcatgggaaggaagattcaatcatgtattggtctccttgtgccccatgttgagttgctaatttggttttgcgtgatggcaggactgcaggagagtctcggagcttgtcgacatacagccggtcctctgggaccaagtgccgattgtgaggaggttcagtggaggtggcacgtcattgttgattggggaacggtggttgtgactttcatttgcaacaagaatgccgttgccgggctgcagatttatggcaaaaaatttgacagatttggtgaatttcatctgcgtgagaatgactatgcatttagtcactcgaaagtttggcggaaatgctcaatcaataacaaaaaatcgttgggttcatcacacgtcgttcttgtgggattatgatgtaaaaaatatggattatctcaaaatcccaaagcgtgcacctgaatatcgactggcaagaaaccacagatttcttgtgccgcatgaaggagtacataccttcgcggtcagttttcaccgatgaggtcactgcggccctgggagaacacttctcagttcagcccgtggatctacaagcagttctttccggtgatgaaggatccgtgccttctacaaagctgctgtcacaacaggacctagaaagaaattgtttcgtccaaagaatcccttaacaatatagaaagttgaagcgtgaccatgcttgtcgtttttgttgtgaaatatgagcagttttgtcgagctgtgaattcattcaaacattatggtcaacccagtacgtacatacgaatgcccaccaccatctttagtaacaaatggttatgttttggattgtaggtctaccgttccaagcttgggttacacgttatttgcctatgggctctagaccgagtgctaaaactatgagagactggctccaacatactctgtaaatggttatgtactctaaattataaagaaattttttgtcttcttat

SEQ ID NO: 9285 - DNA, 2128 bp, Zea Mays
atgcaggtcttagacggtggagtcaatggcatagcagccaagcacgtggatgaaagacgcaaacctctcaatctcctagatggcctcgtggacgcgcgggaccgtgtcgcagagccagccatgcgcgacgtccgtccctcactctcttcgattctggactgctcgcgcctctcgcctccgtgttcacatcgccctacccgccgtaccacatgccagacgctggccaccggctccgccgccgcagcgactacatcgggggtgtgcagcctcccatcagactcccgccagcgccaaacccttcgactcggcgatggccacaccggagaagaagtcatacccacctgccatggtcgcggaggaggtgagggtgtgaggctgactggcgattggacccgtccccccattccacccgccgtcgccgacgtgtctgtccaagtttcagaggcaggaacacaagcacaaactactgtccagattgacgaggagccaggttctgatgaagacgacgatcttccaccacttgaagcaaacaccaacatgaatagaccatatgaactaatttctcaacggaacaactaattgaattttttgtccagtgcaaggtattagttgtgtaacaaattgttaaattctcacatgtcagatagtggtgcattccatggcttgatctgtctctttttactctaggccagcggcagacgcgctgcctgcctcccctggcttgctcctggccatctagcgtctgtcatgtgttctgcctgatgggttttctccttttttgcatatgccatatgttctgcccatctgttaattgccgccgctgttttcaggaaggtttagcgattgaggctgagtttgggcagacctcatcattgttagtttgtttgttatagagtaagctagcccaggggaaaaatagtgaacctggcagatgatggtatggagtaacctgttgttccattcaataggacaatctgagattgtagagatgtggtttctgcacttaatttttgggcgacaatttcaagggagtaacgtggtagtgatttctctccctttattatgatgaagttgtggcttgtatcaatgtcgtatctgcaatttgaaatatgtatatatgccatgtccgattagcaacacaagacattgggatctccaaatttcacggcattgattcaggatataattctctggccagtagactggcctactaacttcatttatggacaaaaatcaagggtgtacatcatccttatggcttatctggaaatggattgccatgtttctcaattctctcccagctactacaacctacccttcacgctttcctcaagcccaccgtgtgccagcccacgcatgcttgtttaaaacgcgcggcgggtgtgcgcgttagtcgttggtttcttgtgcgctgtgctgccgcgcttgcatatgctcagacttgcaggcaatctgtcgtgtgcgcggctgggctggaccttcaaatgcagatgcacagcagacggagtgtacaggagatgatgggaatgggagcagcaaagcaaagaacgatcaggcggcgggccattgcttaaacttggttgcttcggacgatatgatgcgcgacgagtctacatgcaagatcggttggcactgtggctcaaattaaaggctggtttaaagcatgcatcattggtgttagatacagaaaggaaaagaaaaaactggcacggcaggcgcgatacatatacactgcgcccgtctcttcggtggacactgaagaggagctggtgaatggacgggaaaaaaagaattctatgcatacggaatgcaaatctattggacagaaaaagattctatacataccaaatacaaacatattatgagttacattgcaggcccacacgaacaaaaattacatctctttagactttttgtagcttctgtccgtaagggtctgtaggttataaatgtgagaggctgcaacagaacgagtttgcatccggtatgctgtcgatcagagcccgaccaaacactcaggagtcgagaggcacgctacaccacacccgtgttcggaaccgcgcgataaccatcttgtcgaactatggaaatgttgctaagcaacaacgatctctaataccatgcagag

SEQ ID NO: 9286 - DNA, 1744 bp, Zea Mays
aagaacaaattaaccggcactaaaaatagtttgacatatgtttgtggaagaagtgatgtcactagttgagcttgatgtattacgtgatgctctggttggtctccctggtgttagtgggttatcgactgaacaaaggaagaggctgacgattgctgtagaacttgtagcaaacccttcaattatattcatggatgaaccaacttctggccttgatgctagagctgcagcaattgtcatgcgcacacttctgttgctgaagagaggaggtcgtgtcatatatgctggccagcttggtgttcagtctcgcgtactagttgaatatttcgaggcaattccaggtgttccaaaaatcacagaaggatacaatcccgcaacatggatgctggaagttagctctcctctagctgaggctcgcttggatgttgattttgctgaaatttatgcaaattctgccctgtaccggaaatcagagcaggaactgcaaaacctacttggagccacctatgctgctgttttcttccttggatctgcaaacttgctctcatctgtacctgttttttctatcgaaaggacagtcttctaccgtgaaaaggctgctgggatgttctctccgctgtcctattcgtttgcggtgacagttgtggagcttgtctacagcatagctcagggcatcctttataccatccctctgtattcaatgattggttatgagtggaaggcagacaagttcttctacttcatgttcttcctaacctgctccttcctctacttttcactttttggtgcgatgctggttacctgcactccttccgcaatgcttgcgagtattgttgtctcattcagtctaaccggctggaacatcttcgccggattcctcgtaccccgaccggcgttgcctatctggtggcgatggttctactggtgcaacccagtgtcctggaccatctacggcgtcacggcgtcgcagttcggcgatgtaggccgcaacgtgacggctactggcaacgccggcacagtcgtggtgaaggaatttctggaacaaaacctgggcatgaagcacgacttcctcggctacgtcgtgctggcgcatttcggctacatccttctgttcgtcttcctcttcgcgtacggcaccaaggctttgaacttccagaaacgaattggagctatctttactactttatatgttagcagtgtaggcgtgcacactgccttgttctgccatcgcgcgctcgcctccctccccgcgcccgcagtccccgcatccgcgcccgcagtcccgccgcgcccgcagtccccgctgccgagcagtcctgccgcgccccctccccctgcaaaccccaccacgacgcagcaacagatccaccatcgacgtgcgcgccgcgcgccccgacgcggaacgctggatcccacgcagcaggaggtggccaaccagtcgccatcgcccccggcccccaccccgcctgctgcagcaagcggcgtccgctaccgcacgccctcgtccccggacctcctcctccctgccgacgccgccaagatgcgccgctactccgcgctgcccaacggcggccgccaggagacgctggccgaccgcgcgcaccgctaccggggcatcgtgctcgtcatcctcgccccgctcgcgctcgtctctctcgtcctcctcctcatgccacgctcacccgctggcaccatgggcagcgcccgggatagacaggactattacaaagttctagagacaacttaa

SEQ ID NO: 9287 - DNA, 5087 bp, Zea Mays
ccaagcaagcacaccgctaagcctgctgccgcctcctcgcggcccagcagcatcagctaactaacccgcccgcgcgccgtacgtgcgcgcgcctgcagctgctcacaagtcacagctagatagtagctactagctaggcagctaggaagagaagacgatcagcatggcgggggagatcgtggcaccgtcggggagccggcgcagctggctgtcggcggcgtccatctcgcggtcgctgcacgcggcaggcgacccggacgacccgttccggcggtcccaggctagccgcgacgacggggacgacgaggagaacctgcggtgggcggcgctggagaagctgccgacgtacgaccgcatgcggcggggcatcatccgcagggcgctggacgagggcggcgccaaggcgggcgcggacgaggtggacatcgcgaacctggacccgcgcgccgggcgggagctcatggagcgcgtcttcaaggccgtcgaggacgacaacgagcgcctgatgcgccgcttcagggacagactcgacctggtgggcatcgagcttccgcagatcgaggttcggtacgagcacctgtcggtggaggcggacgtgtatgtgggcgcgcgcgcgctgcccacgctgctcaactccgccatcaacgtcgtcgaggggctcgtcagcaagtttgtttcgtcgaacaagaggacgatcaatatactcaatgatgtcagcgggatcatcaagccatcgaggatgacgcttcttctgggccctccgtcatccgggaaaaccacacttatgcgagctctaaccgggaagcctgctaagaatctcaaggtgtctgggaaaatcacgtactgtggccatgagttttccgagttctatcctgagaggactagtgcatatgtcagtcagtatgatctacacaacggggagatgactgtaagagagacaatggacttctccagaagatgtctaggcattggtgccagatatgatatgttgtcagaattagctagacgggaacgaaatgctggcattaagcctgaccccgagattgatgctttcatgaaggcaactgcagttgaaggaaaggagaccaatgtcataacagatcttatactcaaggttcttgggcttgacatttgtgctgatattattgttggtgatgagatgaaaagaggcatttctggtggccaaaagaaacgtgtgactactggtgagatgctaactggacctgcaaaggctttgttcatggatgaaatatctactgggcttgatagcaacagcacatttcagattgtcaagtacatcagacagacggttcatgtgatgaattatacagtgatgatttcccttctccagcctccacctgagacctataatttgtttgacgacatcattttactgtcagaaggttacatagtctaccatgggccacgggaagacatccttgaattctttgagagtgttggtttccggtgccctgaacggaaaggagtggcggatttccttcaagaggtgacttccaggaaagatcaacagcagtactggtgccacaaccacgaagattaccattatgtgtcagtcccagagttcgtgcaacatttcaagacattccatgttggccagaaactccagaaagagttacaagttccttatgacaaatctaaaacacatcctgctgctttgactacccagaagtatgggctgtctagctgggagtctctcaaggcagtcttgtctagagaatggttgctgatgaagcgcaactccttcctctatatattcaagttttttcaattgtttgtcctggcagtcctcaccatgacagtgtttttcagaacaaagatgcccagtgggaagttttctgataacggaaaatttatgggtgctttggctacttctttgatcacaattatgttcattggaattactgagatgaacatgaccattaaaaagctacaagtattctacaaacagcgagactacttgttctttccaggatggacctttggagttgcaaccattatcttaaaaattcctttttcattcctggactcatttatgtggacaactgttacatatttatgttatgggtttcgcgcctgctgcaggaaggttcttcagccagtttctagcatactttttaacgcaccagatggctgtggccttgtttcggttgctaggtgcaattttgaagacaatggttgtagccaatacatttggcatgtttgcaatgcttcttatcttcctgttcgcagggattctcctacccagacaggacattaaacattggtggatttgggcctactggtcatctcccatgacatacagtaataatgctatatcagtcaatgaattccttgccactagatgggccatgccgaacaatgaagcaaacattgttgcaccaacaatagggaaggctattctaaaatataaaggctactttggtggtcaatggggctactggctttccatcggtgccatgataggatatactattcttttcaacattctctttctttgtgctcttacattcttgagccctggtggcagttcaaatactgtagtttctgtttctgatgatggcgacaaagagaagtctacagatcaagaaatgtttgatgttgccaatggcacaaatgaagcagcaaacaggagaacccagacaggaatggtcttgcccttccagccactttcactctctttcaaccacatgaactactatgttgacatgcctgctgcaatgaaagatcaaggtttcactgaaagtcgcctccagctgctatctgatattagtggtgcattcagaccaggcgttctgactgccctagttggtgtcagtggagctggaaagaccactctaatggatgtactagcaggaagaaagacaagtggaaccattgagggagatatcaaactttctggttatcctaagaaacaggaaacttttgctcgtgtcagtggctattgtgaacaaactgatatccattcaccaaatgttactgtgtatgaatcactcgtttattctgcttggttgcgcctttcttcagaagttgatgacaatactagaaagatgtttgtggaagaagtgatgtcactagttgagcttgatgtattacgtgatgctctggttggtctccctggtgttagtgggttatcgactgaacaaaggaagaggctgacgattgctgtagaacttgtagcaaacccttcaattatattcatggatgaaccaacttctggccttgatgctagagctgcagcaattgtcatgcgcacagtgagaaatacagttaacactgggcgaaccgtggtttgtacgatccatcagcccagcattgatatctttgaggctttcgatgagcttctgttgctgaagagaggaggtcgtgtcatatatgctggccagcttggtgttcagtctcgcgtactagttgaatatttcgaggcaattccaggtgttccaaaaatcacagaaggatacaatcccgcaacatggatgctggaagttagctctcctctagctgaggctcgcttggatgttgattttgctgaaatttatgcaaattctgccctgtaccggcacaatcaagaacttatcaaggagttgagcattccaccaccaggctaccaggatctctcgtttcctactaaatatgcccagaatttcctaaatcaatgtatggccaatacatggaagcaatttcgatcttattggaagaatccaccctacaatgccatgcgctatcttatgacaatcctctacggtctcgtgttcggttcagtcttttggcgcatgggaaagaacgtgaaatcagagcaggaactgcaaaacctacttggagccacctatgctgctgttttcttccttggatctgcaaacttgctctcatctgtacctgttttttctatcgaaaggacagtcttctaccgtgaaaaggctgctgggatgttctctccgctgtcctattcgtttgcggtgacagttgtggagcttgtctacagcatagctcagggcatcctttataccatccctctgtattcaatgattggttatgagtggaaggcagacaagttcttctacttcatgttcttcctaacctgctccttcctctacttttcactttttggtgcgatgctggttacctgcactccttccgcaatgcttgcgagtattgttgtctcattcagtctaaccggctggaacatcttcgccggattcctcgtaccccgaccggcgttgcctatctggtggcgatggttctactggtgcaacccagtgtcctggaccatctacggcgtcacggcgtcgcagttcggcgatgtaggccgcaacgtgacggctactggcaacgccggcacagtcgtggtgaaggaatttctggaacaaaacctgggcatgaagcacgacttcctcggctacgtcgtgctggcgcatttcggctacatccttctgttcgtcttcctcttcgcgtacggcaccaaggctttgaacttccagaaacgaattggagctatctttactactttatatgttagcagtgtaggcgtgcacactgccttgttctgccatcgcgcgctcgcctccctccccgcgcccgcagtccccgcatccgcgcccgcagtcccgccgcgcccgcagtccccgctgccgagcagtcctgccgcgccccctccccctgcaaaccccaccacgacgcagcaacagatccaccatcgacgtgcgcgccgcgcgccccgacgcggaacgctggatcccacgcagcaggaggtggccaaccagtcgccatcgcccccggcccccaccccgcctgctgcagcaagcggcgtccgctaccgcacgccctcgtccccggacctcctcctccctgccgacgccgccaagatgcgccgctactccgcgctgcccaacggcggccgccaggagacgctggccgaccgcgcgcaccgctaccggggcatcgtgctcgtcatcctcgccccgctcgcgctcgtctctctcgtcctcctcctcatgccacgctcacccgctggcaccatgggcagcgcccgggatagacaggactattacaaagttctagagacaacttaa

SEQ ID NO: 9288 - DNA, 5093 bp, Zea Mays
cgccaaccaagcaagcacaccgctaagcctgctgccgcctcctcgcggcccagcagcatcagctaactaacccgcccgcgcgccgtacgtgcgcgcgcctgcagctgctcacaagtcacagctagatagtagctactagctaggcagctaggaagagaagacgatcagcatggcgggggagatcgtggcaccgtcggggagccggcgcagctggctgtcggcggcgtccatctcgcggtcgctgcacgcggcaggcgacccggacgacccgttccggcggtcccaggctagccgcgacgacggggacgacgaggagaacctgcggtgggcggcgctggagaagctgccgacgtacgaccgcatgcggcggggcatcatccgcagggcgctggacgagggcggcgccaaggcgggcgcggacgaggtggacatcgcgaacctggacccgcgcgccgggcgggagctcatggagcgcgtcttcaaggccgtcgaggacgacaacgagcgcctgctgacgaatgcatgcgtgcatggttgcagggtgggcatcgagcttccgcagatcgaggttcggtacgagcacctgtcggtggaggcggacgtgtatgtgggcgcgcgcgcgctgcccacgctgctcaactccgccatcaacgtcgtcgaggggctcgtcagcaagtttgtttcgtcgaacaagaggacgatcaatatactcaatgatgtcagcgggatcatcaagccatcgaggatgacgcttcttctgggccctccgtcatccgggaaaaccacacttatgcgagctctaaccgggaagcctgctaagaatctcaaggtgtctgggaaaatcacgtactgtggccatgagttttccgagttctatcctgagaggactagtgcatatgtcagtcagtatgatctacacaacggggagatgactgtaagagagacaatggacttctccagaagatgtctaggcattggtgccagatatgatatgttgtcagaattagctagacgggaacgaaatgctggcattaagcctgaccccgagattgatgctttcatgaaggcaactgcagttgaaggaaaggagaccaatgtcataacagatcttatactcaaggttcttgggcttgacatttgtgctgatattattgttggtgatgagatgaaaagaggcatttctggtggccaaaagaaacgtgtgactactggtgagatgctaactggacctgcaaaggctttgttcatggatgaaatatctactgggcttgatagcaacagcacatttcagattgtcaagtacatcagacagacggttcatgtgatgaattatacagtgatgatttcccttctccagcctccacctgagacctataatttgtttgacgacatcattttactgtcagaaggttacatagtctaccatgggccacgggaagacatccttgaattctttgagagtgttggtttccggtgccctgaacggaaaggagtggcggatttccttcaagaggtgacttccaggaaagatcaacagcagtactggtgccacaaccacgaagattaccattatgtgtcagtcccagagttcgtgcaacatttcaagacattccatgttggccagaaactccagaaagagttacaagttccttatgacaaatctaaaacacatcctgctgctttgactacccagaagtatgggctgtctagctgggagtctctcaaggcagtcttgtctagagaatggttgctgatgaagcgcaactccttcctctatatattcaagttttttcaattgtttgtcctggcagtcctcaccatgacagtgtttttcagaacaaagatgcccagtgggaagttttctgataacggaaaatttatgggtgctttggctacttctttgatcacaattatgttcattggaattactgagatgaacatgaccattaaaaagctacaagtattctacaaacagcgagactacttgttctttccaggatggacctttggagttgcaaccattatcttaaaaattcctttttcattcctggactcatttatgtggacaactgttacatatttatgttatgggtttcgcgcctgctgcaggaaggttcttcagccagtttctagcatactttttaacgcaccagatggctgtggccttgtttcggttgctaggtgcaattttgaagacaatggttgtagccaatacatttggcatgtttgcaatgcttcttatcttcctgttcgcagggattctcctacccagacaggacattaaacattggtggatttgggcctactggtcatctcccatgacatacagtaataatgctatatcagtcaatgaattccttgccactagatgggccatgccgaacaatgaagcaaacattgttgcaccaacaatagggaaggctattctaaaatataaaggctactttggtggtcaatggggctactggctttccatcggtgccatgataggatatactattcttttcaacattctctttctttgtgctcttacattcttgagccctggtggcagttcaaatactgtagtttctgtttctgatgatggcgacaaagagaagtctacagatcaagaaatgtttgatgttgccaatggcacaaatgaagcagcaaacaggagaacccagacaggaatggtcttgcccttccagccactttcactctctttcaaccacatgaactactatgttgacatgcctgctgcaatgaaagatcaaggtttcactgaaagtcgcctccagctgctatctgatattagtggtgcattcagaccaggcgttctgactgccctagttggtgtcagtggagctggaaagaccactctaatggatgtactagcaggaagaaagacaagtggaaccattgagggagatatcaaactttctggttatcctaagaaacaggaaacttttgctcgtgtcagtggctattgtgaacaaactgatatccattcaccaaatgttactgtgtatgaatcactcgtttattctgcttggttgcgcctttcttcagaagttgatgacaatactagaaagatgtttgtggaagaagtgatgtcactagttgagcttgatgtattacgtgatgctctggttggtctccctggtgttagtgggttatcgactgaacaaaggaagaggctgacgattgctgtagaacttgtagcaaacccttcaattatattcatggatgaaccaacttctggccttgatgctagagctgcagcaattgtcatgcgcacagtgagaaatacagttaacactgggcgaaccgtggtttgtacgatccatcagcccagcattgatatctttgaggctttcgatgagcttctgttgctgaagagaggaggtcgtgtcatatatgctggccagcttggtgttcagtctcgcgtactagttgaatatttcgaggcaattccaggtgttccaaaaatcacagaaggatacaatcccgcaacatggatgctggaagttagctctcctctagctgaggctcgcttggatgttgattttgctgaaatttatgcaaattctgccctgtaccggcacaatcaagaacttatcaaggagttgagcattccaccaccaggctaccaggatctctcgtttcctactaaatatgcccagaatttcctaaatcaatgtatggccaatacatggaagcaatttcgatcttattggaagaatccaccctacaatgccatgcgctatcttatgacaatcctctacggtctcgtgttcggttcagtcttttggcgcatgggaaagaacgtgaaatcagagcaggaactgcaaaacctacttggagccacctatgctgctgttttcttccttggatctgcaaacttgctctcatctgtacctgttttttctatcgaaaggacagtcttctaccgtgaaaaggctgctgggatgttctctccgctgtcctattcgtttgcggtgacagttgtggagcttgtctacagcatagctcagggcatcctttataccatccctctgtattcaatgattggttatgagtggaaggcagacaagttcttctacttcatgttcttcctaacctgctccttcctctacttttcactttttggtgcgatgctggttacctgcactccttccgcaatgcttgcgagtattgttgtctcattcagtctaaccggctggaacatcttcgccggattcctcgtaccccgaccggcgttgcctatctggtggcgatggttctactggtgcaacccagtgtcctggaccatctacggcgtcacggcgtcgcagttcggcgatgtaggccgcaacgtgacggctactggcaacgccggcacagtcgtggtgaaggaatttctggaacaaaacctgggcatgaagcacgacttcctcggctacgtcgtgctggcgcatttcggctacatccttctgttcgtcttcctcttcgcgtacggcaccaaggctttgaacttccagaaacgaattggagctatctttactactttatatgttagcagtgtaggcgtgcacactgccttgttctgccatcgcgcgctcgcctccctccccgcgcccgcagtccccgcatccgcgcccgcagtcccgccgcgcccgcagtccccgctgccgagcagtcctgccgcgccccctccccctgcaaaccccaccacgacgcagcaacagatccaccatcgacgtgcgcgccgcgcgccccgacgcggaacgctggatcccacgcagcaggaggtggccaaccagtcgccatcgcccccggcccccaccccgcctgctgcagcaagcggcgtccgctaccgcacgccctcgtccccggacctcctcctccctgccgacgccgccaagatgcgccgctactccgcgctgcccaacggcggccgccaggagacgctggccgaccgcgcgcaccgctaccggggcatcgtgctcgtcatcctcgccccgctcgcgctcgtctctctcgtcctcctcctcatgccacgctcacccgctggcaccatgggcagcgcccgggatagacaggactattacaaagttctagagacaacttaa

SEQ ID NO: 9289 - DNA, 1760 bp, Zea Mays
caattcaggacccagattccaggggctgaggagattggctatgtcgtgcccaccgagatgcaggagcaatccctgccgcttctgctgtccggccaggattgcattctccacgcgcaggctccgggaagacgctggcctacctcttgtccatcttctccaccatcgacttcagcaggtcctcggtgcaagcgctggttgtcgtccccacgagggagctcggcatgcaggttaccaaggtcgctagactactcgcagccaaggcgtgcaccgtcatggctttgcttgatggcggtacgctcaagaggcaaaagagctgggtcaaggcagagccccccgcgataattgtagctactgtggcaagcttgtgtcaaatggtcgagaggcgcgcattcagtcttcaatccatgagagtgttagttattgatgaggtcgattttattttcgggtcatcaaagcaagtcagctctcttcgcaaaatattaacctcctattcagcagcttccagtcgtcaaaccatatttgcaagcgcatcgatccctcagcacaatcgctttctgcatgattgcgtacagcataaatggaccaagggtgatgtggttcatgttcatgtccaccctgtacagcccatgccttcgcacctgtgtcacaaatatgtggccgcacgtcacatttcttctcaaccaatccaatgcatatagaggaaaccctctaatccaatgcatacagaggaaaccctctctgccccagtttttctcttctttcccaaaataagctcgcggcctaccttctttctcctgagaattcatttcgatctctgtctgaatattggtaactatgacaacacaatcaatgtgcagatctgcaccaagaaggaaaggatgcatgttttactatcgttgcttgagagggacgcaccgaagtctgcaatcatatttgttgctgggcagtctgagagatcaaagaaggctggaaatcctccttcaaccatggtggtctctgatttcttgagaaatgaatacaagggaagccttgatgtgatgctgctggaagaagatatgaacttcaatgctcgagctgcctcgttctccgaagtgaagggaagaggattcctgctggtctcaaccgacatagcgagcagagggtttgaccttcctcaaaccagccacgtatacaacctggatcttcctaagacggcaaccgactatttgcaccgtgctggaagaacagggaggcaaccattctccaggttagaattggaatgctgcgtgacaacccttataacagaggaagagcacttcgttctacggagatttcagaatgagctcaagttccacacccaagaggaagagctgcccctcatgaattgctttccaggatagagatacttgcttgtttcatcgtctcgtcatcctatgaatgaattattccatctctctaggtgggccgtcgacattcccacgtgaatcgcatgcttgtgtcagtgtcacgtcttttctcgtgttgtacagcagccgatgacaaataaatgaaaatgttttgcaactttgcgttgctttgctttgctttgatgtaagtgtgaactgagctgattcctctattttcaggatgtatttaaatatctactagttagtgcccgtgcgttgcgacggtacacgaacaccgctgataaaagcattagtagtaattaattttagatcacttctaaggtgtgctctcttgacaggaggaaaaggaggaaagattcattcatttttattcat

SEQ ID NO: 9290 - DNA, 2882 bp, Zea Mays
atatttttctgtgaatatgattcctgtaattccagaagagccctaaacttcgcgtcctacacgcgcccccctctcgctcccacacaaaaaccctagccatccaacaggcaacaggagaccatcaatcatcaataaataaaaaatagtagtaattcctaaccctaggaggcatcctgttccacgcgactcatcccgtcgtccgccgagccgccgacgccacgccaggcctccacgccgcgcctccgagctccgtcgccccggaccgccggcgccgggcagccgtgagctccgaccggacctgcccgcgcccaggctgaggcgccgcctacccgagctccgcccaggccgcccgcccgctcggcaggacgactggacgagctcctcgccgcgggcgccgagcagaggagctcctctcgcggaagcgcggacccgccttcaggccgaggtgccgagctccgccccgccccgcgcggccgcgcccctgcccaggtccagccgccccgctcggctcctgttccccgctggggttccggcacaaagctccacggctccgcatcccattgctgagattcttcccgtgaggaggtgttgggggtagctggcgatgggggcggagcaggggtacgaagatatgcaggggaccttcagggactccgaggtgttcgagtttgtcgggaaagtcctgcagtccgtgcggatgggacaaagattattatgattacatgctaggcattatagaccctaccaagaaaaggagtacagatgatgaagctatgtttgttactattttgagggcactatcacaagcagtatccaagatagacaccgtgtatcatcatgcacttctacacaatatatttaccatgtgtgtctggcacttgcacagtgacacgagggtggtgtttttggatttaataaccagattggctgctgtggcagaccaatatctcagagaatgtttgcagatgcttgtgaataatttcactccacctggacccctcattcgttacattgaggagccaaggtggcttccaaagaaggaaaaaatctactctcagttgcaagagagtttgaaaatgatttctgacactgtgcccttggcaccaaggatgttaaaggatataattgataggagtatgccaaagttgtttgatagcaaagctaagatggtatcatttgtcaagtgcatgttgggacttgatgctgttgtttgggacattattgggtcgtcattgttggagaaagttgtgtacctacttacagaattggatgttaatataacatgggaagatattcttcaagatgaacacaacaaaggtatatttgacatggagcttgaggatttggctgaggatgaagataaccttggtcaagaaggaacaaaggtccattttggaggaaatatgtgtgccgagaaacttgatggtttaatggtggttgtgtgtgagcacctcaagtcacgtgtagaagaacctgagcgcctaattaaggaatttgtcactttgaaggctatatttaaatcacatgtgctgagggtgcacaaatccaaatttgcacagtttatcatgttttatgcttgttccctgcatcctgagattggcgatggctttgctaattttcttactgatatttttattgacaaggacaaaaacgaggatgcaattactagagtgtctgcagtttcatatgttggaagctatctgtcccgggcaaggttcatttccgtaaatatagttgtttctgtactcaaaaggctagtggactggtgtgattattattgtggccatcagctggacaatggggtgacagcaaatcctataaagcaccagctattttatgctagctgccaggctgtgatgtatgtcctatgctttcggttaagatctattatggactacccaaatcttaaacaacaactttttcgaatgcgaatccgggatatcttggtccacccattgcagccattaaaggtgtgcttgccttcaatagtgaatgagttcctgagacaggctacagctgcgagcctgttccatgcacctgcgatctcaatgcacgaagatgcagttgaatccgatctatcgaaggcatttggaggacttaataggcttgacatgttcttcccatttgacccgtatctacttaaagagtctgacagatatatacggccaaattttgagttctggtccttggtcaagacgacatacagtaacgacaacagcgatgaggacgacgaagagcttggcgacattgacgcacctggaatgaatgtgggcagcttggatgatcacttcgaaatagattttaacagtgacgatgacattgagtataagatgaataagatgtccataacgccgcaacgcactttctaccatccactggctacaaacagtgagtccaaccgcatgcctgcgaggatcagaccttcagtgagccccccatcatagcaaggttctgctcagctctttacttgactgatgatgacacaaaatcagatgctaggaagttgcacgtgccaagaagggaccaggggatgacgaccaaacatacaccggagtgtattctatttattattccagttgctagtagggtcaaaactttaatgcagagtgtatatgtgtttcagggcaacgcgtggaaaaccggtttgtgattgtatacttggtagtcagcccttaggaacaggtatgtgtttgtagcaagacttacgacgtgaaatgaggattctcttggggacattaatggtataacgtgcgaatgttagaacctaattttcaattatcaatgagtcaggtgcagcctaattttcaaggacctgttcgtagcatgtaatgtaacgcatctaggcaaaacaaccctctgttgcccagttcatgctgaagtct

SEQ ID NO: 9291 - DNA, 4242 bp, Zea Mays
gtaaattctaaaaggagcgaggggcaaattctgaaaaatctgggctgtccgctagtccactcttctggtcctctcgcttttgcgctcccttggtcgtcttcgtcccctgctcgtctcccgtccgttttcggatgcccactccgaccaaaaccctagctacttcgtgaaggtggaggggaggagatggcggcagcggatgggcgcagcggcgacttccgggtcaggggtggcagcgttgggggtcggatcgaccgactggtggtggagaacttcaagtcgtacaagggtgagcagacgattgggcctttcgtcgacttcacagccatcatcggccctaacggcgccggcaagtccaacctgatggacgccatcagcttcgtgctgggcgtgcgctcaacgcaccttcgaggcgcgcagctcaaggacctcatttacgccctcgacgaccgcgacaaggaggccaagggccgcaaggcttccgtccgcctcttctactgccaacccaaccaggaggagctctgcttcacccgcagcatcaccggcgccggcggcagtgagtaccgcatcgaccgcaaccaagtcacctgggacgtctacaacgccaagctcaggtccctcggcatcctcgtcaaggcccgcaacttcctcgtctttcagggtgatgtagaatccattgcctccaagaaccccaaggagctcaccgctctcctggagcagatctcaggctctgatgagcttaggagggagtatgacgagctggaggagcagaaagccagggccgaagagaagtctgctcttgtgtatcaagagaaaaggaccattgtcatggagcggaagcagaagaaggtgcaaaaagaggaggcagagaagcatctacgccttcaacaggacctgaaactgttgaagacagagcattacctttggcaactctataccatcgaaaaagacatagagaaaattgaagctgagcttgtggaggatagagaatctcttcagcaagtgcaggaagagaatcgatccagtgactatgaactgactgcaaaaaagaaggagcaaagtgcatttctcaagaaaatcacattgtctgagaaaagcataaccaagaaaaagcttgaactcgacaagaagcaacctgagcttcttaaattaaaagagcaaatatctcgtctcaaatcaaaaatcaaaagttgcaagaaagagattgacaaaaagaaggatgatcacaaaaaacatcttggagagctgagaaggctgcaaagtgatctggttgaggtcacagaagctattgaggaattgaatgagcaaggacaagatacaagtggaaaactgttattagccgacgaccaactccaggagtatcatagaattaaggaggatgcaggaatgaagacagcaaagctaagagatgagaaagaagttatagaaaaaaaattaaatgctgatgctgaagcaaaaaagaatttagtggagaacatgcagcagctggaaagccgtaaagatgagatatcatcacaagaacgtgaactgcagacaaaacttagcaagattctccattctattcccaagcttgaaaatgagctcacacacttgcatgaggaacacaacaaaattgcaaaggaacgccaatcttcaggatctgaataccaaatgctgaagcagagattggatgaaatagaaacacaactacgggagcttaaagctgacaaacatgaaagtgagcgtgatgctcggttaaaagaaaccgttggacgtctaaagcggctattccctggagtccatggccgcatgcttgaactttgcaggccctcgcagaagaaatataaccttgctgttactgttgccatgggaaagttcatggatgcagttgtagtggaagacgagaacactggaaaggaatgcattaagtatctgaaggagcagcggcatcctccgcagacatttattcccttgcaatcagtccgtgtgaagccgataattgagaagctgcgaactcttggtggatctgcacagttagtttttgatgtcattcattttgaccgagttttggagaaagcagttctgtatgctgttggaaatacacttgtctgtgataaacttgatgaagctaaagccttaagttggagtggtgaaaggtataaagttgttactgtcgatgggattctgctgactaaatctggcacaatgactggtggaacaagtggggggatggaagctagatcaaacaaatgggatgacagcacaatagaatctttgaagaagaagaaaaatctgttggaaaataaaatgtcagaacttggttcccccagggagttgcagagaaaagagcttgccatatctgagaaaataactggacttgagaaaaagttgcactactcgaatgttgaacagaataaccttagagggaaactagctaaattagcatctgagaggagtaatattgagacagagattaatcgtctgaagcctggagaggaggagctcgagacccgtattggtaaaagggaagcagaagcaagaaaacttgagaaaaaaattaatgacattgtggacaaggtgtacagagattttagcatttcagttggtgtgaagaatatccgcgagtatgaagaaaagcagctaaaagatgctcaagcactacaggagaggaagctaagcctaagtaaccaaatgtcaaaattgaaataccagcttgaatatgaacaaaagcgagatatgcatgcaccaattgtgaagttaacggagacacatgagtccttagagaaagagcttaagggcttacaggagagagagtctggtgctaaggctgaagctgaacaaattttggctcagatggaagaactgaagactgaggctgatgactggaaatccaagtcggatgaatgtgagaaggttattgatgaattgaaggagcagaatggtaatgttgcatctacattggcaaagatggatcgccaagtgaaatcaaaggagggacaacttgcacaacttatatcacgccagcgagaggttcatgagaagtgtgaacttgaacagttgaagcttcctactgtaaacgacccaatggataccggaacatcctcacaagaaccaatccttgattacagccagcttagcaaaagccatctgcaggatatacgaccttctgaacgtgacaaacatgaggcagagttcaaaaaaagaactggtgtgctactagctgatattgagcgcactgctcctaatctaaaagccctggatcagtatgatgcactccaacaaaaggaaaaggaggttactgaaaggtttgaagcagctaggaaagaagaacgagagatatctgacaaatataactcagtcaagcaaaggaggtatgagctgtttatggaggccttcgatcacatatctaaaggcatcgacaaaatctataagcagctgacaaaaagccatacacatccactcggaggaacagcatatttaaatctagaaaatgaagacgaaccgtttcttaatggaatcaagtacacagctatgccacctaccaagcggtttagagatatggaacagttatccggtggggagaagactgttgcagcactggctttgctttttgccattcacagttttaggccatcaccgttcttcatattggacgaagtagatgctgctctggacaatttaaatgtggccaaggttgccgggtttatcagatcaaaatcatgtgaacgtgttggtgatgaacaaggcagcgatggcgagagtggttttcagagcatagttatatctctgaaggacagtttctatgacaaggccgaggcacttgttggtgtttatagggactcagaacgaagttgctcgaggactctcaccttcgacctgagaaagtatagggaatcgtgaagcagcttttgttgaatgtttgtactatgtgtgtagttgcctgctccatcagcttgctagatagctgtcgtgagccttcgatgttttaactatctgtatactcctagtcctacataagtgctagctgaacaaggaccctgaaatattcatttggtaggtggataactgatgtttcgaacacgcataaacttttttacctgttgtatgaagccatttctccgaattactataatctgtttaattatttcgtggtgttcaatttatctccacggttcgctcagtagtcacttgctgaagtgtgcagtgggctaatggcgtacgcatctgtttttgccgatactaaagcacaaatttatggacatttgc

SEQ ID NO: 9292 - DNA, 3326 bp, Zea Mays
gcatgactgatgtgagtaatctggaagtgaactctccattagaacgataagtgatatgtggtctctgaccttgcaacagatgttgtggtgcatgttggtgaagtaaaattttacttgcacaagtttcccctcctttccaagagcggcaagcttcaaagattagttctgaaggccgctgaggacgagactgatgaggttcgcatagatgaccttcctgggggagcaaaatcattcgaaatatgtgccaagttctgctatggaatggtggtcaccctcagtccacacaacgttgtagctgcaagatgtgcgtcacagtatcttgaaatgaccgaagatatggaaaaggggaacttgatatttaaaatcgaggtcttcataaattctagcatacttcgtagctggaaggactctatcattgttctccagagcacaaaggctctatcaccatggtctgaagagctgaaggttgtgggtagatgtatcgatgccatcgcttcgaagacgtctgcggatcctgccaatgtaacctggtcatacagtcatagtagcaagaaaggaggagcttgtgctgaaatagtcgagccagcaggaaagccatcaatagctccaaaagattggtgggttgaggacttgtgtgaactggatgttgacctgtacaagagagtcatggttgctatcaaatccaaggggagaatgtcacctgaactgataggagaggcacttaaagcctatgcagttagatggctgccagactcctacgatgcattagttgccgaggattacatgaggaggaatcaatgtctggttgagacaataatatggttgctgccttctgacaagagctcgggatgttcttgcagatttctcctgaaactgttgaaagtggccatactagtcggaggcggggagcacgtgaaggaagagcttatcaggaggatcagcttccagttgcacaaagctactgttaaggatctcttattacctgccacttcgcctaatgatggtacctatgatgttcggctggtgcataatcttgtccagagatttgttgcaagaacagcgctgtctcataatggcggtttcattgagaagtccgacgaaaagatgattgagctcaacttcgagcaagaatccattttgtcggtaggagagcttgttgatggctacctgtctgaagtagcttcggatcaagacctttcgttgtctatgtttgttgaactggcgactgccgtgccagaggtggctaggcctgttcatgacaacctgtactatgcagtcgatgcatatctcaaggtatgttcaaacgtagaaggcaaacacttcgtgcgcctagcttgatgttcagttattgctgttgtattgtagtacattgtttggatgtttatactatgaatggcaaatctgttctttctaatcaggaacacccagacataaacaagtccgagaagaagaagatttgcagtctggtggatgtcaagaagctcagcgcagatgcatccgtgcacgccacacaaaacgaccgcctgcctctccggttggtggttcaggtcctcttcttccagcagctgagggccggcccaagcaaagaactcgccctgattgacaatggagaacacgcttgcacacggcctacgcaggatcaatgtgaccgtggtgaaaggcggataccgaagcatccaaactcactgaataagcaggtgacaagcctgagcgcgagagagagccagcagcaccggatcagcgagcacaggggcggcaggaacagctttaaagaccagcttgggggcctcctgctgcagtcgcgatccaggaggatctttgacaagctgtggagcagcaaagggcagggcgagcatggcgggaaaggctcggagacgtctggtagctcgcagagcccaccgttgtcagcaaagcctgcagaagtgaagccctcccctcttccccctcttaggggcaggaggtactctgtttcttagttttttttgggggtgggggctctcctagtttagggctctgggataggttgttgtacagaaggtatcatctgctgccaatccctttttgttttgtacgcagatcaatctgctgttctatgtgatgatccatgccgtagcttttactgtagcgtaatttcaactgggagcaaatatttaccagggcctgagttgttaaaaatgtttcaatggcaaaaggtgaaaagaaaaatcaacaaaaactcgtaccttgaagaacatgaatttcatgcgctacatcacgcaggactgccataaggaaccaatcttacaaaaaaaacgagagtatttcagtgcaaaagcaagtcaatttggaacaatgccgtcaaaaccaaactacagtataaaaaagaagacgcaaccacaccataagtatgaaaactgactaacatagcaaggttcaaatcaaataataataatgggtaaacgccgagacatgataatctggaacaattccatatcagacaataacttggaagacagccccttccactgggcaaaggcgcaaagctgataatttgttactatctccttgcaagttcaacatcaggcctgcacatttcgcagccaacacaacagtttatctgactgctagttcatcaggtttagactagtaaccacccctcagagcaaggacaagatggaggacagatccaccctcgatgttgtagtcctttgcggtcttgtcatcagcaagctgcttaccagcatagatgagcctgcaaaggcgaccaaagtagcttcatcagcaccagacgccaggaaagcataactggtttcaagtagaatgagcattccgaagaacaaatagtaacagttgcagatataacaaaaaaaatcagcatggtacctttgctgcacgggaggaatgccttctttctcttcaacacgctccttgatcctgtcaatcgagtcagtgggttcaatgtcgatctcgatctctttcccagtgagagttttgaccttgatcatggttccacccctaagcctgaggaccaaatgaagagttgactccttttggatgttgtagtcagccagcgtgcgtccatcctccagctgcttgccagcgaatatcagtcgctgttgatctgggggaatcccttccttgtcctggattttggctttgacgttgtcgacggtgtcgctgctctccacctcgagggtgatggtcttccccgtcagggtcttcacgaagatctgcatcttctcctcgcctcttcctccctcgcacagtcgtactagacggtgacgaactcgaaccttgtgacaacgaagccgaagaacgcccaagaaaatttcctttttctttaattt

SEQ ID NO: 9293 - DNA, 1715 bp, Zea Mays
atcatacaatgcataaagataaacatgcatgaaaaatgtgtgtatcaactataaagatatcaaatccttctcggctctctcctctcccctttcatgccaagcacttaaacctaagagtcttgtggatggatggtagcaatcatgttaggaactaaggtatgtcgagctgttgaactggtctcaatgtctctcaatggctaatactataattgtcgcctttctagtaatagaggacggagaagacttactcatggttatctgctactatgggtctgatgacgtgatcgaggaaggtaatgtcttgatggtactagtcataggggttgtaggagttagaaatggtgaagactctcttttgacctaactcatgtggcttaagcgccctaaggagttagagcatcatagggtggggcaggacacttaatggtgagttgttgagatacacccatggcctctagtgccactccctatcttggtgaattggacgcaaaggtttcgacggaacagttattctaccaaactaatgctagatttatgtacgcttacaattcaggagtgctgagttcgcaggacagagctggtgctaataggattgaagaaaacgccttggtttggacaattgaacagaagagttcagagtttactctttttgacctttctgagttactggaggccacaaaatcctttgcagaagaaaatagacttggacagggaggtttcggccctgtgtacaaggggcaattatcagatggtcaggaaattgcagttaaaaggcttgcttcgcattcaggacagggtttcacggagttcaggaatgaagttgaacttatagctaagctacaacacacaaatttggttaggctcttgggatgctgcattcaagccgaggaaaaaattttggtgtatgaatatttgccgaataaaagcctggacttctttatctttgatgaaagacaaagcagtttgcttaattggtataaacggcgtgccataattgaaggcgtagcgcaaggtctcctgtacctgcacaagcactctcggctgcgcgtggtacatagagaccttaaagctagtaacattctcttggaccaggatatggaccctaaaatttcagattttgggttggcaagaatctgtagctccaatgatgctgaaggaaacacaaagagggtagtcggaacatatggctacatgtctccggagtatgcctctgaaggcatctactcggtcaaatctgatgtgttcagctttggtgttctacttcttgagatccttagcgcgaaaaggaattcaggttttcaccaatatggagactttcttaaccttctcggatatacatggcacctgtgggagataggaagatggcttgatcttgtagaagcatccatttcgaaagagatgcatgaagcagaggctaggcggtacattaacatcgcactaatgtgcgtccaagaaaatgcggacgatcggcccaccatgtccgacgtagttgctgcgctaaatagtgagagtgtggttctacctgagccaaagcatccggcttacttcaacctcagagtatctaaatctgtggaatcagcagttgttgttgaggcgtgcagtctgaatgagatgaccatcacccaagatccccaaggcagataggtcaagagcaagaaccgtcggagaagtatcatgaggatgagtttagagaggtataggccgtcatctcccag

SEQ ID NO: 9294 - DNA, 1959 bp, Zea Mays
gttatcctcggtgtcgttacccccaccatggccatcgtgctgctggcccttctcctcttcccgtccgcctatgcccaaccatggtcagtttgcggcaacacgggcaactacacggcggccagcacctaccaggacaacctcagccagctcgcggcaagccttcccaagaaagcctcttcgaacacgagtcccctcttcgccacgggtaccgcgggtgcagtgccggacctggtgtacgctcttgcactctgccgtggggacatcaacgcctccgcctgcaaggactgcgtcaccataggcttcgaggacgcgcagcagctctgcgcgttcaacaaggaagccaccgtgtactacgatagctgcctcgtcagcttctccaacgaagacttcctgtcgactaccgtcaacggcaacgagaacgaggtcaccgtcctcatggacgcccagaacttcacggagagcgcggactacatcaggctcctcttgttcactctgctgaacgacacgtccgagtccgcgatcaacagcatcaggaggttcacgaccgcgcggatggacattagctccctgccgacgatttactgcgctgtgcagtgcacgcctgacctcaccgccgacgagtgcgccgcctgtttgcaagacttcccgcaggtgacgctccagtacctcgacgggcagcgaggaggtcgacttctcggggtgcggtgtaacatgaggtacgagatctacaaattttaccaaggggaccccatgcttcgtattatctctttggcttcggcagtgccaacgatcggtaaaacccctcccggaacaccagtcacggtgtatccgcagcctccacctgcagcgccaccagcgccgcagatgataaccacgcctatcgcagcacaagaagagacaggggcaattatcagatggtcaggaaattgcagttaaaaggcttgcttcgcattcaggacagggtttcacggagttcaggaatgaagttgaacttatagctaagctacaacacacaaatttggttaggctcttgggatgctgcattcaagccgaggaaaaaattttggtgtatgaatatttgccgaataaaagcctggacttctttatctttgatgaaagacaaagcagtttgcttaattggtataaacggcgtgccataattgaaggcgtagcgcaaggtctcctgtacctgcacaagcactctcggctgcgcgtggtacatagagaccttaaagctagtaacattctcttggaccaggatatggaccctaaaatttcagattttgggttggcaagaatctgtagctccaatgatgctgaaggaaacacaaagagggtagtcggaacatatggctacatgtctccggagtatgcctctgaaggcatctactcggtcaaatctgatgtgttcagctttggtgttctacttcttgagatccttagcgcgaaaaggaattcaggttttcaccaatatggagactttcttaaccttctcggatatctgtacagatcatggaggcttgatgagctttctgctgttctgcagacatggcacctgtgggagataggaagatggcttgatcttgtagaagcatccatttcgaaagagatgcatgaagcagaggctaggcggtacattaacatcgcactaatgtgcgtccaagaaaatgcggacgatcggcccaccatgtccgacgtagttgctgcgctaaatagtgagagtgtggttctacctgagccaaagcatccggcttacttcaacctcagagtatctaaatctgtggaatcagcagttgttgttgaggcgtgcagtctgaatgagatgaccatcacccaagatccccaaggcagataggtcttccacctgatttcgtttcgctggtcattattgtacatgataatgtggacgtgaatggctatccttgttccagctttgaaactaatcattatggtcttcat

SEQ ID NO: 9295 - DNA, 1961 bp, Zea Mays
gttatcctcggtgtcgttacccccaccatggccatcgtgctgctggcccttctcctcttcccgtccgcctatgcccaaccatggtcagtttgcggcaacacgggcaactacacggcggccagcacctaccaggacaacctcagccagctcgcggcaagccttcccaagaaagcctcttcgaacacgagtcccctcttcgccacgggtaccgcgggtgcagtgccggacctggtgtacgctcttgcactctgccgtggggacatcaacgcctccgcctgcaaggactgcgtcaccataggcttcgaggacgcgcagcagctctgcgcgttcaacaaggaagccaccgtgtactacgatagctgcctcgtcagcttctccaacgaagacttcctgtcgactaccgtcaacggcaacgagaacgaggtcaccgtcctcatggacgcccagaacttcacggagagcgcggactacatcaggctcctcttgttcactctgctgaacgacacgtccgagtccgcgatcaacagcatcaggaggttcacgaccgcgcggatggacattagctccctgccgacgatttactgcgctgtgcagtgcacgcctgacctcaccgccgacgagtgcgccgcctgtttgcaagacttcccgcaggtgacgctccagtacctcgacgggcagcgaggaggtcgacttctcggggtgcggtgtaacatgaggtacgagatctacaaattttaccaaggggaccccatgcttcgtattatctctttggcttcggcagtgccaacgatcggtaaaacccctcccggaacaccagtcacggtgtatccgcagcctccacctgcagcgccaccagcgccgcagatgataaccacgcctatcgcagcacaagaagagacaggacgcaaaggtaaactgtggattattggtatagctattccactggtagcaattctgctatgttcaacctttacctttctgtggctgaggaggccaaagaaaggagtgctgagttcgcaggacagagctggtgctaataggattgaagaaaacgccttggtttggacaattgaacagaagagttcagagtttactctttttgacctttctgagttactggaggccacaaaatcctttgcagaagaaaatagacttggacagggaggtttcggccctgtgtacaaggggcaattatcagatggtcaggaaattgcagttaaaaggcttgcttcgcattcaggacagggtttcacggagttcaggaatgaagttgaacttatagctaagctacaacacacaaatttggatatggaccctaaaatttcagattttgggttggcaagaatctgtagctccaatgatgctgaaggaaacacaaagagggtagtcggaacatatggctacatgtctccggagtatgcctctgaaggcatctactcggtcaaatctgatgtgttcagctttggtgttctacttcttgagatccttagcgcgaaaaggaattcaggttttcaccaatatggagactttcttaaccttctcggatatacatggcacctgtgggagataggaagatggcttgatcttgtagaagcatccatttcgaaagagatgcatgaagcagaggctaggcggtacattaacatcgcactaatgtgcgtccaagaaaatgcggacgatcggcccaccatgtccgacgtagttgctgcgctaaatagtgagagtgtggttctacctgagccaaagcatccggcttacttcaacctcagagtatctaaatctgtggaatcagcagttgttgttgaggcgtgcagtctgaatgagatgaccatcacccaagatccccaaggcagataggtcttccacctgatttcgtttcgctggtcattattgtacatgataatgtggacgtgaatggctatccttgttccagctttgaaactaatcattatggtcttcat

SEQ ID NO: 9296 - DNA, 2243 bp, Zea Mays
gttatcctcggtgtcgttacccccaccatggccatcgtgctgctggcccttctcctcttcccgtccgcctatgcccaaccatggtcagtttgcggcaacacgggcaactacacggcggccagcacctaccaggacaacctcagccagctcgcggcaagccttcccaagaaagcctcttcgaacacgagtcccctcttcgccacgggtaccgcgggtgcagtgccggacctggtgtacgctcttgcactctgccgtggggacatcaacgcctccgcctgcaaggactgcgtcaccataggcttcgaggacgcgcagcagctctgcgcgttcaacaaggaagccaccgtgtactacgatagctgcctcgtcagcttctccaacgaagacttcctgtcgactaccgtcaacggcaacgagaacgaggtcaccgtcctcatggacgcccagaacttcacggagagcgcggactacatcaggctcctcttgttcactctgctgaacgacacgtccgagtccgcgatcaacagcatcaggaggttcacgaccgcgcggatggacattagctccctgccgacgatttactgcgctgtgcagtgcacgcctgacctcaccgccgacgagtgcgccgcctgtttgcaagacttcccgcaggtgacgctccagtacctcgacgggcagcgaggaggtcgacttctcggggtgcggtgtaacatgaggtacgagatctacaaattttaccaaggggaccccatgcttcgtattatctctttggcttcggcagtgccaacgatcggtaaaacccctcccggaacaccagtcacggtgtatccgcagcctccacctgcagcgccaccagcgccgcagatgataaccacgcctatcgcagcacaagaagagacaggacgcaaaggtaaactgtggattattggtatagctattccactggtagcaattctgctatgttcaacctttacctttctgtggctgaggaggccaaagaaaggagtgctgagttcgcaggacagagctggtgctaataggattgaagaaaacgccttggtttggacaattgaacagaagagttcagagtttactctttttgacctttctgagttactggaggccacaaaatcctttgcagaagaaaatagacttggacagggaggtttcggccctgtgtacaaggggcaattatcagatggtcaggaaattgcagttaaaaggcttgcttcgcattcaggacagggtttcacggagttcaggaatgaagttgaacttatagctaagctacaacacacaaatttggttaggctcttgggatgctgcattcaagccgaggaaaaaattttggtgtatgaatatttgccgaataaaagcctggacttctttatctttgatgaaagacaaagcagtttgcttaattggtataaacggcgtgccataattgaaggcgtagcgcaaggtctcctgtacctgcacaagcactctcggctgcgcgtggtacatagagaccttaaagctagtaacattctcttggaccaggatatggaccctaaaatttcagattttgggttggcaagaatctgtagctccaatgatgctgaaggaaacacaaagagggtagtcggaacatatggctacatgtctccggagtatgcctctgaaggcatctactcggtcaaatctgatgtgttcagctttggtgttctacttcttgagatccttagcgcgaaaaggaattcaggttttcaccaatatggagactttcttaaccttctcggatatctgtacagatcatggaggcttgatgagctttctgctgttctgcagacatggcacctgtgggagataggaagatggcttgatcttgtagaagcatccatttcgaaagagatgcatgaagcagaggctaggcggtacattaacatcgcactaatgtgcgtccaagaaaatgcggacgatcggcccaccatgtccgacgtagttgctgcgctaaatagtgagagtgtggttctacctgagccaaagcatccggcttacttcaacctcagagtatctaaatctgtggaatcagcagttgttgttgaggcgtgcagtctgaatgagatgaccatcacccaagatccccaaggcagataggtcttccacctgatttcgtttcgctggtcattattgtacatgataatgtggacgtgaatggctatccttgttccagctttgaaactaatcattatggtcttcat

SEQ ID NO: 9297 - DNA, 4258 bp, Zea Mays
taaacatgcatgaaaaatgtgtgtatcaactataaagatatcaaatccttctcggctctctcctctcccctttcatgccaagcacttaaacctaagagtcttgtggatggatggtagcaatcatgttaggaactaaggtatgtcgagctgttgaactggtctcaatgtctctcaatggctaatactataattgtcgcctttctagtaatagaggacggagaagacttactcatggttatctgctactatgggtctgatgacgtgatcgaggaaggtaatgtcttgatggtactagtcataggggttgtaggagttagaaatggtgaagactctcttttgacctaactcatgtggcttaagcgccctaaggagttagagcatcatagggtggggcaggacacttaatggtgagttgttgagatacacccatggcctctagtgccactccctatcttggtgaattggtgagttgttgagatacacccatggcctctagtgccactccctgtcttggtggagtgaaaactaccatcatgggtggggcaggacacttaatgataaaggccctaaactaaagtccttcaaactatatatctagcctagtatttctaaagaggggcaaggactgcaatctagactggtggtactaaggaaagaactcatgtatgttgaaggatatgctagaaatatgtaaaattgaaggccctatctattgctagatctagtcttatcaaggtgaaatctactcaaacatgttaaacgtcctcttaatctagtgttcttagaggttggcctaatgtctctgctctaccttgacctcttcatcatagtgttcctactatactagaagcctttactgctttgccctccactaccatcttctattgacctacattcatctacactaaaaggtcagatatcctttcattagatgatggtgggacaaatggtggtatggtgctagattcaccaaccttagagttgtgtgaacatggtggcaacaaaagttaagatggtggcacaaggtagtccttgtatgagctttcatcgatcacatcgctgctacaaaagctgatctaactctacctgctcaacctgacaaatagccttatcatgtgtctgctactatctatgttgctcatctaaaatcacttgacccctctagctaagtgttatagctcatgggcacgcatccactatgttggtcaacatataatacccaaaagccttgggagagttctcatgtgttaatgccaattctagatgtgaaattagctaagagaacatataggataagtagtgggcgtggggaagctgacgatgagccttaaatccatctggcactagatcctcaatctcacataatatggagtcaccaacatcatactctatgtgagagatgagtgcatctagaagccactattttatgttgttgagagactcatcgtacacaacttttagtagtagtatcctcttcataagtgcatgaaggatcctcactacaggtggaatgttcactacagctctatatgattgctcaacaaacaactagtgagatagagaggttacatgggttgtagggggtatcacttgttgtgtagtctattgggtgggtcagcgaaaccataataaacattatgtatccttgttagtgacactataaaatcagataactctgatgtccttggcatagatcctatagtggtacccttagaatatgaaccaaaaccacttgtagtcctagtcaatccaatggtgactgagagatcccacatgatagaggaacttaatgttcttatcatcaccgcattggcaattttcttaactagtctatgcaaatcctaactacaaaagcaagataatttaacatggttgtaagttaaaatgcattcaaagggacaacacaagctcatattttagtgaaattacttagatcaagaacattgagcttgttcctcaacttaaaaatgcatgcctcatctaaaggttttgttttagatatctataattgatctgttgtcctcactcctagtaaaatgtcaccttttgctacatgatctctaaggaactgatggtggatatctttgtgcatggtgcgagagtaatgaattgggttgttggcaagttttacgatgcattattatcacccaaaaggggtaacttttcaagaattacaccacaatctagaaggttttgcttcatgtaaagaatttatgcatgacaggtacccatcatgatgtactctatctcatcggtggacatggcaacactatttttcttggggaaattccctgtatgccatcggaaaatatacttattccttgtgtgccactggccccacatgtcatacacacaaaaaaattacgtatataccactcagtggcacacaaggatgagtataagatctgatggtgtacagggattttttccatttttcttctagatgtgagatgcccttgacactagtgatttaacaagcatatgacaccctttggtagtgcttttcctattaatcttgaaacccgtgtaatccaaattgaaatagccaacaagttggaaactagctcctttaggacaccaaaggcaatgtttggtatgggtttaaggcaccaaaagaatttattaactacaactaactgaacctctttaggatttgtttggaatctagcacatatacacacactaaacattatgttaggcatagatacagtcaaatataacaagctactaattataaaatggttgagagtttgatcaattaatttatctcctcatctaggtcgagattagcattgatgtcttgattggcttacattgatccatgcatattgaacctcttggaaagatccttgttatacattttttttagagatagatatttggaatcactgctgacttttcatttattatgcgtaggacgcaaaggtaaactgtggattattggtatagctattccactggtagcaattctgctatgttcaacctttacctttctgtggctgaggaggccaaagaaaggagtgctgagttcgcaggacagagctggtgctaataggattgaagaaaacgccttggtttggacaattgaacagaagagttcagagtttactctttttgacctttctgagttactggaggccacaaaatcctttgcagaagaaaatagacttggacagggaggtttcggccctgtgtacaaggggcaattatcagatggtcaggaaattgcagttaaaaggcttgcttcgcattcaggacagggtttcacggagttcaggaatgaagttgaacttatagctaagctacaacacacaaatttggttaggctcttgggatgctgcattcaagccgaggaaaaaattttggtgtatgaatatttgccgaataaaagcctggacttctttatctttgatgaaagacaaagcagtttgcttaattggtataaacggcgtgccataattgaaggcgtagcgcaaggtctcctgtacctgcacaagcactctcggctgcgcgtggtacatagagaccttaaagctagtaacattctcttggaccaggatatggaccctaaaatttcagattttgggttggcaagaatctgtagctccaatgatgctgaaggaaacacaaagagggtagtcggaacatatggctacatgtctccggagtatgcctctgaaggcatctactcggtcaaatctgatgtgttcagctttggtgttctacttcttgagatccttagcgcgaaaaggaattcaggttttcaccaatatggagactttcttaaccttctcggatatctgtacagatcatggaggcttgatgagctttctgctgttctgcagacatggcacctgtgggagataggaagatggcttgatcttgtagaagcatccatttcgaaagagatgcatgaagcagaggctaggcggtacattaacatcgcactaatgtgcgtccaagaaaatgcggacgatcggcccaccatgtccgacgtagttgctgcgctaaatagtgagagtgtggttctacctgagccaaagcatccggcttacttcaacctcagagtatctaaatctgtggaatcagcagttgttgttgaggcgtgcagtctgaatgagatgaccatcacccaagatccccaaggcagataggtcttccacctgatttcgtttcgctggtcattattgtacatgataatgtggacgtgaatggctatccttgttccagctttgaaactaatcattatggtcttcat

SEQ ID NO: 9298 - DNA, 3194 bp, Zea Mays
cacccggatcctccgcgcgcgccgccaggtccgtcgcgatggccgcactccgcctccccgcccagccggtggcgaggtggccccaccttccttccgcctacgccgccgccgccgccgcgcgtcgggtctcggcccctcgcggccatctcgcggcgcggcgggccaagggggaggagccgccggagccgccggtgaggacgctgctgatcgacaactatgacagctacacctacaacatcttccaggagctgtcggtcgtcaacggcgtgccgcccgtggtcgtgcgcaacgacgagtggacgtggggggacatctttaaccggttgtacaaggaccgcaccttcgacaacatcgtcatctcgcctggccctggatctccggcatgccccgccgacataggggtatgtctgcgcatacttttggagtgtggagatatacccatcttgggtgtctgccttggccaccaggccctgggatttgtacatggtgctgagattgttcatgctccagaagctatacacgggcgactcagtgaaattgagcacgatggatgccacctctttaatcgtgtcccctcaggtagtgaggtatcattcccttgtaatagaatctggttctctacctgatgatcttacatcgatagcgtggactgcttctccaaatttgctttcttaccttgaaagtgatcgaaccaatgacatgcttgtgagtcagatgatagccgagttatcatgggcatcaggcactctagcaggcctcattatggagtgcagtttcacccagagagcattgctactcatcacggaagacagattttccgaaactttaagaagataacaggaaattttggattgcgctcatcgtggattcaggaaagaaaggtcaattctgcaagtcatcatgattctattcctaaggacttgttgcatactgaaagaatggaactttcagagtctgtacttggaaagagagggattgggaagaagtgtttacgattacaatggaagaagattgaaaattttgtctgtcccacagtaggctctgaagacatatttgcggtgctttttggccatcaaagcggtgaagacacattttggttggatagctcatcagttgaccagaacagggcacgtttttcattcatgggtggtaaaggtgggtccctgtggaagcaaatgtcattccacctatctggtcaaagagccaattgtggaggaatgcttagtatccaagatgcttatggatttactgccaaaaaatttatcaaagacggcttcttggagttccttaacaaggagattgagtccattcaatacaatgagaaggattacgaaggactgccctttgaattccatggtggcttcgttggatatcttgggtatggtcttaaagtggagtgtgatgcatcatcgaacaaggccaaatcaagtactcctgatgcatgcttcgtctttgctgataacactgtggtggttgatcacagcaatggtgatgtgtatattttgtcactgcatgatgaattttattctagtaatggagatgggatatgcaaaaattcaacgcatacttcatggttagtggagactgagaagaagcttctcaggttgggtggtatgccctcaggatcaccaattatccgaaagacacatgctagatcatccagtgtgcataagcagagttttgttgtagagaaatcaaaggaccaatatgttagagacgttcagaattgcttggattatatcagggacggagaaagctatgagttgtgcttaactactcagatgaagagaagagcagactgtataaatgcactccaactctaccttaaactgagaaaacaaaatccagcgccttatgcggcctggcttaacttctcctcagaaaacttgagcatatgttgctcttctccagaaaggtttctacgactagaccgagctggagttctagaagcgaaaccaattaaaggtactatagcacgtggcagaacaccagaggaagatgaatgcttacgtctgcagttgagatacagcgaaaaagaccaggccgagaacctgatgattgtcgacctcttaagaaacgatctcggcaaggtctgcgagccagggagcgtgcatgtcccacgcctcatggacgttgaatcatacagaagtgttcacaccatggtgagtaccgtctgcggaacaaagaagccagatctaagccccgttgattgtgtgaaagcggcctttccaggcggttcgatgaccggggctccaaaagtcagatcaatggagatccttgattcacttgagacaagcccaagaggagtgtactcaggatcgatcgggttcttctcgtacaaccacacattcgacctgaacattgtgatccgaactgttatcctgcacgacggagaagcctcggtcggggcgggtggggcgatcgtagcgctgtcgagcccagaagcagagtacgacgaaatgctgctgaaagcgaaagccccgactgaggtggttgaggatctcgttcagacgatctacagctcagaccggtcggattccatgcagacaactatcagctagatcagataggcaaaggaccattatttgtcgcgacaccaagcgcttacgatggacctcggcaaacaccatgtgtctcagaaatttggtatcagtgaccggtgcgtgctgatgaacattggcagtgggagaggggggggggggggggggtgaggtggcgtatcttctttgcgatggtcatccctttgccagaaggaaataaaggagacgcgaagaggatgtcgaggtcagtcggatccacggttagcatatagagtcaggtgacatggcctctctcaactatagtgtgtgtgtgtgtgtggcatatacggtgagcatatacaagaacaacagtgtgtgtgtggcagaagtgaaacaaactgatacggttgtgttgcactgtcgtaccagttcaatgttcctgaagtgatattattctttgacgttataaatacttcgagggtgggtgggcgaatttcacgttttgtcgacgtttcctgggttgagctttccatccagcttctcaaatcccattttactctgaatattctgttgacagggatttctgttattaaagattcggagcagtttgttgttgttgcttttgacggtgaccttcatgaatcctgactcctgagatgcattttttttgtgttt

SEQ ID NO: 9299 - DNA, 3266 bp, Zea Mays
cacccggatcctccgcgcgcgccgccaggtccgtcgcgatggccgcactccgcctccccgcccagccggtggcgaggtggccccaccttccttccgcctacgccgccgccgccgccgcgcgtcgggtctcggcccctcgcggccatctcgcggcgcggcgggccaagggggaggagccgccggagccgccggtgaggacgctgctgatcgacaactatgacagctacacctacaacatcttccaggagctgtcggtcgtcaacggcgtgccgcccgtggtcgtgcgcaacgacgagtggacgtggggggacatctttaaccggttgtacaaggaccgcaccttcgacaacatcgtcatctcgcctggccctggatctccggcatgccccgccgacataggggtatgtctgcgcatacttttggagtgtggagatatacccatcttgggtgtctgccttggccaccaggccctgggatttgtacatggtgctgagattgttcatgctccagaagctatacacgggcgactcagtgaaattgagcacgatggatgccacctctttaatcgtgtcccctcaggtagaaattctggcttcaaggtagtgaggtatcattcccttgtaatagaatctggttctctacctgatgatcttacatcgatagcgtggactgcttctccaaatttgctttcttaccttgaaagtgatcgaaccaatgacatgcttgtgagtcagatgatagccgagttatcatgggcatcaggcactctagcaggcctcattatggagtgcagtttcacccagagagcattgctactcatcacggaagacagattttccgaaactttaagaagataacaggaaattttggattgcgctcatcgtggattcaggaaagaaaggtcaattctgcaagtcatcatgattctattcctaaggacttgttgcatactgaaagaatggaactttcagagtctgtacttggaaagagagggattgggaagaagtgtttacgattacaatggaagaagattgaaaattttgtctgtcccacagtaggctctgaagacatatttgcggtgctttttggccatcaaagcggtgaagacacattttggttggatagctcatcagttgaccagggcacgtttttcattcatgggtggtaaaggtgggtccctgtggaagcaaatgtcattccacctatctggtcaaagagccaattgtggaggaatgcttagtatccaagatgcttatggatttactgccaaaaaatttatcaaagacggcttcttggagttccttaacaaggagattgagtccattcaatacaatgagaaggattacgaaggactgccctttgaattccatggtggcttcgttggatatcttgggtatggtcttaaagtggagtgtgatgcatcatcgaacaaggccaaatcaagtactcctgatgcatgcttcgtctttgctgataacactgtggtggttgatcacagcaatggtgatgtgtatattttgtcactgcatgatgaattttattctagtaatggagatgggatatgcaaaaattcaacgcatacttcatggttagtggagactgagaagaagcttctcaggttgggtggtatgccctcaggatcaccaattatccgaaagacacatgctagatcatccagtgtgcataagcaggcaggatcaccaattaatggaaagacatatgttagatcatccagtgcgctgaagcagagttttgttgtagagaaatcaaaggaccaatatgttagagacgttcagaattgcttggattatatcagggacggagaaagctatgagttgtgcttaactactcagatgaagagaagagcagactgtataaatgcactccaactctaccttaaactgagaaaacaaaatccagcgccttatgcggcctggcttaacttctcctcagaaaacttgagcatatgttgctcttctccagaaaggtttctacgactagaccgagctggagttctagaagcgaaaccaattaaaggtactatagcacgtggcagaacaccagaggaagatgaatgcttacgtctgcagttgagatacagcgaaaaagaccaggccgagaacctgatgattgtcgacctcttaagaaacgatctcggcaaggtctgcgagccagggagcgtgcatgtcccacgcctcatggacgttgaatcatacagaagtgttcacaccatggtgagtaccgtctgcggaacaaagaagccagatctaagccccgttgattgtgtgaaagcggcctttccaggcggttcgatgaccggggctccaaaagtcagatcaatggagatccttgattcacttgagacaagcccaagaggagtgtactcaggatcgatcgggttcttctcgtacaaccacacattcgacctgaacattgtgatccgaactgttatcctgcacgacggagaagcctcggtcggggcgggtggggcgatcgtagcgctgtcgagcccagaagcagagtacgacgaaatgctgctgaaagcgaaagccccgactgaggtggttgaggatctcgttcagacgatctacagctcagaccggtcggattccatgcagacaactatcagctagatcagataggcaaaggaccattatttgtcgcgacaccaagcgcttacgatggacctcggcaaacaccatgtgtctcagaaatttggtatcagtgaccggtgcgtgctgatgaacattggcagtgggagaggggggggggggggggggtgaggtggcgtatcttctttgcgatggtcatccctttgccagaaggaaataaaggagacgcgaagaggatgtcgaggtcagtcggatccacggttagcatatagagtcaggtgacatggcctctctcaactatagtgtgtgtgtgtgtgtggcatatacggtgagcatatacaagaacaacagtgtgtgtgtggcagaagtgaaacaaactgatacggttgtgttgcactgtcgtaccagttcaatgttcctgaagtgatattattctttgacgttataaatacttcgagggtgggtgggcgaatttcacgttttgtcgacgtttcctgggttgagctttccatccagcttctcaaatcccattttactctgaatattctgttgacagggatttctgttattaaagattcggagcagtttgttgttgttgcttttgacggtgaccttcatgaatcctgactcctgagatgcattttttttgtgttt

SEQ ID NO: 9300 - DNA, 842 bp, Zea Mays
tgattgcaaaacaagctattttattgtattatctatttgatcgacattggagtaggccagattcagaatggaggtatctggtggatgattttgctgctacttttgggattactaatagaacattgcttgagtgcctggtattttgccttctagatgattattcttcagaagccttggaggaggcctgctctcatcttcccaagatctctagcaaggaaacacatccaaagatagcacaagttcttctggaacgacaaaaatatgatatggcacttcttgtgctaaagtgcacagggcatggaagcttctctgctacagaaaactttaaaaaagatgacatttcatctcttagtgaggcagtgactgtggttcgtgtcagaattgaatgtcgcctcctaacagaagcgtttatgtatcataggagctactgctctaaggtgaaagagcaacactcagcagatatgacacatgctgaggatgcattaaaaaactcttgggtttatcatgttgagatgatggtgaccgaattttgtgctatctgcattaaaaggaatttagttgataaaatgattgatctgccctgggattctgaggaggagaaacatcttcacaagtccctctttgactctgctcatgaaatgcccatgaaaccaaatggtagtctgcttgttgtctactaccttcggcgttatcggtatttggaggcatatgaggttgaccgtagtcttcaaaaatttgagcaaaagatattggaaaatacaactgaagagattgcttcaaaaatcagagcaattgctcgatggagagaaagtttagttttctgctttattacgcatgtctaa

SEQ ID NO: 9301 - DNA, 2766 bp, Zea Mays
gaaacttttgagccttggaaaagaatctggaagagctggacagcccctaagtgtatgatctgaatgttgatttgctagatgtccatgcagacaaaagcacatttcatcgttttgacaaattcaatctaaaatacaatccatgtggccaaagtaggctcagagaaattttcctcaaacaagataatcttattcaaggccgttttcttgctgagttgacaaagcaagttttctctgacctttctgctagcaaatatcagatggcagaatataggatttcaatctacggaaggaaacagagtgaatgggaccaacttgcaagttggatagtgaacaatgaattgcacagtggaaatgttgtctggctggttcagattccacgcttatataatgtgtacaaggaaatgggtatcgttacatcattccaaaatcttcttgacaacattttcgttcctctttttgaggttactattgatccagcttcacacccacagctccatgtcttcctgaagcaggttgtagggttggacctggttgatgatgaaagtaaaccagaaaggcgtccaacaaagcacatgcccacacctgaacagtggaccaatgtgttcaaccctgcattttcatattatgcgtactactgctatgctaacttattcaccctaaacaagctgcgtgagtcaaagggaatgaccactatcaaattccgtccacatgctggagaggctggagatgttgatcacttggcagcgacatttcttctctgtcacaacatatcacatggaattaatctaaggaagtctcctgtgcttcagtacttgtactatcttggtcagattggtctggcgatgtccccattgagcaacaactccttatttcttgactatcatcgcaacccttttccaacgttcttccaacgaggtctgaatgtctcattatctacggatgaccctttgcaaattcacctgacaaaagaaccattggtggaagaatacagcattgctgcttcgctgtggaagctcagttcttgtgatttatgcgaaattgcgaggaactctgtttaccaatctgggttttcacatgctctcaaggcgcactggattggtaagaactacttcaaaagaggacctgctggaaatgatattcacagaaccaatgtaccgcacatcagggttcaatttagagagatgatctggagaaatgaaatgaaactagtgtactctgacaatgagatcttaataccagacgagctggacctgtaagatgtccagcctcgtgtataccagacgagttgcgttgtagctgctatgggaattatacttcatgttttgttgctggaagtcggcaaagtgatcaagagtgtcaccaagcataccaactaccaagggatgcaatactacctccattctcgaatatttgccgtccgctagtttatttttgaactaaaacatgacaaataaaaaagaacggaggaagtaatacggcaaagtgaagcaacagatgcttgtgtaggagttgtgttactatcttcaaggcttgtgcaagagttgtgttaatgtctcttactcactcttatctcttatcttaaatcttactttataagtgttttttttttgcatgctcatagctagtattccctgaacaccccccctcccctcgaattgtaaccatgtactcgaagtgcttgcactctggttggatcctatacggtgagtaaggtgctatcggttgttatgctgcccagatgaaatggaaattgaactagatgaagaggttctggtttcacatacgggatcatgggggacaattatgtgtttggcagaggaggaactggactgatgtttttttttgggtgggtgtggcgtagggacaccaaaagataagacaacaacgaatagaacgtaactggcagatattcatactcctgttcttgtttggatgcaaatgcaatattctcaaggaaggcactcggttgagcaagtttgaaaaaaaggttgatggactcttacttggatactccaactcaagcaagacctgtagagtatacaacaccacacatggcatagttattgatgtgcatgatgttgagtttaatgagataaaccattctcaagttggagatgagaacatagtgatgtgagatgtgccaatctggatgatgcaacgaaatatatggcaattagagatataatccctagaggggaacaagatcaagaaggtggctcaattagggtggttccctcatcaagtgtgcaaaaatgaagatcatcccagcacaagtggttgtcatgatcaacctcaagtacaacaaatgtaaatcaacaagtggctagaccaactcaagtgacaaccaagttatcaaccaagctcaagcactccatgtcaaattgtccaactagttacctttgcaagagataatccattagatcaaatagttggtgacttgataagtggtgttcaaacaagatcactacttgcataattttgtgagaactatttctttttgtcatcaagtgagccaaccaagatagaaaagtattgatggatgttgatagggtgaatgcaatgcatgaagagtttaacaatttcacaagaatgaagtttgggattagtagaatggccaaagaattaaaatgttattagaaccaagtgggtgtttagaaacaagcaaaatgaagatggcattgtagcgagaaacaaagaaaggctggttgcacaatgatacactcaagttgaaggtattgattttcgtaaaacatataccgggttgcg

SEQ ID NO: 9302 - DNA, 3322 bp, Zea Mays
gcggtttagattctagcctttgaggcagcagtaccgcagcctaaatgccgtcacggcattgttaatgccagactgcacgtaatcaggccttgtaatatccactcctttaattttttttttcatttttttctggtgcgtgaagcatgttgaatcgaggtgaggtttcgttcggttgtatatagatagaacgaagggaattgaggcttaaatctttttctgtttatttttgaatttaatctcatccgatcctttttcaattcacttcttctaaccgaagaagcatgaggtggattcgtgattattgttgtatgtatatctcctgtacaatttgacctgctggctgtgtagtgtgtacacaggaacctcgcaagtcgcattcgcagctgaaggagaaagaggcaccacgccaaaaccaccacagcaagcggataaatatccaatgtcaaaagggttccttttgaacaagcaaccgaaaagatttttcttcgtcgctcgctcaccacccatcccacccccacaggccacaggccacaggccacagacgagacgatccccggtcatcgcctacctccctgtcctctgccgtccttcccttcgccacgtctccaagtatataggaggaggctctccggcaatgcccgctcccccatcatcctaccaatcacggcagccactccccgtcgtcgaccaaaagcactccggtgagctagaaccggcagaagaatagccagcctgccggcgatccgcgcagaccacgccagccgccccacaagtcccagacggcagggattcctaaacataacgcgctattcctattattagccagccgcctctcgattcgcgcggcttaaccgccctcgtgcgcgtgcgcgcgcgcgcgcggtaggaggccacacgttccggaggcgcgcgcccagaccagggccgcccccgcgccatggacgtgctgcggttcgtgcgcgccgccgcggcgccgcagcctgcggtggcgccgccggcgtcggctgcgacggtgccggcgcagcgccagcggctgcgcatgtggccgcgtggcgggggagaccagccgcccccggtcggcgccgcctccacgcgcggcgcggagccgaggagcccgcccgacgaggagcggaaggcggagggggcccagcgggggcagggcaactgggtgctgcagatgctgcgggtgcagccgcggtgggtggatgcggcggacgcggaggccaccggcggcggccaggaaccggacgaggagacggcggctgcggctgcggctggcgctggtggcgtcgaggagtgcgcttcctgcggctgcggggaagacgacgaaggctgcgccgtggggtacggcgacggcgacggcgaggtgttcgaccgcgcgtcgttctcgcggctcctgcggaaggcgtcgctcggggaggctaaagagtattccatgatgtcctacctctgcaacatcgcctacatgatccccagaattcagccaaaatgtcttcggcgatacaatctgcggttcgtgacgtcgtcagtgcaagacaaggccggagttagcaaccctgaccagaagcaggagcgtagcaccaagaaagacgaatctggcgatcaagcatccgaagctgtcgacgacgcggtgccacgacgtgggctagggacgataaaaccgtttggtgcgtaccatgtagtgtcttctgctgcctcttacctgcactcccgggccatgggcgttatgccatttggtcccgggaatggcgtcaaggacgatcatccagcagccgtcacgtcgctcgtgagcggcgcgagcggtgacggattgagcgtggacgaggcttcgttcgtggccacgacgagttcggtgacctccatggtcgcggcgaaggaggagacgcggcaagccgttgcggatgatctcaactcttcgagatcttgcccttgcgagtggttcgtctgtgaggatgatcagaacagcacgatatacttcgtggttcagggctcagaatcaattgcttcttggcaggccaaccttttgttcgaacctgtcaaatttgaggaggtggacgtgctggttcacaggggcatatacgaagccgccaaggggatgtatcaccagatgctaccctacgtgaaggcgcacctgaagagctggggcaaatccgcgcggctgcggttcacggggcactccctcggcgggagcctggcgctgctcgtgaacctgatgctgctggtgcgaggggaggcgcccgcgtcgtcgctgctgcccgtgataacgttcggcgcgccgtgcatcatgtgcggcggcgaccacctgctccgccgcctcgggctgccgcggagccacgtgcagtccgtcacgatgcaccgggacatagtgccccgggtgttctcctgccactaccccgaccatgtcgccaacatcctgaagctcgccaacgggaatttccgcagccacccgtgcctcgcgaaccagaaactcctgtacgcgccgatgggggaggtgctgatcctgcagccggacgagcggctgtccccgcaccaccacctgctcccaccggacagcggcatctaccacctgggcggcggtggcggtggcggtggggcgggaacggcggcgaatgcgggcgaaggctccctgccgcagctccggtccgcgctgtcggccttcttcaactcgccgcacccgctcgagatcctcaaggacggcgccgcgtacgggccccggggctccgtgtaccgggaccacgacgtgaactcgtacctccggtccgtgcgcgccgtggtccgcaaggaggccaggcgcgcgcgggaggccgagcgggagcgctggcgcctgctcctctggtggccgttcggcgtgcacggcgtgtcgtcggcgtcggcggggcggcgcgggggcctcgtggacgccgtcagcgaggctgccaggcgcgcgcatctcttgctggtggtgctgctgcccgcggagctgctcgctctcggcgcgctcctggccgtcattagattcaggtgattagataggctctcacgcgggttcatcaatccgttcgttcgttcgtacgccgtcgacacacacgattcttttgtaccaaacacacacacacacatacacgtctgcaaagcaaatgcgacattgcagctgcgtcgcatgtatgtaaaatgaatgaaatgaaaaaaaaaacacaaactcgaattctttggttccgtccaacggttccctctcgacttcactcactcctcgaactatcaactatattttgagtcccctatgaactatattttgaatcttggaagtctgagtccgtccctgcatagcccccgctaatttgtg

SEQ ID NO: 9303 - DNA, 2492 bp, Zea Mays
gcgaattccgaactgcaagcccactctgtccgcccgacgcgcagaccacgcctgggccgtcaagcctccagatgagatgaccgccctccaacctcgcgtgggcttgggcatgccgacgaggccacctccagacctcctgaatcctgaattcatgatgcctcacgcggcgccagcactgggaggtagccgttgccatgacatcggtcgccatcaggcatcaggggaggaggccggtggccgaagcaaagcaactccgatgtggccggggaggtagcctactgccccctacccccgtagaggcgtagacccgtacccactccgcgagcgagggatggaatctgacgggtggccgcacgcgggaggcaaccgagaggcgcgcagggcacgccgattccttccttgccgccgcggtcgctcggcaatcgcgtgcgcccgctgctttaacctctcggctttgtcttcgctagccgaccaattgttgggccgccgctagcaggagccaggtcgcgccgacagcagcagttggaagaggatccatggggaaggaggcgacgcttgcgttcacgcccacctgggtggtggccatcgtatgcctcgtcatcgtctctatctccctcgccgctgagcgctcactccattacctcggcaagtatctggagtgtaagaagcagaaagcgcttttttcagctctacagagactaaaagaagagctaatgcttctcggattcatttcattcgtcctgagtctctcccaaggttttattgttagcatttgcattccagaaacttctactgacttcatgcttccatgcaatagaggcaactccagagttgcagaagaaggtgctaaaatttgcaacaaaaagggtgatgttcccttgctatcactggaggcattacatcagctgcacattttcatatttgtacttggtttagtccatgttgtgttctgcgctacaacaatatcatttagtggggccaagatgagaaagtggaagcattgggaaacagaaattcacagagaagtacatgagaagtcaagaaaagaatgaaggacaagggtcatcattgagtattgttgtgctacatcgggagcaccaggatgaatttgtccacaagcggacaaagggattttggatgaagctcgctgttgcaagctggataactgcattcttgaagcaatttcaagattcagtgagtaaatcagattatgaagcacttagatcagcttttgtcgtggaacactatcccgagaaaccagatattgatttccacaaatacatgactcgcgctgttgaatatgagtttaaaagagttgttggtatcagctggtatctgtggctttttgtaatcttattcctgctgctgaatataaatggatggcacacatacttctggttggctttcttgcctctatttctgttacttattgttggtgccaaactagagcacattatcactcggttggctcaagaggcagcgatatcattatcaaataatacagaggaagttccgaaaataaagccatgcaaggaccatttctggtttcacaagcctgagctagtccttcatttgatccatttcatcctgttccagaattcgttcgagattagttttttcttctggattctggtatcagaaggtttcggttcgtgtatgatggaacggaagccttatgtcatttccagacttgttatcggggtgatcatcgaagtcatctgcagctatatcacgctgccactatacgccatcgtgacccatatgaccggacagatcaagctgcatggttttggctcccgcgtgcacgagagtgtccatggctggatcggcttgaggaagaaacccttctcgttctggaagattcccggcggtgaccctaacgctgattccggcagggaggccgacgtaacccgcagggtggccaaggagcggtcggggagctcgcgcagcatgccgatggcgccggctgacgagatcgtcaccgtcgacgacgtcgcggtggctgcagctgccgttggccaaggaccataaaattcctagctagcaaacaccagcagggaaggcaggcaggctgccgaggtaccgtgcgcagcgggttgatgggtcggacgctgcggaaaattcctcgtgtcgggagcaggctgggcggccgcgcccgcgcccgcgcgctgtagctctgatcgcgtgttgtaacgtcaacgtcatctcgtgtaacggtacgggcaggacgggacgcgtcgtccccatgcctgctcccgtgctagggccggccgccaggcgttgtggcatgtcacgtgcgacgttgcagcgcgacgctacaacgttgtatgtgggctgtggcacagccagccggcgcgtcattggccctggcccagcatggcctgctgctgctgccttgtgccggccgtaccttgctgtaaaggaaagctgggcgtacataacccattatccatggctcactgcgatctattgcaatgtagcaggcaggtgag

SEQ ID NO: 9304 - DNA, 2093 bp, Zea Mays
attctccacgagaccacgatgcctcttccatcaccgctctctacttctccttcgcctgcaagccagccagcctccattcgcgtggccgccaaaggcgccaaccgccggcgagctatgacaccatcggtctcctgcccggtcaagtgccgcccccacccctgccttgccccgcagccaccagcgccatcaccggagcttctcgccgctcgcggcgccccgatcgccggcgagctgcgggcgtgccggagccctccgtacttgcctctctcgcgctctgccgactccttggaactccgggcggcgtgccgcggcgctccgcctgccagccgagcccgtgctgccgtggcgctgggcggtgacggcccgtccgcggcgctgatagccggcgcacagtcgcgtcacgccatcttccgcgacgagctcgtgcggagagccttcactgccgccgaagcggctcaccgcggccaggtgcgcgcgagcggcgacccgtacctacaacactgcgtggagacagcggcgctgctcgcggagctgggcgccggccctgccgtcgttgctgccggcctgctgcacgacacggtcgacgacgcgggcctgggctacggtttcatctccgagcatttcggtgccggtgtcgccgaccttgtaaaaggggtttcaaatcttagtcatctgagcaaactggctcgtagaaacgatacagccagtagaattgatgaagctgacagattacgtatagtcttccttgcaatggaagatgcaagagctgtgctcattaagcttgctgacaggctacacaacatgaggactctggattctttgtccaagactaaacagcagagcgttgcaaaggaaacgttggagatatttgctcccttggcgaatcagttgggcatcttgaattggaaggaacaacttgaaaacctgtgcttcaagtatctttacccagaaaattttgatgaactgtcaacaaaacttatcgagatctataacatagatatgattgcagctgcaacaagacgacttgaacaagcccttcaggtgagaggactatcctattatgccatatatgggaggcacaagagcatgtacagcatctacagaaaaatggcaaggaagaagctggtcatggataaaatttatgatatacatggggtgcgtgttattctcgagaataaggctgattgttttgccacattagagattatccatcacctatggcctagaattcctggcaagttcaaagattatatcaacagccccaaacccaacaggtatcagtccctgcacacggttgttctcactgaacaaacgctgccactcgagatccaaattcgtacgagggacatgcatttgcaggcggagttcggaattgctgctcattggagatataaggaaggtgaacggagttgctgcacctctgtttctgaaattgttgagtgggtcagatgggttacatggcactgtcaaactctgaacacaggctatccttcatcacttgcatgtgatgcttcatcgaaggaaacgcacactatcccatctcactctgacgcctgtctgttgtcctactcaaaacaatgtgatcacaaagggcccgtacttatgtcagtgcaagaaatcccccaaaattggacgatactggacctactgaaaaggtcttcaaactatgggatgccgttgaggctgaggctgaactgccatgccgtccacaactggaaccaggagctaaaaatgggcgacgtgcttgaactgatcccttcgaccccatgcaaatccagaggtcacacgagggagctccaccagaagtttgatcaccgtctcgccgtttcccagtcctgacagccttagaacaccgtaccttgtaaatacatgacgtgaacccatataaatcatctgaagtttagatttcccctgtgcagacaaaatagagatgaggagtcatcaaaactctgtaaccgtcgtatactcattcaagccaaaacaagacagcatgtaatgtaaatcagtatatacatgatacacatggttttagctcaggaaatgacaatatataccgacgacgatgcgcttacggtttttagtagcaaaaggac

SEQ ID NO: 9305 - DNA, 3488 bp, Zea Mays
gacgcctcggtcgccgtgcccgcgcccaaaccggttaggaaggaaataaaatggaagacgtcctcgtctccatcgccggttgtgtctcctcctatccatttctccagtcgtttctctcccctcgcgctgcccatggccatcccggaggacctagaggggacctcgggcgatggcggggtgacgaatcgcgggagtagagggcggcgaaaaggcgcggcgaaggggcgcgggaggggcaggccgcggagcgccgacagatcctttccgccgccggcgatggctggggtggcggtcggggacagggtgctcagggagaggaggcacacgaccaacgttttctgcgagcgcgacacggatgttgacgatgaggatgatgttgagacagttaggtccaaggactcaaggagtggcgatgttttacagactgcaaaaaagaggaagaagggaggtgcagggaaggtttctgtcacaaaaaggtcgaaaagagagggtgaagaacaaaagaaggcatcaccctccaaggataaagattgtgctgaaactaatggggaagatgttgactggggataatgccctgatgtgccaccagtgccagaggaatgataaagggagggtggtctggtgtaattcatgcagaaataagcgcttctgtgtgccatgcattgaaagatggtatcctaacttgtcagaagacgaatttgctgcaaaatgcccatattgtcgcaagaactgtaattgcaaaggatgccttagaatgagaggggttgaagagcctccaaagaaggaaatttctgaagaaaatcaaatctcttatgcttgcaatgttgtgcgcttgttgcttccctggttgagaaaactgcgacaggagcagatggaggagaagaaattggaggctaaaataaaaggtgttttggtgaatgagatgaagttggaacaagctgaatataatctagatgagcgtgtctactgcaataattgcaaaacttctatagttgattttcacagaagctgcaagtactgcttttatgatctgtgccttgactgctgtgtggagatccgcagaggtgagattcctggaggagaagagataatgagagtaaagcctgaagatagaggccgagcatatctttttggtactactaactcaaaggatgggagtaaaaggttctccatgaggaggcacagctcatccctggagaatgagccttccaatgtagtaggttctagtgagggggcaaataactctctggagctgtggaaagcagaaagtgatggtagcataccttgcccaccaaaggagctaggaggctgtggcggttcgattttggatctcaagtgtttttttccagaaaagatgctttcaaatttagaagaacgagctgacagaattatgaggagcgaagtatttgcaaaagcagtagccaaaagaagtgaccagtgcccttgttatgaccattcaggaaacataagaactcaggacgtgcgagagactgcaaatacgaaaggctcaagtgataaccatctctactgcccagttgccactgctatcaaggaggatgacttggcgcactttcagatgcactggacaaaaggcgaaccagttattgtttctgatgttctgcatttgacttctggtctaagttgggaaccattagttatgtggcgggcattgcgagagaaaaagactaatggtgacgtagaagatgagcactttgctgtcagggcattagattgccttgattggtgtgagactgctcacagctctgttgtcaacagaacgcatcacatgacacactggcctgagatgcttaagctaaaggactggccgccatctagttcttttgatcagagattgcctcgccatggtgctgagtttatcagtgcattgccatttcctgagtacactgatcctcgatatggtccgctgaatcttacagtcaagctacctgatggtgcattgaagccagatcttggaccaaaaacttacatcgcttatggattttaccaagagttaggcaggggtgattctgtgaccaagcttcactgtgacatgtctgatgcggtaaatatattgacacacacagcacaagtgccctatgcgcgttatcaacttgagaagatagaggaaaccagaaagaaaatgaaagaacaagatcttcaggaactttatggtgtttcagaactaaacctatcatcaccttttactgattccaggaatataagtgctgatgaaatgtcaaagacctcatgtaactatggtttggacgtcaatgatgtaccacctgttaataatgaatctgaggtacaaagtggggcaggccagtgttcagattacattgacaaggatagaagttatgctgggatgcataacggggagagaaccggtggtgccttatgggatattttccgaagagaagattctgacaagatacaagattatcttaggaaacatgccacggaattccggcacatcttttgcaatcctgtgaagcaggttattcacccaattcacgatcagactttctacttaaccgaggagcataagagaaagctcaaggaagaatatggtgttgaaccctggacgtttgagcagaagcttggtgaagcggttttcattcctgctggatgtcctcaccaagtgaggaacttgaagtcttgcattaaggttgcgatggactttgtctccccagaaagcgtcaacgagtgcatgaaactgactggagagtttaggcggcttccacctgatcacagggctaaagaggataagctggagatcaagaagattgctcttcatgctctgaaccaagtagtaaatttcttggatccttcctcggagtggtcgaagagttggtttgcccaactcaagaacaaaaaaaaggctggagctgaagaacaggagaagcctaaaaggaagcgtggccgcccatgtcgcaagtccaacgatgaagctgctggcgataggcacagaaagaagggcggccgccaaagaggtcggaagaggggatacggcaagtccaaagatggcgctggcgctgttgatgtgaagcctcctaaaaggcagcgcaatctcctgaaaggctctggcaatcgtgtaggtggttgattgtttcactgctgactgggaagatggaaggcgtaagggctgtaccgacccaaccttgacgtggttattttggtaccaggttgtaagtgtagactctagattgtagaatagaccaggcatttcgtcacccctgggcgccattatggcgtcttgcttttgttcatatgtggcgattgccggttgacaccgttttggaagaataatatgctagatgctcgttgtaccagactcttcatgtagcgggctatggtgaattgctgttcagcatgtctgatgctgatgttggtaattgacctgaatagatgtggtcatttgaactctctggattctgattttacatatccaatccattggctgaggctgagcattcttagttgaaaaacga

SEQ ID NO: 9306 - DNA, 2563 bp, Zea Mays
gccggccatcgcatagcttcaatccatcggggggttcctttcagttaataagatcgatttgaaaagcgcacccggcaacctgctccgctcctgcgctgtttaggttccggcctgtgtcaaagcgtgcatctcacgcgaggcgcaccaaggccggagccctggccacctagggtcacctccctgcgatcgggccgcggcgacggggacggccgcgatgggcttcgagcgtgtggagctgcgttgccccagggacctggacccgcgcccgagctggacgctcggcgacgtgctcgccgagctcgacgcgctagacgccacccgccgcgctgcgccgcccacgcccctgaagcagccgccccattgggttaacggcgtcggtacgagggagaaggcatttgtgatgcgggttgatggctacgacgaagacgacttagaagatgaagacgatggtacaagtgctgggaagtcccgggctctcatggctaaaggagcaaggttctcgtgtaacgatctccaatcaagtgattcagaggatgaattagatggccaagttaccccatacaacttaatggagaaaagggacctagcgaagagcattcttcttgagcttgaaagcgagcatcatctaaaagttcaagaagaagttagaagtaagctagctttgttggaggtatgccaccaaaatgaaatccatagaaccatttctgcatttgcccgacttcagaaatatgcagaatcaagaaaagagatcgacagaagacttgatgtacacttccagagaagaatggcagaagtactcgataagcacttatctatggtccaaagggatcatgaacaaaaatcccagattgttgaacgtcgaataagagatgatgcagctcttgaagaagctaaaagaaaagagcaagctgtcaaggaagaaaagttaaggcaggaaagagcccagcaagaagcagaggctaggcagaaggaagctgcaaagttagcagctgaagcgcgaaaaacagcatttgaggctgctaaaaaggaagcggcagaaaagcaggctgctaaattgagagatgcagcagcaacttcccaatctagtccagatttgcagaataatattgcagacatcaaagtttttggcgttaaatatgcattagaagcagagtcacggaggtatgcattagtacagaatcaagtgccagaaaacattcatcacaacaaggaattcagcaaatatgaccgacaaattgccaaatccataagtaaacttatgccaactactgatagtgtcagagcaagggctagtgagcttattaaagctttagatggacaggattgtccccgtccaatctcttgttgtctatttgcaaacaagattatttctattgtcaagagtagaaatacaaaggacagaaccttcggaaatttggcctttgcgtgtggatatgtcatgctattagtcacaaatcaggtaccagatgcaatggactatcttttagctgagttcaacagagtttgcatatacacggttccaaagcatttgcatgctttaaatgtaagtctgcatggtatgactctgtaatatatttggaatttgtttatttctgactcttatatgggatgccatgagaaaacgccctaatagacacagcaatgctcagaattatttataatgcatttttaacaattgtatgcagcagatttgtggaccaaaatgctgtgacatactgtcacccactgttttatataaatgtatcgagctttggatttttttctcacgatatctgtaattttataggcagaagcacgaaatagagattattacagactgataggttaccaggaagaaaatggacaattcgagagcactgaaagttatctaacatatgtcgttgcatatgtcaaattgtacgcggcaatgattcaaacagaaatcaagggtgtacgccatcctcatggcttagctgagggatggaaatggctcgccatgttcctcaattctcttccagctactacagccactgcttgtgcccttcacgccttcctcaagatggctggttttgcacttcacaagaaatatggatcgcagttcatgaaaatcctatatgtgatttcacggtactttttaccggctttgaaggaacaaggcaacaagatgcaggctgaggctgtcaacaatctacagaattatctgaacgacaagatctacctggaggaaccagaagggcagtacctcgtccagcaattactatcgaaagagttgttcatgtaaagttcaaaacaccagatcgtgtgattgactctgaagggcgcacctcgtataagctactactatcgaaagagctgttcgtgtttcagaaacgcaagcgagccttgtagagatgacctgcaaggaaatcagtaccaaatctccccaacatttgtagtcttaaccgtagaggagatgaccctgcatgaaatatattgaatattatttgtacgtgctattaccttagtgtttgaaattattgattatttatttttaactcttcatttatcaaattggcataatttaattcacatgtatatttacgat

SEQ ID NO: 9307 - DNA, 1537 bp, Zea Mays
atggcctggtcctggacgcggtcctttctcacatgggctacagtgccgctgtgtatgggtgaggcagccaggcaggggttcaagggttttctcgatttgtgtgagttctttctagagttgatgaaggtgccgagggttgaatctaagcttcagatattcgctttcaagattcagtttcagtctcagattagagatgttagaaagaatttgcagactgtgtcatctgcttgtgaggagctcagaagctctgagaagttgaaggttatcatgaagaacattttgttaattgggaatacattaaatcaaggcacaccaagaggccaagctgttggttttcgcttggacagcctcctaaaacttatagacacccgtgccactagtggcagaatgacattaatgcactttctatgtaagagaagtcaccggaagtaatggattttcatgaggaacttgtcaacttggaagcttcttcaaagttgcaactgaaagcattggcggacgagcagctggcagtcgtaaaggggctggagaaagttgaacaggagctaactgcttcagaaagtgatggtccagtttctgatgttttccgtaagactttaaaggagttcattgattgttccagtgctgatgtacgctccctatcagcattctattctgaagtaggtaaaagcgcagatggacttgctgtttattttggagaagaccctgcaaaatttccttttgagcaagttgctacaacccttctgacctttgtggggttgttccggaaagctcatgacgagaacctcaagcaaattgaggctgaaaagaagaaagcccagaaagaagctgaaaaggaggcaaaccaggacaaaactcctgtaaaatcaaaaaatgggaatgcagataaatcgccaagatcaccatcaaccttctaatgatgtacggcagaacttcacatggtcatcatttcttcctcaacgaatgcccgcctttgctggcctgggcacaatttcgcaagcatgaacagtatacaaatccataaattccttgtggacaaatgcttacaagacaagatggttttggttcaacatctatgcatgtatctcatgacactgtacaaagctcacaccccacacaaaaaactaggttcttctgtacaaaatccatactagatccccccccttctgtctatactagcagcaggagtaggtcaatgtttgtaaagtacaaataggagtgtaggtagtgatcagtagcaggtcagaagcaggattagtgctaccacaggcaggttcctaagcagataaagatgagtatcatagccatgtcctttgactccttgactagagcaattgtgagcttcagtgtttcgcctcattattgtcaagagaaaaaagtggccacctgttgcttatttgcattgtgttgcattctcctccaacaatcgatgtggtttttcatggcacaagtttctggcgtagaaaatttgaaaactgttccactaggactgcaaccatgtgactccatacatggggatcatctcaacatctgatga

SEQ ID NO: 9308 - DNA, 1623 bp, Zea Mays
gtctatggcctggtcctggacgcggtcctttctcacatgggctacagtgccgctgtgtatgggtgaggcagccaggcaggggttcaagggttttctcgatttgtgtgagttctttctagagttgatgaaggtgccgagggttgaatctaagcttcagatattcgctttcaagattcagtttcagtctcagattagagatgttagaaagaatttgcagactgtgtcatctgcttgtgaggagctcagaagctctgagaagttgaaggttatcatgaagaacattttgttaattgggaatacattaaatcaaggcacaccaagaggccaagctgttggttttcgcttggacagcctcctaaaacttatagacacccgtgccactagtggcagaatgacattaatgcactttctattcccttgcagagaagtcaccggaagtaatggattttcatgaggaacttgtcaacttggaagcttcttcaaaggtaatttgcttctctgactaatatggataacctcaactgacagtatttgttaagtattctggagttactgtaaacagttgcaactgaaagcattggcggacgagcagctggcagtcgtaaaggggctggagaaagttgaacaggagctaactgcttcagaaagtgatggtccagtttctgatgttttccgtaagactttaaaggagttcattgattgttccagtgctgatgtacgctccctatcagcattctattctgaagtaggtaaaagcgcagatggacttgctgtttattttggagaagaccctgcaaaatttccttttgagcaagttgctacaacccttctgacctttgtggggttgttccggaaagctcatgacgagaacctcaagcaaattgaggctgaaaagaagaaagcccagaaagaagctgaaaaggaggcaaaccaggacaaaactcctgtaaaatcaaaaaatgggaatgcagataaatcgccaagatcaccatcaaccttctaatgatgtacggcagaacttcacatggtcatcatttcttcctcaacgaatgcccgcctttgctggcctgggcacaatttcgcaagcatgaacagtatacaaatccataaattccttgtggacaaatgcttacaagacaagatggttttggttcaacatctatgcatgtatctcatgacactgtacaaagctcacaccccacacaaaaaactaggttcttctgtacaaaatccatactagatccccccccttctgtctatactagcagcaggagtaggtcaatgtttgtaaagtacaaataggagtgtaggtagtgatcagtagcaggtcagaagcaggattagtgctaccacaggcaggttcctaagcagataaagatgagtatcatagccatgtcctttgactccttgactagagcaattgtgagcttcagtgtttcgcctcattattgtcaagagaaaaaagtggccacctgttgcttatttgcattgtgttgcattctcctccaacaatcgatgtggtttttcatggcacaagtttctggcgtagaaaatttgaaaactgttccactaggactgcaaccatgtgactccatacatggggatcatctcaacatctgatga

SEQ ID NO: 9309 - DNA, 4514 bp, Zea Mays
ctcccaaaacattacaacatggtgaaccaccactgccgctgccaccttttcctccagtaacaccaccaccagaattaccagtgccaactatatgcagtgatagtggatcagttccactggtacactcaaatccatcttcagattgtccatataaagaagcagcaatgctaccagaacacaaatctgctgttccacctactctcgaaggacatgaagcaagtgaagttcaattgctgcaatctgatattactgttgaattatcttcatcaaaacattctgagtatacagttcagcatgtgtttggaagcactgaagatacaatttcaaatatctcatcctctatacctgcagcacctccgtacccaatatttcatattgtaacatataattcctcaggttcaatatctgcagagcaagtaaattgcgagcaggctttagatcaaacagcattacccattcatttgaggccattcaaggtggagatatcacaaagtgagacaaccaatggactcttggcctctaaaaccgatgataaagaacatggaggccttccaatcccatcattgccacaaaatttgccccagcctagagaacatatgaaacctccatctccacctcctcctccaccacgaccaccaccttgtcatgcaacacttgtaccttctttgtgtttatcttcaaatccaccttctctaagagaactttatgaaaatcaaccttctacttcccctccaccttttcctagagaatcatttgttgctctacctccacctccagctccacaccctaatcatctatctcttcctggaaaacatattaagccatctccacctcctccacctcctccacctagagaaaatgaagcattttgtccttcgactctactttcacctacaagacatgttatacctcctccaccaactttacatcatattgcacccacatctccatgcttgtatcaaccttctttccctattgatatagaaatccaacctaccttttcagaggatattgtaatagtttcaccttcacattcaacggaggttaatatagttccattgccaccaccacctcctcgtagaatgagtgaaattttgtctcaacctcttgagggtggacaatcagcactgccagcttctcttcttgaagttactaaagaaatcccacctcctcctccccttccccctaaagtacaaaggagatctccattgtctactctttgtggtggaattgtgaatattccattacctccacctccacctccacctccacttcctggaggacatggagaagttccactatcaactcctaaaggatctggggccatcccacctccaccaccctttactaaagggctaggaggaattacattggcaattcaatttcatagtggagacttttcactcctcgaacctaccagagaatcagaaagtacttcacgcttgccaccaccaccactatcttccaatggacatataggagatccaccaccgccgccgccaccaccaccaactatgagtgtatttgtagaggcttccatcccgctgccacctcaaacaggatgcagagaggctccaccaccaccgccaccatctcctggaggacatgtagagtttccaccgccacctccaggggaatgtgcattagctctgccacatcccaaagcaagtgtaggggctccaccaccaccgcctcctcctggaggacatgtagagtctccaccaccaccgccacctccaggggaatgtgcattagctctgccacatcccaaagcaagtgtaggggctccaccaccaccgcctcctcctggaggacatgtagagtctccaccaccaccgccacctccaggggaatgtgcattagctctgccacatcccagagcaagtgtaggggctccaccaccaccgcctcctcctggaggacatgtagagtctccaccgccaccgccacctccaggggaatgtgcattagctctgccacatcccaaagcaagtgtaggggctccaccaccaccgcctcctcctggaggacatgtagagtctccaccgccacctccacctccaggggaatgtgcattagctctgccacatcccaaagcaagtgtaggggctccaccaccaccgccacctcccggaggatatgtaggagctccaccgccaccgccacctccaggggaatgtgcattagctctgccacatcccaaagcaagtgtaggggctccaccaccaccgccacctcccggaggatatgtaggagctccatcgccaccgccacctcctggaggatacataggagctccaccaccgcttccatatggaggaattggaggtgttcctcctcctccaccaccctttggaggactaggaggaactccaccgcctccacctccagcagggtttcgaggtggagctccagcacctcctcctcctcctggaggtcatggaggtccgccacctcctcctcctagaggacatggaggagtaggtggtccccctccccctcctggtgcaccatctcctccaatgcctcctggaatgcctggtggccctcctcctcctccaggtggaagaggaatgcctgctccacctggcggaagaggacatggccttgctcgctcgttaggcccgacattacaaagtgcagtacgaagatcatctctaaaaccactacattgggtcaaagtaacaagggcaatgcaaggaagcttgtgggcagagctacaaaaacaagtggacgctaatagtcgtgctgaattcgatgtaaatgaattggaatctctatttaccattgctccaaagacaaaagctggccccaaatcagaaggccgtggaaaatctcttgggacaaaatctgataaagttcaactgattgatctaagacgggccaataacacagagatcatgttgacaaaaatcaaaatgccgctccctgatatgatgagtgctgctctagctttggatgattcagttctggatgctgatcaaattgaaaatctcattaaattttgcccaacaaaagaggagatggaacttctaaagtggggacaaggaagctcttggaaagtgtgagcatttctttctagagttgatgaaggtgccgagggttgaatctaagcttcagatattcgctttcaagattcagtttcagtctcagattagagatgttagaaagaatttgcagactgtgtcatctgcttgtgaggagctcagaagctctgagaagttgaaggttatcatgaagaacattttgttaattgggaatacattaaatcaaggcacaccaagaggccaagctgttggttttcgcttggacagcctcctaaaacttatagacacccgtgccactagtggcagaatgacattaatgcactttctatgtaagtcccttgcagagaagtcaccggaagtaatggattttcatgaggaacttgtcaacttggaagcttcttcaaagttgcaactgaaagcattggcggacgagcagctggcagtcgtaaaggggctggagaaagttgaacaggagctaactgcttcagaaagtgatggtccagtttctgatgttttccgtaagactttaaaggagttcattgattgttccagtgctgatgtacgctccctatcagcattctattctgaagtaggtaaaagcgcagatggacttgctgtttattttggagaagaccctgcaaaatttccttttgagcaagttgctacaacccttctgacctttgtggggttgttccggaaagctcatgacgagaacctcaagcaaattgaggctgaaaagaagaaagcccagaaagaagctgaaaaggaggcaaaccaggacaaaactcctgtaaaatcaaaaaatgggaatgcagataaatcgccaagatcaccatcaaccttctaatgatgtacggcagaacttcacatggtcatcatttcttcctcaacgaatgcccgcctttgctggcctgggcacaatttcgcaagcatgaacagtatacaaatccataaattccttgtggacaaatgcttacaagacaagatggttttggttcaacatctatgcatgtatctcatgacactgtacaaagctcacaccccacacaaaaaactaggttcttctgtacaaaatccatactagatccccccccttctgtctatactagcagcaggagtaggtcaatgtttgtaaagtacaaataggagtgtaggtagtgatcagtagcaggtcagaagcaggattagtgctaccacaggcaggttcctaagcagataaagatgagtatcatagccatgtcctttgactccttgactagagcaattgtgagcttcagtgtttcgcctcattattgtcaagagaaaaaagtggccacctgttgcttatttgcattgtgttgcattctcctccaacaatcgatgtggtttttcatggcacaagtttctggcgtagaaaatttgaaaactgttccactaggactgcaaccatgtgactccatacatggggatcatctcaacatctgatga

SEQ ID NO: 9310 - DNA, 4517 bp, Zea Mays
ctcccaaaacattacaacatggtgaaccaccactgccgctgccaccttttcctccagtaacaccaccaccagaattaccagtgccaactatatgcagtgatagtggatcagttccactggtacactcaaatccatcttcagattgtccatataaagaagcagcaatgctaccagaacacaaatctgctgttccacctactctcgaaggacatgaagcaagtgaagttcaattgctgcaatctgatattactgttgaattatcttcatcaaaacattctgagtatacagttcagcatgtgtttggaagcactgaagatacaatttcaaatatctcatcctctatacctgcagcacctccgtacccaatatttcatattgtaacatataattcctcaggttcaatatctgcagagcaagtaaattgcgagcaggctttagatcaaacagcattacccattcatttgaggccattcaaggtggagatatcacaaagtgagacaaccaatggactcttggcctctaaaaccgatgataaagaacatggaggccttccaatcccatcattgccacaaaatttgccccagcctagagaacatatgaaacctccatctccacctcctcctccaccacgaccaccaccttgtcatgcaacacttgtaccttctttgtgtttatcttcaaatccaccttctctaagagaactttatgaaaatcaaccttctacttcccctccaccttttcctagagaatcatttgttgctctacctccacctccagctccacaccctaatcatctatctcttcctggaaaacatattaagccatctccacctcctccacctcctccacctagagaaaatgaagcattttgtccttcgactctactttcacctacaagacatgttatacctcctccaccaactttacatcatattgcacccacatctccatgcttgtatcaaccttctttccctattgatatagaaatccaacctaccttttcagaggatattgtaatagtttcaccttcacattcaacggaggttaatatagttccattgccaccaccacctcctcgtagaatgagtgaaattttgtctcaacctcttgagggtggacaatcagcactgccagcttctcttcttgaagttactaaagaaatcccacctcctcctccccttccccctaaagtacaaaggagatctccattgtctactctttgtggtggaattgtgaatattccattacctccacctccacctccacctccacttcctggaggacatggagaagttccactatcaactcctaaaggatctggggccatcccacctccaccaccctttactaaagggctaggaggaattacattggcaattcaatttcatagtggagacttttcactcctcgaacctaccagagaatcagaaagtacttcacgcttgccaccaccaccactatcttccaatggacatataggagatccaccaccgccgccgccaccaccaccaactatgagtgtatttgtagaggcttccatcccgctgccacctcaaacaggatgcagagaggctccaccaccaccgccaccatctcctggaggacatgtagagtttccaccgccacctccaggggaatgtgcattagctctgccacatcccaaagcaagtgtaggggctccaccaccaccgcctcctcctggaggacatgtagagtctccaccaccaccgccacctccaggggaatgtgcattagctctgccacatcccaaagcaagtgtaggggctccaccaccaccgcctcctcctggaggacatgtagagtctccaccaccaccgccacctccaggggaatgtgcattagctctgccacatcccagagcaagtgtaggggctccaccaccaccgcctcctcctggaggacatgtagagtctccaccgccaccgccacctccaggggaatgtgcattagctctgccacatcccaaagcaagtgtaggggctccaccaccaccgcctcctcctggaggacatgtagagtctccaccgccacctccacctccaggggaatgtgcattagctctgccacatcccaaagcaagtgtaggggctccaccaccaccgccacctcccggaggatatgtaggagctccaccgccaccgccacctccaggggaatgtgcattagctctgccacatcccaaagcaagtgtaggggctccaccaccaccgccacctcccggaggatatgtaggagctccatcgccaccgccacctcctggaggatacataggagctccaccaccgcttccatatggaggaattggaggtgttcctcctcctccaccaccctttggaggactaggaggaactccaccgcctccacctccagcagggtttcgaggtggagctccagcacctcctcctcctcctggaggtcatggaggtccgccacctcctcctcctagaggacatggaggagtaggtggtccccctccccctcctggtgcaccatctcctccaatgcctcctggaatgcctggtggccctcctcctcctccaggtggaagaggaatgcctgctccacctggcggaagaggacatggccttgctcgctcgttaggcccgacattacaaagtgcagtacgaagatcatctctaaaaccactacattgggtcaaagtaacaagggcaatgcaaggaagcttgtgggcagagctacaaaaacaagtggacgctaatagtcgtgctgaattcgatgtaaatgaattggaatctctatttaccattgctccaaagacaaaagctggccccaaatcagaaggccgtggaaaatctcttgggacaaaatctgataaagttcaactgattgatctaagacgggccaataacacagagatcatgttgacaaaaatcaaaatgccgctccctgatatgatgagtgctgctctagctttggatgattcagttctggatgctgatcaaattgaaaatctcattaaattttgcccaacaaaagaggagatggaacttctaaagaactacagtggggacaaggaagctcttggaaagtgtgagcatttctttctagagttgatgaaggtgccgagggttgaatctaagcttcagatattcgctttcaagattcagtttcagtctcagattagagatgttagaaagaatttgcagactgtgtcatctgcttgtgaggagctcagaagctctgagaagttgaaggttatcatgaagaacattttgttaattgggaatacattaaatcaaggcacaccaagaggccaagctgttggttttcgcttggacagcctcctaaaacttatagacacccgtgccactagtggcagaatgacattaatgcactttctattcccttgcagagaagtcaccggaagtaatggattttcatgaggaacttgtcaacttggaagcttcttcaaagttgcaactgaaagcattggcggacgagcagctggcagtcgtaaaggggctggagaaagttgaacaggagctaactgcttcagaaagtgatggtccagtttctgatgttttccgtaagactttaaaggagttcattgattgttccagtgctgatgtacgctccctatcagcattctattctgaagtaggtaaaagcgcagatggacttgctgtttattttggagaagaccctgcaaaatttccttttgagcaagttgctacaacccttctgacctttgtggggttgttccggaaagctcatgacgagaacctcaagcaaattgaggctgaaaagaagaaagcccagaaagaagctgaaaaggaggcaaaccaggacaaaactcctgtaaaatcaaaaaatgggaatgcagataaatcgccaagatcaccatcaaccttctaatgatgtacggcagaacttcacatggtcatcatttcttcctcaacgaatgcccgcctttgctggcctgggcacaatttcgcaagcatgaacagtatacaaatccataaattccttgtggacaaatgcttacaagacaagatggttttggttcaacatctatgcatgtatctcatgacactgtacaaagctcacaccccacacaaaaaactaggttcttctgtacaaaatccatactagatccccccccttctgtctatactagcagcaggagtaggtcaatgtttgtaaagtacaaataggagtgtaggtagtgatcagtagcaggtcagaagcaggattagtgctaccacaggcaggttcctaagcagataaagatgagtatcatagccatgtcctttgactccttgactagagcaattgtgagcttcagtgtttcgcctcattattgtcaagagaaaaaagtggccacctgttgcttatttgcattgtgttgcattctcctccaacaatcgatgtggtttttcatggcacaagtttctggcgtagaaaatttgaaaactgttccactaggactgcaaccatgtgactccatacatggggatcatctcaacatctgatga

SEQ ID NO: 9311 - DNA, 3174 bp, Zea Mays
gcggcttcccacagtctcttttttttttccacccgtcttttctctttcctccgtcttctcccacttgttgtagggcctgggtgggaggagtcaggacaggaggcagcacagccattataatagcacgccatacgccaaaagctgcagtggagccgagcagatgtgggaaggactgattcagaaggctaaagatggaggcttggatgtgattcagacctatgtcttttggaacggacatgagcctacgcctggaaattactatttcgaagagaggtacgatttggtcaggttcgtaaagacggtccagaaggccggcctgtttgtacatctccgcatcggcccctacatctgcggcgagtggaacttcggtggcttcccagtttggttgaagtatgtaccaggcatcagcttcaggacagacaacgaacctttcaagacggcaatgcagggtttcactgagaaaattgttggaatgatgaagagcgaaaacctctttgcatcccaaggtggcccaattatcctctctcagattgagaatgagtatgggccagaaggcaaggagtttggtgccgcaggtcaggcatatatcaactgggcagcaaagatggcagtgggactggacactggtgtgccgtgggtgatgtgcaaggaggaggatgcacctgatccagtgatcaatgcgtgtaatggtttctactgtgatgcattttctcctaacaaaccttacaagcccacaatgtggactgaagcttggagtggctggttcacagaatttggtgggaccatccgccaacgaccggttgaagatctcgcatttgctgttgctcgatttgtacaaaagggtggctcttttatcaattactacatgtatcatggaggaacaaattttggacgcactgctgggggtcccttcatcacaacaagctatgattatgatgctccaattgatgaatatggacttattagagaaccaaagcacagtcatcttaaagaactccacagagctgttaagttatgtgaacaggctttggtttctgttgaccccacaattactacccttggaactatgcaagaggcccatgtcttccgatctccatctggttgtgcagctttccttgcaaactacaattctaactcccatgcaaaagttgtgttcaacaatgagcaatacagcctcccaccttggtcaattagcatccttcctgattgcaagaatgtagtttttaacagtgccacagttggtgttcagacatctcagatgcaaatgtggggagatggtgccacatcgatgatgtgggagaggtacgatgaggaggttgattctctggcagctgctccattgctcaccacaactggtttgcttgagcagcttaacgtcaccagagacagcagtgattatctgtggtacattaccagtgttgacataagcccatctgaaaactttctacaaggtggtggcaagcctccgtctctgagtgttcagtctgctggtcacgccttgcatgtctttgtcaacggacaacttcaaggttcttcgtatggtaccagggaggatcgaagaattaaatataatggcaatgttaaccttcgagctggtactaacaaaatcgcactactgagtgttgcttgcggattgccgaatgttggagtgcattatgagacgtggaacaccggcgtcggtggtcctgtcgtgcttcatggattgaatgaaggttcgcgagaccttacttggcagacctggtcctatcaggttggcctgaaaggcgagcagatgaatctgaactccgtagaaggctcaggctcagttgaatggatgcaagggtcactgatagctcagaagcaacagccgttggcctggtataaggcttacttcgagactcccagcggggacgagccattggctttggatatgggcagcatgggcaagggacaggtctggataaacggacaaagcattggacgctactggacagcgtatgcagacggggactgcaaagggtgcagctacaccgggaccttccgggcacccaagtgccaagcaggctgcggccagcccacccagcgttggtaccatgtgccaaggtcctggctgcagcccagcagaaacctactggtagtcttggaggaactgggtggtggggactcgtcgaagatcgccctagccaagaggtcggtctcgagcgtctgtgccgacgtgtccgaggaccatccgaacatcaagaagtggcagatcgagagctacggcgagcgcgagcaccgcagggccaaggtgcacctgaggtgcgcgcacgggcagtccatctccgcgatcagattcgcgagcttcgggacgcctgtgggcacctgcggcaacttccagcagggaggctgccactcggctagctctcacgctgtgctagagaagagatgcattgggctccagagatgcgtcgtcgccatctcccccgacaacttcggaggagacccctgcccgagcgtgacgaagagggtggcggtcgaggcggtgtgctctcccgccgcttaggcttagcctgcccgcccgcccctacttctccgactcaccgagcaacggatttgaaggccgaaaccgatgtgtgtggagagtggaactgtaagtatcgacttgcattggtcggagggaggtttagcattcgtccgtctgattccggattaggattggtgctctgctacgtctccatgaactgttcaaagcggccagctgggtccagggatggagctgtagagagagtaggagtagaagactgatcatgcgttcttttgctgttgtgtgttagtagtagctgtgtacctacccgtgacacatctcgtttttcttgaaacggaggaagacgcaggtgaagcgtgcatcgtgcctttgttgttgcaattgtgttgtgtgtggtgggggaggaaaaaaaaagaacaggctttgatgttctcagaagctcaagttcagatctgatagtgcatggaaaatcatgaaccctgaggaatcgattttcgcactctgatttgtaatgctgtactgtaattagacagacgcgtggcacgtggaatcactgctggcaaacacaaacaagaaggggtggccgacgcacgcgacaaccgtgctcgcaataacagagcgaggagtcctttttgacgatgtgccacccacctgaccttgaccctgac

SEQ ID NO: 9312 - DNA, 1932 bp, Zea Mays
cggctacacacctccccagtcaacacagctcagctcggctcggctagcgagctcctcttatctacacagtccccgacgcccgcccgcccgcaccgctgcgactgcgagcgacgcaccgacccccttcgctggtccctgcctggttctggctgccttcttccccctcccgtccgatcggtttcaccattcacggattcacccgtctgcgcgctccaaccgccgcagttcgtactggcgcggtggacagggagctagctaggcggggttgattgcagttggggaggcgggagtgtgtgtgtgatgtacggcgcgccggtgcccaaggacctcaacctaccagcagccctgccgcagccgaccagggccggtgcgaggacgccaccgcagcagcagcagcagatgagctccgcggggctgctgcgctacaggtcggcgccgagcacgctgctcggcgaggtgatgtgcggggatcaggacttccccgcgacggatggcggcggagggcacggaccaccggaccacgccgccacggacaacgtcctcgcgctctttctcgccgggcaccactcagaggcccgggactgcaagcctccccgccccgccgcggccgctcacttcatggacgaagctgccgcctcgcaacagcagcagctcatgtaccagtcgcagcagcagcagcagatggccgccatggaggggctgtaccacaacgtcagctccggtggcacggagcacggtgcgggcgttggcgctggtaataacagcctgatccgccagagcagctcccccgccggcttcctcaccaacgggtacggcggcatgctccgtgcgggcatgggcatggccggcggcttcaggaacggcgtcagcgacgcgcggctcaaggggcagctgagcttcccgtcccggcaggggtcggtgatgtcgcagatctcggaggtgggcagcgaggagctcgacggcggaggcggcggcagccccgaggcggccggcagcaacgccagcggcgcgccgcgcggctacgtcggcatcccggggtacccgatgggcggcggcacgtccggcgcctggtcggacgagccgtcgccgtcgccgacgtccggcgcgaagcgccgcccccgcgactccggtcccgcgccgcagaacgtgcagcagcaaccgctggcgccgcagctcagcctgcccagcggcggcaagccggcctcggcggagatggcggcgatcgagaagttcctgcagttccaggacgccgtcccctgcaagatccgcgccaagcgcgggtgaggaggacgaagatcagcgagcggatacggaagctgcaggagctcgtgcccaacatggaaaagcaaaccaacactgccgacatgctggatctggctgtggactacatcaaggatcttcagaagcaggtcaaggtgctgaacgacggccgcgccaactgcacctgctccggcggcggcaagctgcaggacccgttcaccagttagaaggagcagcagccggcgcgcgcgtagcagtgcgcggccatgcatggcccgccgcaaggccggcctgactgacgcctccgtgccggccggcggctaagctcgcttcgagcgctcctcctcgattggagtaagagtcgtcgaagtatagtagtatcagtgtacgtgttcggctttacatagttaactgaatgagtagtacgtagtctgttatacatgcaagttcattagcaggcaggccccacgtacgtataccagtgacacagctgcgtcagttatctgtggctcttgcagcatgtgtgtctctgtcatcgtttgcacttactgctcggatcctacgcgacacgtacatgcatatgtacgcatgcatgcacacgcacctgatccaatccgactggatgcattgcgtctgttgtgtctgcctgccggctggctggctgcgtgcgtg

SEQ ID NO: 9313 - DNA, 4585 bp, Zea Mays
cctccgaaaggccttaaccccaaacgaaaccaccctccgcgacaaagccgactactataggctgtcgtagccaacaagcgcgacatcctccgcccccacctcgccgccggcgatggagccgccttcgcctccggcgacccactccgcggccgtccgtgtcctctcccgcactcctccgccgacctccccgaacccctcctccacgggcccggcggccccgtcgcccgcctcccgcgacggggtcgtcgccgtcggcttcgtgggcgccgcggggaccgcccgcctcgcggaccggatcctcgacgcccacgtcttctctcccggtggctcggcggggagcctcgcgggaagggtaaggtaccaccgcgacgccggcaagaggatggtgttccttcacctcacgccgccgccgcccgcgccgctcgaggcggtggcaggatgctgcgatgacggcgaactaccggagatgctcttcatgttctctgtctgccacgtaattatatttctgcaacaaggcttcagatttaacacacaaaccttaaagaagttccgactgctgcaatcttcaaagcatgctctcgctccatttgtcaagccattggtggcagctgcaatgcctgccagaactgttgcctctgacaccccaacaagagcaacccacagggcttcttccgtctcccctccaacacgccgaggaggtcacgctgggcgtcagtcctcggctatctcacttatgtctggaaccagttcaactccttctgtcttgccaggccaatgcattcctgtattgctctttgtctttgaggatgatgcggttgatgtttcaagtgctgcagcaagtcccgatgatataggtgatgcatcttcatcaaatcagggttctacccctgatggactaccaaaacagagcttagcttcaaaaagttctggttcagtaattatgctttcccgggcagcaaacaaatctgagggcagttcaggcaaaaaactgcattcgtcactggagggacagatccgtgtcttgatcaagaagtgcagggtgcttgcaggcatggagcctggacatattggcccaaggggcgtaagtaacatgagtcatcatttacccctgttctcactcgatacctcgagggtagttgcactgttggaacggtatattaataagaaacaggaaccactggacaccattgcaggactatttgaagattctttgtgctccaaatcgccattggatattctttcgctcgaaaacaactaccatccaacaaaccatgatgactttcagttgatcaaggattttatatttcggcagtctgatgcgctgagagggaaagggggatattcaagcaatgcaagtgccgggtctgttgcaggtgttggcatggtggctgctgctgctgcagcagctgcagcatcagctgcatctgggaaaccagttaatgcacctgacctccctacttttgataaatggttgtccataagtacctctattctaactgcactgttgagtggaagaaatgtgctgagatgtcagtctgaaagcaagactcatacaagtcctactgagaagaatggccaacttcctgtaggatctaatgctattgagatcgcattatcgtgcttggaaagtaacaatgggctgaacatgaaattttcttcatcatggtgtcaaagggtgcttccagctgctaaggagatatacctgaaaggtttgcctgccttttaccccacaagaatgcatgaagtgcagctacagaaggcattgcggtcctttggctcaatggttaaaggaccagcagtcagggtattctcaaagaagctagaagatgagtgccgggcaatatgggaatctggaaggcagcaatgtgacgctgttagcctaactggcagaccatgtaagcaccgcaggcatggcgatttcttttcatcagatgcaatggagcaacattctagtggatatgtcttcctccatgcatgttcctgtggccggtcacgccgccttagagatgatccttttgactttcagacagccaacgtgtcttttaattgtttccaaaattgcgatgacctattacctacccttgcgcttccaagaggcagcaatgatggttcattttcagtatcctcttggtgcttggtgcgtcttggaggagcaaggtactacaagccaacaaaaggactccttcaaagtggatttagctccaaggagaggtatcttctaaggtggattgtatctgttcataaggggcaagtgagaaatgacattcgttctaatactattacttcatccgcaagatctggtatgaacccgcagactcccccaatagtcactggtgaagtaaaatctgccataacccaagtcacagcacaaattaaatatgcaaagcttgaaaattctggaaaacaagctgaagttgaaccagtgagcaacttaggcattaattttggtaaaggtctgccaaattttactatgaaaaagcccttttctgaagttgttgctggcaccacatcaaaagataccgagtttcctgctcttcagcagacaaggccaccaaaacctggtggtcgaaaagatgagcagcgtcaaatgaatatagtagaccagactaatggccgaggtcatgtggctgtcagccaagggtctgtagctgaaactgaatcggcaaaagcaagcagaaacaagagtagtgaaaatgctgatgggaagccctttttacagatagggagcaatatagtaccagtgattgctggaaatgagactagagaaactagtcagccagtacaacagtttgttgtgtatattggatttgagcatgagtgtccctatggtcatcgcttcttactgtcagagaaacatatgaaggagatcgagtcttcctgtttgcagtatcaaagacctcatctaaacaaagaagcagaagtcaagcatgcacaaaagttgctccaaaatgcatctggtttaatagcatctgcagtggacataaacagtgcacggaaaaacagtaagccattggaatcatcagggagaaacagccagcagcaatcactgcagctgaggattgatgcagagacctcacagccttctcctcggctttcagatccacagaatgccaaaaggtgggagcattattttcgaagcgttacaattgatgatggtggagaagcattttcactgatgaacagaaacttgccaatatatatgcgctgtccacattgcaaggtctcagaaaggaaggaacatcaagatgtaaagtttgctggtgttgtgtctcaacttcagcggattttcattgtgacacctgatttccctgttctgttggcaagctgcccacttgtacagtttgaggcaagtacgctcacctatattcagcagtgttaaagacataatttcctttactcacacatagagtagttatgggaagacattattttaacctagatgtaatgaagttattgccttttccctttttcttgcatcaggggtcatgtttgccatcaaatgtctctgatcatgatcgagaaggatcattcagtattgggtgccgagttatcctcccacctgagagctttcttactatgaggcttccctttgtctatggtgttgagacaaaggagggaagtaaatttcccctcaaatactttgagcgacaaccagaactcacagcatggcttgttgcaggcacagccctgcaaatcgtgtcggtaggggatgtcactgagaaagaaaccgttatgaagtgatagacatgtcatataaagctttactggctttagcatgttctagtcatatatcagtgatttgctatcggcattgaataggtctgttgatggttatattctgtctgaagttttcacttctactcctgaacttgtgctgctaagctgttgacacaactattgcttgctttcactgtgctggaagcattgtgaaatagaagttccgctgatatctgcctgacctggatggtgtatatagatgcaagcagagggggcaggcccacaggcaatcacgccgttcttgtctttgtacatgaaaggtgccaggaggttaagtttagctggttatgtaaaggtccgctttttgaggacctgtccagtggatcaatcccattcctagactggtttgccttgaggcttggagattttgtagtaagactattagttcaattgagctgtttgtccagttgatgagttgttttattcctaggcttgttgagaaatctggccttggaatatagaacccagaagaaaggatttttctgaatgatgttgtagcaaacggttgcttgagatgcatgatctcctcaaataaacttgactgatctgcctgtatcccttattctttcttgtatataatgtatgcagtacaggtatttccccgcagtctttggagaagaagatggatttgtgaagtgatagcacaaaaaaaaaagtcatcaggcgcttctggtggtagactggagactgggctggagaaatgttggagctggaaggaaacgcacggatggctcctgcttgacaagtgtaaaggcaggcggcaagcagggacgtcgagtcgagaatggccgccgctggactggactgg

SEQ ID NO: 9314 - DNA, 2511 bp, Zea Mays
ccgccatggcctacctctccagtctccaccacgcgccttatccccgcctacttctccaccaccgctacctcttcttttctgcatcctccccacctcccgtcgtcactacacgacgccttgttcctacactggcatgccatggccgcgatctgctcgacgtaatgccctacagagacagcaggccctcaggaacggagggaagcagagcaggcccaggcggagcaccgcgtgtcacaaacagctcaactgtgcgaggaaacgccacagcacaggaggcacatatgccgatgtggcgggaaaggacccctggcacgccaaggacgtggaagaaaggggacagggttatgctacaagaacatgcggagggggagtcacaagaaaagagctggaggcgagggctgacacggagtttggagtcaaaagggcccatggtgaggaagagctggactagagacggaaatggaatgcgggcaaaagaatctggaaaggttggaaattcaagagatgagggtacaggaagaagaaacgcatgtaagaaaatgaagaaacccccggatggtgagtatgctggcaagctgagagttgagctggacatgtgctccaagagaggagatgtgatgggggcgatcactctgtatgattccgcagtcgaggaggggatcaagttggggcagcatcactacaatgtgctcctttatctgtgttcttcagcttctcttggttttgtgcaaccagcaaaaagtggtaatatgggtagtggtatcgccagtattggtcctgcacagaaacttgatccatcacccagcagaagcttgggaggttcagagggagacaatgcatatgcatctgaaagtcatgttcaagatcagggaaaaaacaaggccgatttgattccaggtggtttgaaggcacaaacagttagcataccagtagaagatgagcttggagactatgcacgtgcacgaggatttgagatatttgataaaatgtgctcagagaaagagagagttcaaatgagtgaggctgctctgaccgcaaaggcacgtatggcgttgtccatgggtgacagtgatatggcctttgagattgtgaaacagatgaaaggcctgggtttaaagccaaagttgcgctcatatggtcctgctttaacagcattttgcaacagtggtaatgttgaaaaagcatttgaagtagaagcccatatgttggaatctgggatcacacccgaagaagctgagttggagacacttctcagggctagtgtggttggccgacgcggagacaaggtatattatttgctgcataaatttaggactgctgtcagacaggtatcccattccacagctgaattgtttgaggcttggtttcggagcccaacagcatctaaagttggaaagagaaagtgggatgcaggtgctatagcgaaggctattgagaataatggagggggttggcatgggtttggttggttggggagagggaaatggacagtggcacactcaaatatcaacgagaatggtgtctgccttgcttgtggagaaaagctggctattatagatcttgacccaaaagaaacagaagattttgccacatttgtggcaaaattagctattaagagagagaggaaatcgaactttgagaacttccagaaatggcttgaaaagcatgggccttttgaggcagtcgtggatgctgccaatgttggcctgtttagccacaaacacctttctttgagtaaggttaattctgttgccgatgcaataaggctaaggtttacgtcaaaaaaatggcctttgatagttttacataacaagcatctcattggagagcgcatgaaaaaacttaatgatcacaagttggtacaaaagtggaagcaagaaaattcaatatatgcaacccctactggttcaaatgatgattggtacacttcactttggaagaccgctgcgtcacatttcaaatgccacctccatactcagttgttatacaggaatccgataaaggtcactggcatatccctgtctcggaggaaggcttgctagagaaggaccgaacctggctatgcgttacacggcagaattcacaggcacagtgactaacgaagctggagttgttcgatggcaaacattaacggtgtttttttttctgaacactcaagtcagtatcgcatccgccctctcttcgtcagtctgagaaacttcctctattaagtactcattatgatttctacatggtcttattcagttttgttactgaactgctgcatatgttgtaattctgtcttattcagttttgagctggtctacattttgtttagtaaactgatataggtaatacgattccctgctatcagaacaagatctctgctattttccgctcatcccaggatcaggaaataaccgcaaagctgacgagatactgtgcatactggcatagtcactttgcttccgttggtgaaatttttacgtccatatgacatgcatggaaaaaagaacaggcctgattgaattc

SEQ ID NO: 9315 - DNA, 2663 bp, Zea Mays
tccacttgcttccctccgttcatggcagctctgccaccgccatggcctacctctccagtctccaccacgcgccttatccccgcctacttctccaccaccgctacctcttcttttctgcatcctccccacctcccgtcgtcactacacgacgccttgttcctacactggcatgccatggccgcgatctgctcgacgtaatgccctacagagacagcaggccctcaggaacggagggaagcagagcaggcccaggcggagcaccgcgtgtcacaaacagctcaactgtgcgaggaaacgccacagcacaggaggcacatatgccgatgtggcgggaaaggacccctggcacgccaaggacgtggaagaaaggggacagggttatgctacaagaacatgcggagggggagtcacaagaaaagagctggaggcgagggctgacacggagtttggagtcaaaagggcccatggtgaggaagagctggactagagacggaaatggaatgcgggcaaaagaatctggaaaggttggaaattcaagagatgagggtacaggaagaagaaacgcatgtaagaaaatgaagaaacccccggatggtgagtatgctggcaagctgagagttgagctggacatgtgctccaagagaggagatgtgatgggggcgatcactctgtatgattccgcagtcgaggaggggatcaagttggggcagcatcactacaatgtgctcctttatctgtgttcttcagcttctcttggttttgtgcaaccagcaaaaagtggtaatatgggtagtggtatcgccagtattggtcctgcacagaaacttgatccatcacccagcagaagcttgggaggttcagagggagacaatgcatatgcatctgaaagtcatgttcaagatcagggaaaaaacaaggccgatttgattccaggtggtttgaaggcacaaacagttagcataccagtagaagatgagcttggagactatgcacgtgcacgaggatttgagatatttgataaaatgtgctcagagaaagagagagttcaaatgagtgaggctgctctgaccgcaaaggcacgtatggcgttgtccatgggtgacagtgatatggcctttgagattgtgaaacagatgaaaggcctgggtttaaagccaaagttgcgctcatatggtcctgctttaacagcattttgcaacagtggtaatgttgaaaaagcatttgaagtagaagcccatatgttggaatctgggatcacacccgaagaagctgagttggagacacttctcagggctagtgtggttggccgacgcggagacaaggtatattatttgctgcataaatttaggactgctgtcagacaggtatcccattccacagctgaattgtttgaggcttggtttcggagcccaacagcatctaaagttggaaagagaaagtgggatgcaggtgctatagcgaaggctattgagaataatggagggggttggcatgggtttggttggttggggagagggaaatggacagtggcacactcaaatatcaacgagaatggtgtctgccttgcttgtggagaaaagctggctattatagatcttgacccaaaagaaacagaagattttgccacatttgtggcaaaattagctattaagagagagaggaaatcgaactttgagaacttccagaaatggcttgaaaagcatgggccttttgaggcagtcgtggatgctgccaatgttggcctgtttagccacaaacacctttctttgagttaattctgttgccgatgcaataaggctaaggtttacgtcaaaaaaatggcctttgatagttttacataacaagcatctcattggagagcgcatgaaaaaacttaatgatcacaagttggtacaaaagtggaagcaagaaaattcaatatatgcaacccctactggttcaaatgatgattggtactggctgtacgctgctatcagatgcaaatgcttgatcattaccaatgatgaaatgagagaccacacatttcagattttggaaaggaatttcttccccaagtggaaggaaaggcatcaggtacacttcactttggaagaccgctgcgtcacatttcaaatgccacctccatactcagttgttatacaggaatccgataaaggtcactggcatatccctgtctcggaggaaggcttgctagagaaggaccgaacctggctatgcgttacacggcagaattcacaggcacagtgactaacgaagctggagttgttcgatggcaaacattaacggtgtttttttttctgaacactcaagtcagtatcgcatccgccctctcttcgtcagtctgagaaacttcctctattaagtactcattatgatttctacatggtcttattcagttttgttactgaactgctgcatatgttgtaattctgtcttattcagttttgagctggtctacattttgtttagtaaactgatataggtaatacgattccctgctatcagaacaagatctctgctattttccgctcatcccaggatcaggaaataaccgcaaagctgacgagatactgtgcatactggcatagtcactttgcttccgttggtgaaatttttacgtccatatgacatgcatggaaaaaagaacaggcctgattgaattc

SEQ ID NO: 9316 - DNA, 2699 bp, Zea Mays
ttaaaacctacgctccacttgcttccctccgttcatggcagctctgccaccgccatggcctacctctccagtctccaccacgcgccttatccccgcctacttctccaccaccgctacctcttcttttctgcatcctccccacctcccgtcgtcactacacgacgccttgttcctacactggcatgccatggccgcgatctgctcgacgtaatgccctacagagacagcaggccctcaggaacggagggaagcagagcaggcccaggcggagcaccgcgtgtcacaaacagctcaactgtgcgaggaaacgccacagcacaggaggcacatatgccgatgtggcgggaaaggacccctggcacgccaaggacgtggaagaaaggggacagggttatgctacaagaacatgcggagggggagtcacaagaaaagagctggaggcgagggctgacacggagtttggagtcaaaagggcccatggtgaggaagagctggactagagacggaaatggaatgcgggcaaaagaatctggaaaggttggaaattcaagagatgagggtacaggaagaagaaacgcatgtaagaaaatgaagaaacccccggatggtgagtatgctggcaagctgagagttgagctggacatgtgctccaagagaggagatgtgatgggggcgatcactctgtatgattccgcagtcgaggaggggatcaagttggggcagcatcactacaatgtgctcctttatctgtgttcttcagcttctcttggttttgtgcaaccagcaaaaagtggtaatatgggtagtggtatcgccagtattggtcctgcacagaaacttgatccatcacccagcagaagcttgggaggttcagagggagacaatgcatatgcatctgaaagtcatgttcaagatcagggaaaaaacaaggccgatttgattccaggtggtttgaaggcacaaacagttagcataccagtagaagatgagcttggagactatgcacgtgcacgaggatttgagatatttgataaaatgtgctcagagaaagagagagttcaaatgagtgaggctgctctgaccgcaaaggcacgtatggcgttgtccatgggtgacagtgatatggcctttgagattgtgaaacagatgaaaggcctgggtttaaagccaaagttgcgctcatatggtcctgctttaacagcattttgcaacagtggtaatgttgaaaaagcatttgaagtagaagcccatatgttggaatctgggatcacacccgaagaagctgagttggagacacttctcagggctagtgtggttggccgacgcggagacaaggtatattatttgctgcataaatttaggactgctgtcagacaggtatcccattccacagctgaattgtttgaggcttggtttcggagcccaacagcatctaaagttggaaagagaaagtgggatgcaggtgctatagcgaaggctattgagaataatggagggggttggcatgggtttggttggttggggagagggaaatggacagtggcacactcaaatatcaacgagaatggtgtctgccttgcttgtggagaaaagctggctattatagatcttgacccaaaagaaacagaagattttgccacatttgtggcaaaattagctattaagagagagaggaaatcgaactttgagaacttccagaaatggcttgaaaagcatgggccttttgaggcagtcgtggatgctgccaatgttggcctgtttagccacaaacacctttctttgagtaaggttaattctgttgccgatgcaataaggctaaggtttacgtcaaaaaaatggcctttgatagttttacataacaagcatctcattggagagcgcatgaaaaaacttaatgatcacaagttggtacaaaagtggaagcaagaaaattcaatatatgcaacccctactggttcaaatgatgattggtactggctgtacgctgctatcagatgcaaatgcttgatcattaccaatgatgaaatgagagaccacacatttcagattttggaaaggaatttcttccccaagtggaaggaaaggcatcagtattgttttcactaacaggtacacttcactttggaagaccgctgcgtcacatttcaaatgccacctccatactcagttgttatacaggaatccgataaaggtcactggcatatccctgtctcggaggaaggcttgctagagaaggaccgaacctggctatgcgttacacggcagaattcacaggcacagtgactaacgaagctggagttgttcgatggcaaacattaacggtgtttttttttctgaacactcaagtcagtatcgcatccgccctctcttcgtcagtctgagaaacttcctctattaagtactcattatgatttctacatggtcttattcagttttgttactgaactgctgcatatgttgtaattctgtcttattcagttttgagctggtctacattttgtttagtaaactgatataggtaatacgattccctgctatcagaacaagatctctgctattttccgctcatcccaggatcaggaaataaccgcaaagctgacgagatactgtgcatactggcatagtcactttgcttccgttggtgaaatttttacgtccatatgacatgcatggaaaaaagaacaggcctgattgaattc

SEQ ID NO: 9317 - DNA, 3904 bp, Zea Mays
cccatgtgtaagcttttctcgcactcgtactccctcctccgctccggctaggaggctgctccctccgccgctccgccttcgtcgcgcggccatcgtttccggctctgtccccggatatctcttcgccaccgcttcctgcgccgcggcgccgccacaaccgaaggcgacccagtcgccttcaacactatggtgactcctcccactgtcgaggaggacgaggagatgctcgtgccccgccaggaggcggtcgacaccgacgcagcgcagcccatggaaggtactgtggtggcacagactgaggtggtgagcacggcggagagccagcctgtggaagatccgcagacatcacggttcacttggacaattgagaacttcaccaggttcagtgagaagaagcactatttagaggtttttgttgttggcggattcaaatggagtgtgctgattttccccaaggggaacaatgtggaccacttctcaatgtacttggatgttgctgactcaaccagccttccgtatggttggagccgctatgctcagtttagtcttgctgttgtaaaccaaatccagccagagtttacgatacgcaaagagacccaacatcaatttaatgctcgtgagagtgattggggtttcacatcttttatgcctttgagtgagctctatgatgcaagtagaggttacctcgtgaatgatactgttgttgtggaggccgaggttgctgtccgcagaattgttgactattggacatatgactcaaaaaaggaaactggttatgtgggcctgaaaaaccaaggagctacctgttatatgaactcccttctacagacactataccatataccctacttcaggaaggctgtatatcatatgccaaccactgaaaatgacataccatcaggaagcattcccttggcgctgcagagccttttctacaagctccagtacagtgacagtagtgtagctacaaaagagctgacaaaatcttttggttgggacacatatgattctttcatgcagcatgatgtacaagagctcaacagagttctgtctgagaaacttgaggacaaaatgaagggaactgtcgtagaaggaacaattgagcaattatttgaaggtcaccacatcaattacattgagtgtataaacgttgagcataaatctaaccgcaaggaatccttttatgatcttcagcttgacgtcaaaggctgtcgtgacatttattcgtcgtttgataaatatgttgaagttgaacgtctagagggtgataacaagtatcacgcagagaatcatggtctacaggatgcaaaaaagggcgttcttttccttgatttcccccctgttttgcaactccagctgaagcgctttgagtatgattatatgagagatagcatggttaagattaatgatcgctatgagttccctctgcaacttgatctggatagagatggtggcaaatacattgctccaaatgcagatcgaagtacacgaaacctttacactcttcacagtgttcttgttcatagtggtggggtacatggtggtcactactatgcattcatacggccaactttatctgagcaatggtataaatttgatgatgaacgtgtaacaaaagaagatgctaagaaggctcttgaagaacaatatgggggtgatgaagagttaccccaaataaaccctggtttcaacaacgctccatttaaattcacgaagtattcaaacgcgtatatgcttgtttatattcgtgaaagtgccaaggagaaaattatgtgtactgttgatgaaaaagacattgctgagcatttaagggtaaggttgaaaaaagaacaagaagagaaagaacacaaaaagaaagaaaaagctgaagctcatctttataccataattaaggtagctcgagatgaggatttgaaggaacaaattggaaagggtatatattttgatttggtggaccatgaaaaggtccataatttccgtatacagaaacaaatgccttttagttgtttcaaggaggaagtagccaaggaatatggcatccctgttcagtttcagcgcttctggttgtgggcaaagaggcaaaaccatacataccgccctaatcgtccattgaccgttcatgaggaaacacaatctgatttgcggcctctccctcctcctgagaagggcaaggaagatattcttcttttcttcaaattctacaacccagaaaaggaagaactctgtttcatggggaggctctttgtgaaggccttgggaaaaccttcagaaatcctggcaaaactaaacgaaatggctggatttccccctgatcaagaaattgagctttttgaggaaattaagtttgagccaaacgtgatgtgtgaaactatagacaagaaactcacttttcattatagtcagcttgaagatggggacattatttgtttccaaaaatcaccaggagcagaatatgatgcacccgtgcgatatccggatgttccttcatttttggagtatgtccataataggcaggttgtacatttccggtctttggagaaaccaaaggatgatgatttttctttggaattgtcaaagcttcatacctatgatgatgttgttgagagagttgctcgccaacttgaattggacgatccagcgaaaattcggcttacaccccacaattgctactctcagcaacctaaaccacagcccgtcaaatatcgaggagtggtgcatctgtcggacatgctcatccactacaatcagacgtctgacatcttgtattatgaagtgttggatataccactgccagaattgcagttcctaaaaaccctgaaagttgcatttcaccatcctacgaaggatgaggttgttattcatagcatcaggcttccaaaaaatagcaccattgctgatgtaatatatgacttgaaaactaaggttgaactgtccagtcctaatgctgaactacgtgtactagaagtcttctaccacaagatctataagatctttccactacatgagaagatagagaatataaacgaccaatattggacactacgtgctgaggagattccagaagaggaaaaaaatataggcccaaatgatcggctaattcatgtttatcacttcaagaaagatattaatcagactcagattcagaactttggagaccctttcgttttggtcgttcatgaaggtgagactttagcagaagtcaagaagcgcatacagagtaaactgcaagtctctgctgatgaattttccaagtggaaatttgcatttatatcaatgaatcggccagactacctccaggattcagatgttgtacctactggctttcagaggagagaggtctacggagcttgggagcaatatcttgggatagagcacgctgatactgcaccaaaaagggtctatacagtgaatcagaaccgtcacgcatacgaaaagccggtcaaaatttacaattgagatttctaactaacatggccgcacggtgaaggcctccatacgagaggagcggccagaaaagggaggacagggaatttatactgtcagggggaaaacctcatagttagcgagccattcggtgtggcacggccatgtattccagcgctagaggccagccactgttatttcatctgtagcagccagcagctcctatagcaatgattttctttttgtacaagattttccttctttgccttagggtgatggcgcgagcgcattggtgtccgtttcggttgggcaattgcttcattcttagagcaaagctgggtacataagattttggtaggaagcgtgtatacaggcaggctgtatagttgtggctctctcggcttgatccctcgtatcttgtcttgtgctattgttaatgcagtgacaggggctgactgtaaatcgtggttccaattttcag

SEQ ID NO: 9318 - DNA, 3939 bp, Zea Mays
cccatgtgtaagcttttctcgcactcgtactccctcctccgctccggctaggaggctgctccctccgccgctccgccttcgtcgcgcggccatcgtttccggctctgtccccggatatctcttcgccaccgcttcctgcgccgcggcgccgccacaaccgaaggcgacccagtcgccttcaacactatggtgactcctcccactgtcgagcaggaggacgaggagatgctcgtgccccgccaggaggcggtcgacaccgacgcagcgcagcccatggaagtggtggcacagactgaggtggtgagcacggcggagagccagcctgtggaagatccgcagacatcacggttcacttggacaattgagaacttcaccaggttcagtgagaagaagcactatttagaggtttttgttgttggcggattcaaatggagtgtgctgattttccccaaggggaacaatgtggaccacttctcaatgtacttggatgttgctgactcaaccagccttccgtatggttggagccgctatgctcagtttagtcttgctgttgtaaaccaaatccagccagagtttacgatacgcaaagagacccaacatcaatttaatgctcgtgagagtgattggggtttcacatcttttatgcctttgagtgagctctatgatgcaagtagaggttacctcgtgaatgatactgttgttgtggaggccgaggttgctgtccgcagaattgttgactattggacatatgactcaaaaaaggaaactggttatgtgggcctgaaaaaccaaggagctacctgttatatgaactcccttctacagacactataccatataccctacttcaggaaggaagcattcccttggcgctgcagagccttttctacaagctccagtacagtgacagtagtgtagctacaaaagagctgacaaaatcttttggttgggacacatatgattctttcatgcagcatgatgtacaagagctcaacagagttctgtctgagaaacttgaggacaaaatgaagggaactgtcgtagaaggaacaattgagcaattatttgaaggtcaccacatcaattacattgagtgtataaacgttgagcataaatctaaccgcaaggaatccttttatgatcttcagcttgacgtcaaaggctgtcgtgacatttattcgtcgtttgataaatatgttgaagttgaacgtctagagggtgataacaagtatcacgcagagaatcatggtctacaggatgcaaaaaagggcgttcttttccttgatttcccccctgttttgcaactccagctgaagcgctttgagtatgattatatgagagatagcatggttaagattaatgatcgctatgagttccctctgcaacttgatctggatagagatggtggcaaatacattgctccaaatgcagatcgaagtacacgaaacctttacactcttcacagtgttcttgttcatagtggtggggtacatggtggtcactactatgcattcatacggccaactttatctgagcaatggtataaatttgatgatgaacgtgtaacaaaagaagatgctaagaaggctcttgaagaacaatatgggggtgatgaagagttaccccaaataaaccctggtttcaacaacgctccatttaaattcacgaagtattcaaacgcgtatatgcttgtttatattcgtgaaagtgccaaggagaaaattatgtgtactgttgatgaaaaagacattgctgagcatttaagggtaaggttgaaaaaagaacaagaagagaaagaacacaaaaagaaagaaaaagctgaagctcatctttataccataattaaggtagctcgagatgaggatttgaaggaacaaattggaaagggtatatattttgatttggtggaccatgaaaaggtccataatttccgtatacagaaacaaatgccttttagttgtttcaaggaggaagtagccaaggaatatggcatccctgttcagtttcagcgcttctggttgtgggcaaagaggcaaaaccatacataccgccctaatcgtccattgaccgttcatgaggaaacacaatctgtggggcaactgagagaaatatcaaataaggcacacaatgttgagttgaagctgtttttggaagtagaacttgggctggatttgcggcctctccctcctcctgagaagggcaaggaagatattcttcttttcttcaaattctacaacccagaaaaggaagaactctgtttcatggggaggctctttgtgaaggccttgggaaaaccttcagaaatcctggcaaaactaaacgaaatggctggatttccccctgatcaagaaattgagctttttgaggaaattaagtttgagccaaacgtgatgtgtgaaactatagacaagaaactcacttttcattatagtcagcttgaagatggggacattatttgtttccaaaaatcaccaggagcagaatatgatgcacccgtgcgatatccggatgttccttcatttttggagtatgtccataataggcaggttgtacatttccggtctttggagaaaccaaaggatgatgatttttctttggaattgtcaaagcttcatacctatgatgatgttgttgagagagttgctcgccaacttgaattggacgatccagcgaaaattcggcttacaccccacaattgctactctcagcaacctaaaccacagcccgtcaaatatcgaggagtggtgcatctgtcggacatgctcatccactacaatcagacgtctgacatcttgtattatgaagtgttggatataccactgccagaattgcagttcctaaaaaccctgaaagttgcatttcaccatcctacgaaggatgaggttgttattcatagcatcaggcttccaaaaaatagcaccattgctgatgtaatatatgacttgaaaactaaggttgaactgtccagtcctaatgctgaactacgtgtactagaagtcttctaccacaagatctataagatctttccactacatgagaagatagagaatataaacgaccaatattggacactacgtgctgaggagattccagaagaggaaaaaaatataggcccaaatgatcggctaattcatgtttatcacttcaagaaagatattaatcagactcagcagattcagaactttggagaccctttcgttttggtcgttcatgaaggtgagactttagcagaagtcaagaagcgcatacagagtaaactgcaagtctctgctgatgaattttccaagtggaaatttgcatttatatcaatgaatcggccagactacctccaggattcagatgttgtacctactggctttcagaggagagaggtctacggagcttgggagcaatatcttgggatagagcacgctgatactgcaccaaaaagggtctatacagtgaatcagaaccgtcacgcatacgaaaagccggtcaaaatttacaattgagatttctaactaacatggccgcacggtgaaggcctccatacgagaggagcggccagaaaagggaggacagggaatttatactgtcagggggaaaacctcatagttagcgagccattcggtgtggcacggccatgtattccagcgctagaggccagccactgttatttcatctgtagcagccagcagctcctatagcaatgattttctttttgtacaagattttccttctttgccttagggtgatggcgcgagcgcattggtgtccgtttcggttgggcaattgcttcattcttagagcaaagctgggtacataagattttggtaggaagcgtgtatacaggcaggctgtatagttgtggctctctcggcttgatccctcgtatcttgtcttgtgctattgttaatgcagtgacaggggctgactgtaaatcgtggttccaattttcag

SEQ ID NO: 9319 - DNA, 3976 bp, Zea Mays
cccatgtgtaagcttttctcgcactcgtactccctcctccgctccggctaggaggctgctccctccgccgctccgccttcgtcgcgcggccatcgtttccggctctgtccccggatatctcttcgccaccgcttcctgcgccgcggcgccgccacaaccgaaggcgacccagtcgccttcaacactatggtgactcctcccactgtcgaggaggacgaggagatgctcgtgccccgccaggaggcggtcgacaccgacgcagcgcagcccatggaagtggtggcacagactgaggtggtgagcacggcggagagccagcctgtggaagatccgcagacatcacggttcacttggacaattgagaacttcaccaggttcagtgagaagaagcactatttagaggtttttgttgttggcggattcaaatggagtgtgctgattttccccaaggggaacaatgtggaccacttctcaatgtacttggatgttgctgactcaaccagccttccgtatggttggagccgctatgctcagtttagtcttgctgttgtaaaccaaatccagccagagtttacgatacgcaaagagacccaacatcaatttaatgctcgtgagagtgattggggtttcacatcttttatgcctttgagtgagctctatgatgcaagtagaggttacctcgtgaatgatactgttgttgtggaggccgaggttgctgtccgcagaattgttgactattggacatatgactcaaaaaaggaaactggttatgtgggcctgaaaaaccaaggagctacctgttatatgaactcccttctacagacactataccatataccctacttcaggaaggctgtatatcatatgccaaccactgaaaatgacataccatcaggaagcattcccttggcgctgcagagccttttctacaagctccagtacagtgacagtagtgtagctacaaaagagctgacaaaatcttttggttgggacacatatgattctttcatgcagcatgatgtacaagagctcaacagagttctgtctgagaaacttgaggacaaaatgaagggaactgtcgtagaaggaacaattgagcaattatttgaaggtcaccacatcaattacattgagtgtataaacgttgagcataaatctaaccgcaaggaatccttttatgatcttcagcttgacgtcaaaggctgtcgtgacatttattcgtcgtttgataaatatgttgaagttgaacgtctagagggtgataacaagtatcacgcagagaatcatggtctacaggatgcaaaaaagggcgttcttttccttgatttcccccctgttttgcaactccagctgaagcgctttgagtatgattatatgagagatagcatggttaagattaatgatcgctatgagttccctctgcaacttgatctggatagagatggtggcaaatacattgctccaaatgcagatcgaagtacacgaaacctttacactcttcacagtgttcttgttcatagtggtggggtacatggtggtcactactatgcattcatacggccaactttatctgagcaatggtataaatttgatgatgaacgtgtaacaaaagaagatgctaagaaggctcttgaagaacaatatgggggtgatgaagagttaccccaaataaaccctggtttcaacaacgctccatttaaattcacgaagtattcaaacgcgtatatgcttgtttatattcgtgaaagtgccaaggagaaaattatgtgtactgttgatgaaaaagacattgctgagcatttaagggtaaggttgaaaaaagaacaagaagagaaagaacacaaaaagaaagaaaaagctgaagctcatctttataccataattaaggtagctcgagatgaggatttgaaggaacaaattggaaagggtatatattttgatttggtggaccatgaaaaggtccataatttccgtatacagaaacaaatgccttttagttgtttcaaggaggaagtagccaaggaatatggcatccctgttcagtttcagcgcttctggttgtgggcaaagaggcaaaaccatacataccgccctaatcgtccattgaccgttcatgaggaaacacaatctgtggggcaactgagagaaatatcaaataaggcacacaatgttgagttgaagctgtttttggaagtagaacttgggctggatttgcggcctctccctcctcctgagaagggcaaggaagatattcttcttttcttcaaattctacaacccagaaaaggaagaactctgtttcatggggaggctctttgtgaaggccttgggaaaaccttcagaaatcctggcaaaactaaacgaaatggctggatttccccctgatcaagaaattgagctttttgaggaaattaagtttgagccaaacgtgatgtgtgaaactatagacaagaaactcacttttcattatagtcagcttgaagatggggacattatttgtttccaaaaatcaccaggagcagaatatgatgcacccgtgcgatatccggatgttccttcatttttggagtatgtccataataggcaggttgtacatttccggtctttggagaaaccaaaggatgatgatttttctttggaattgtcaaagcttcatacctatgatgatgttgttgagagagttgctcgccaacttgaattggacgatccagcgaaaattcggcttacaccccacaattgctactctcagcaacctaaaccacagcccgtcaaatatcgaggagtggtgcatctgtcggacatgctcatccactacaatcagacgtctgacatcttgtattatgaagtgttggatataccactgccagaattgcagttcctaaaaaccctgaaagttgcatttcaccatcctacgaaggatgaggttgttattcatagcatcaggcttccaaaaaatagcaccattgctgatgtaatatatgacttgaaaactaaggttgaactgtccagtcctaatgctgaactacgtgtactagaagtcttctaccacaagatctataagatctttccactacatgagaagatagagaatataaacgaccaatattggacactacgtgctgaggagattccagaagaggaaaaaaatataggcccaaatgatcggctaattcatgtttatcacttcaagaaagatattaatcagactcagattcagaactttggagaccctttcgttttggtcgttcatgaaggtgagactttagcagaagtcaagaagcgcatacagagtaaactgcaagtctctgctgatgaattttccaagtggaaatttgcatttatatcaatgaatcggccagactacctccaggattcagatgttgtacctactggctttcagaggagagaggtctacggagcttgggagcaatatcttgggatagagcacgctgatactgcaccaaaaagggtctatacagtgaatcagaaccgtcacgcatacgaaaagccggtcaaaatttacaattgagatttctaactaacatggccgcacggtgaaggcctccatacgagaggagcggccagaaaagggaggacagggaatttatactgtcagggggaaaacctcatagttagcgagccattcggtgtggcacggccatgtattccagcgctagaggccagccactgttatttcatctgtagcagccagcagctcctatagcaatgattttctttttgtacaagattttccttctttgccttagggtgatggcgcgagcgcattggtgtccgtttcggttgggcaattgcttcattcttagagcaaagctgggtacataagattttggtaggaagcgtgtatacaggcaggctgtatagttgtggctctctcggcttgatccctcgtatcttgtcttgtgctattgttaatgcagtgacaggggctgactgtaaatcgtggttccaattttcag

SEQ ID NO: 9320 - DNA, 2329 bp, Zea Mays
gtttccgcgggggagctgctttgcggggaagtgggaccatggcctcgagcctggttaccacggacaggagatggggtgctactcctgcaaggaaatctagtatgactgttctgggaaaagtcccaaaaccgattaatttaccaagtcagaggttggaaaacaatggtcttgatcccaatctggaactggttccaaagggcacccacacctggggcagcaaagcaccatctacaacaccaaacgcatggagttcctcatcaattctgtcttccaagaacgatggaagttccacttcatctagtcacttcaatgtccggcccacctctggcggaggctcaaggccatcaacagctggaagtgaatcacttggttcacccaatgcttggggtgcaaattctcgcccatcttcagcatcaggcacatttccatcatctcatctaccaatggccacaaatcgtccccaaagtgcggaaacaagacctggaagttcacaaatttctcgatttgcggataatgcttcagataatgtgaaagcatcgataaggactattgatagatcggaatcttcatcacgtgggcctgggttcacattaagtactggtgatttcccaacgcttggctctgaagcaaacagtcaacgagggcatagttcgaaagggcgcccaacttctagtttgggtaaagaggtgtcgcaaggtgaacaagtgaagagcctagcaactggaactggtgaagtaatttcaccatccaataatcaccctgttgatatcatgaagacagagcatcatgcacacactggaggtgctcctgtcccagccacaagtgtgccaaatgaaggcttgcaacaacagccatatccaccaaattttcctatgcctcctctgcagtttgattcatggcgtgcacctcctggtcacccccctgagggaatgtggcatagaggaccagtgccaggtgggccatacagacctgttggcccccctggtagtttccctgtcgaaccctttggttattatggccagttcccacccaactccgaagctgcaggaaggcagggctcagggcatggtggatatcacactaaaaatgatgtgtatcatcctatgcctcataattcctatattatgaatcagcctgttattccagtcagaccagtttatcagggtccagtgctgtatgatgggtattatggccctcaagcaaatttcaataacaccaatgttagagatcctcattttgttggaggtcctggaatactaaatcaattcccaaatcagaatgacaggtttcaccctggacatcctcaaaacagaccaggcaaacatgaaacggtcccaagggagcagctggaatctgataagctacatgtctttcaccaagaacaccctgggagtttgcatgataatccagatcgtctaggaggttcccgtgaatttgaaaggaatgtgcagccagcaccgccacttcttccacatcctgatggaaaacagactgatatgaacatgagggcagatacaagggacacctttagtgagactgaaagaaccgtggtacttacaaaatcggtgcctaaccagagaggttcggttggtatagaccatttgtctgtttatgaaaacacacgatcccatcacagagaaacttgtgatggcactctgcgcaagaagttcaaggaggatagctcagttgtacttgaccagcatcctgtcattaagaagaatgcagctttaatagagaaaattgagagtttgaacaacaaagccagaaatgtctatgcacagaatctcccagaaccagcttcatccaaggaattcaagaagcataaaaaaactactgatgtttcatctaatgatgtcatcagtacgacatgcacatctgatcaggcagtttctgtttcacatatttctgctgtggtgcagagacgaccaaatgtgaccattgagggtacaattcttggaccggcacattcacatttaactgaatttagcaaagctgagaagcttggtgattcaattaacaatcatttacataggagagttgattcttcgagaaacagttaccatggtccttgtaaagataggccagctaataaattcggaagttgtggacgtggagaaagttacataactaattcattaccagtagctgatttggggaatgatatccatcatggccaacaacctcagattgcctcacagctgcaacctgtgattgtacctgatgatatgccagcttcactcgattatgagtctcaggatctggttggtattcatatcacagtacaactggtgcacatcgtcagaaaacactagcttttgctaattaagac

SEQ ID NO: 9321 - DNA, 3848 bp, Zea Mays
atggatgagttaaaaagtgtgaatttgagtaaatttgtcagcgaagcagtttcttacatttgtgaggccaaacttcgctccgctgatatacaagctgctgttcaggtttgctcgctccttcatcaaagatacaaggacttctctccttgtcttatagaaggtctactgaagatcttctttcctggaaaatctggagatgatttggatgcagataaaaattcgagagccatgaagaagagaagcacattgaaacttttgattgaactatattttgttggaattgtcgaagatgctagcatatttgtaaatattataaaagatcttacatcagcagaacatttgaaggaccgtgaaggaactcaaacaaacctatctcttctatctacctttgctcgtcaagggaagttttttgtagggctacaacctcatggtcaagaagcttatgacgagttctttaaggacctaaatgttactgctgagcagaagaagttctttaagaaagccttgaactcttactatgatgctgtagctgaactactacaatcagaacatgcgtctcttcgtctaatggaggcggagaatgcaaaagttttaagtgccaaaggtgaactaagtgatgagaacacatcctcatatgagaaactcaggaagtcttttgatcagttactacgtggtgtttcctcgttggctgaatctcttgacatgcaacctccagtgatgccagatgatggaaatacaacaagagttactacaggaaccgatgcgttgccttcttctggaaaagaatcatctgcattggaacctatctgggatgatgaagataccaaagctttttatgaatctttacctgatctcagagcatttgtgccagctgtattactgggagaggttgaaccaaaatcaaatgagcaacatgttaagggccgtgagctatctggtgagtccacttcagaacaagagactgaactacatgacaatgttccaacttctgccactgaacgtcaactagaagttaaagtagatgatctagtgaaagagagtgaagacagagataaagagaaggggaaggatggagaaaaggaaaaatccaaggagaaggatctggataagaaaaatgaaagagagaaggagaaaggaagagtcttggatggcgcaagtctggataacctcctgcagaggctgccaggatgtgtcagtcgtgatctcattgatcaattgacggttgagttttgctacctaaattctaaagcaaatcgaaagaaacttgtgcgtgccttattcaatgttaataggacttcactggaactgttgccatactattctcgtttggttgcaacactctcaacctgtatgaaagatgttccaagtatgcttctgtctatgcttgaagaggagttcaactttttaataaataagaaggaccagatcaacatagaaacaaaaataaaaaatatacggtttatcggggagttgtgcaagttcaaaatggctcctccagctcttgtttttagctgtttgaaggcctgccttgatgatttcagtcatcataatattgatgtggcttgcaaccttcttgagacttgtggtcgttttttgtatcgctcacctgaaactaccattcgcatggctaacatgctggagatactgatgagattgaaaaatgtcaagaatttggattcacgccacagtacacttgtagaaaacgcctactacctttgtaaaccgcccgaaagatctgcgcggatatcgaaagttcggccaccgttgcatcaatacataagaaagttgcttttctcagatcttgacaaatcaagtgttgaacatgttttgcgccaactacgcaaattaccttgggcagagtgtcaacaataccttctgaagtgctttctaaaggttttagaagagataagggttggattggagttgaatgactatgggatgcaacaaaggaggcttgcccacatgcggttccttggagagctatacagctacaagcatatagattcatcagttgtttttgatacactgtaccttatcattgtgtttggtcatggaactccggaacaagatgtgctggatccaccagaagattgtttcagaatcaggttgatcattacacttctacagacctgtggtcactatttcagtaaggggtcttcaaaaaggaagctcgacaaattcttgctacactttcaaagatacattattagtaaagggcccttaccactcgacatagagtttgacattcaggatttatttggtgagctacgaccaaccatgtctaggtattcgtcaattgaggaacttgttgccgcgttagttgagtttgaagaaaatgaacgttcagccccagtagaaaaggttgaaaatgaaagacactccgacaatgaatctcagaaaagacactcgcgagatgctggtccatctgtgaatggtgaaagcgctgcaaatggaaccgaggaaaatggcaaggctcatgaagtagcagatagtgagagctattcagatactggcagcattgatggacgggaagaagaggaggatatattatctgaggataaatcaaatgatggctcagataacgaaggcgacgatgaagatgatggcattcctgttgtttctgatgaagatgaaaatgttgaggttagacagaaagtcatgaatgttgatcctaaggagcaagaagacttcgatcgagagctcaaagcccttcttcaggagagcttggagtctcgtaaatcagaggcccgttcaaggctccctttgaatatgatggtgccgatgaacgtcctcgagggttcaaaagactcaagggccacagaatctgagagtggagaagaaacagtagacgaagagggtgggaatgctgggggtagcagcaaggtgcgtgtgaaggtgctaatgaagaaaggacacaagcaacagacaagacaaatgttaattccggccgatagttcaattgtgcaaagcacgaagcagcaggaagctgctgagcttgaggagaagcagagcatcaagcggaggatccttgagtacaatgagagggaggaagaattgaatggagcatcccaaatggggaactggggccaaggagctaccagtaccagcagtatcagatcaggtggccggggcagctgggatggttcagcacggggaggtggtcgacaacggcaccacataacgggttctggtggtttctaccacagttatggcaggagaagataagttcgcctgtgtgagctatttcgccctgagccttttggcaggtagaaagcatcctagtctgacaaattgcctctagcaaatgagattagcgtttaacacagcttgatggacaattgcctctagcaccctagtctgaaaataagacaattctaccactggtcatgggagatagcaatgccttgagaaggagctgcaaatctgatggtcctaatggcttgagttgctacggtgtttggtaaagctggttgtgatggctgtacccggatacatgcgcatactgtttcgacgccatgtagggggtatctggtcaaagttcgctgtctgatgcctgttctaatttagtggagtattactggcaatgtggtacaagcatcttgtcttgaaaatcgaaaactgcacggtatgtgtgcgccattttttgtctgatgaggtgtgttccatgcgtgtatttcatatgtagctacaccaatcgcgtgtccaccgaacgatgctaacttgctatgccgatggagcatgctttctacccgcatcgcaacccgcaaatccttgtccagtcgtttgtcttccatccaggaatgataccgagttctcatgtcacgcttgacgcttctttccgtcctgct

SEQ ID NO: 9322 - DNA, 4304 bp, Zea Mays
cgccgccgttgccccacgccaggtgcccaggtcttcgtcaggccctttgccgccgacgagcatcaaccctagttctgggtttttgctctgaagaacaaaatggacaatgctcagagtgacaaccgaactgataccaagcaagatgatgatgcgcgccaaagcaaacaggatgatgaggaggcccgccttgaagaatataaaaagatcattgatcaaaagatttccctccgccggagcaaccaaaaccctgaaaggcctgatgcaaactacctgagaaccctggactctagtattaagcgcaatacaaccgttataaagaagttgaagacaataaatgatgaacagaaggatgtgataatggatgagttaaaaagtgtgaatttgagtaaatttgtcagcgaagcagtttcttacatttgtgaggccaaacttcgctccgctgatatacaagctgctgttcaggtttgctcgctccttcatcaaagatacaaggacttctctccttgtcttatagaaggtctactgaagatcttctttcctggaaaatctggagatgatttggatgcagataaaaattcgagagccatgaagaagagaagcacattgaaacttttgattgaactatattttgttggaattgtcgaagatgctagcatatttgtaaatattataaaagatcttacatcagcagaacatttgaaggaccgtgaaggaactcaaacaaacctatctcttctatctacctttgctcgtcaagggaagttttttgtagggctacaacctcatggtcaagaagcttatgacgagttctttaaggacctaaatgttactgctgagcagaagaagttctttaagaaagccttgaactcttactatgatgctgtagctgaactactacaatcagaacatgcgtctcttcgtctaatggaggcggagaatgcaaaagttttaagtgccaaaggtgaactaagtgatgagaacacatcctcatatgagaaactcaggaagtcttttgatcagttactacgtggtgtttcctcgttggctgaatctcttgacatgcaacctccagtgatgccagatgatggaaatacaacaagagttactacaggaaccgatgcgttgccttcttctggaaaagaatcatctgcattggaacctatctgggatgatgaagataccaaagctttttatgaatctttacctgatctcagagcatttgtgccagctgtattactgggagaggttgaaccaaaatcaaatgagcaacatgttaagggccgtgagctatctggtgagtccacttcagaacaagagactgaactacatgacaatgttccaacttctgccactgaacgtcaactagaagttaaagtagatgatctagtgaaagagagtgaagacagagataaagagaaggggaaggatggagaaaaggaaaaatccaaggagaaggatctggataagaaaaatgaaagagagaaggagaaaggaagagtcttggatggcgcaagtctggataacctcctgcagaggctgccaggatgtgtcagtcgtgatctcattgatcaattgacggttgagttttgctacctaaattctaaagcaaatcgaaagaaacttgtgcgtgccttattcaatgttaataggacttcactggaactgttgccatactattctcgtttggttgcaacactctcaacctgtatgaaagatgttccaagtatgcttctgtctatgcttgaagaggagttcaactttttaataaataagaaggaccagatcaacatagaaacaaaaataaaaaatatacggtttatcggggagttgtgcaagttcaaaatggctcctccagctcttgtttttagctgtttgaaggcctgccttgatgatttcagtcatcataatattgatgtggcttgcaaccttcttgagacttgtggtcgttttttgtatcgctcacctgaaactaccattcgcatggctaacatgctggagatactgatgagattgaaaaatgtcaagaatttggattcacgccacagtacacttgtagaaaacgcctactacctttgtaaaccgcccgaaagatctgcgcggatatcgaaagttcggccaccgttgcatcaatacataagaaagttgcttttctcagatcttgacaaatcaagtgttgaacatgttttgcgccaactacgcaaattaccttgggcagagtgtcaacaataccttctgaagtgctttctaaaggttcacaaaggaaagtacagccaagttcatctgattgctcttctcactgctagtctcagccgctatcacgatgactttgctgtctcagtggtagatgaggttttagaagagataagggttggattggagttgaatgactatgggatgcaacaaaggaggcttgcccacatgcggttccttggagagctatacagctacaagcatatagattcatcagttgtttttgatacactgtaccttatcattgtgtttggtcatggaactccggaacaagatgtgctggatccaccagaagattgtttcagaatcaggttgatcattacacttctacagacctgtggtcactatttcagtaaggggtcttcaaaaaggaagctcgacaaattcttgctacactttcaaagatacattattagtaaagggcccttaccactcgacatagagtttgacattcaggatttatttggtgagctacgaccaaccatgtctaggtattcgtcaattgaggaacttgttgccgcgttagttgagtttgaagaaaatgaacgttcagccccagtagaaaaggttgaaaatgaaagacactccgacaatgaatctcagaaaagacactcgcgagatgctggtccatctgtgaatggtgaaagcgctgcaaatggaaccgaggaaaatggcaaggctcatgaagtagcagatagtgagagctattcagatactggcagcattgatggacgggaagaagaggaggatatattatctgaggataaatcaaatgatggctcagataacgaaggcgacgatgaagatgatggcattcctgttgtttctgatgaagatgaaaatgttgaggttagacagaaagtcatgaatgttgatcctaaggagcaagaagacttcgatcgagagctcaaagcccttcttcaggagagcttggagtctcgtaaatcagaggcccgttcaaggctccctttgaatatgatggtgccgatgaacgtcctcgagggttcaaaagactcaagggccacagaatctgagagtggagaagaaacagtagacgaagagggtgggaatgctgggggtagcagcaaggtgcgtgtgaaggtgctaatgaagaaaggacacaagcaacagacaagacaaatgttaattccggccgatagttcaattgtgcaaagcacgaagcagcaggaagctgctgagcttgaggagaagcagagcatcaagcggaggatccttgagtacaatgagagggaggaagaattgaatggagcatcccaaatggggaactggggccaaggagctaccagtaccagcagtatcagatcaggtggccggggcagctgggatggttcagcacggggaggtggtcgacaacggcaccacataacgggttctggtggtttctaccacagttatggcaggagaagataagttcgcctgtgtgagctatttcgccctgagccttttggcaggtagaaagcatcctagtctgacaaattgcctctagcaaatgagattagcgtttaacacagcttgatggacaattgcctctagcaccctagtctgaaaataagacaattctaccactggtcatgggagatagcaatgccttgagaaggagctgcaaatctgatggtcctaatggcttgagttgctacggtgtttggtaaagctggttgtgatggctgtacccggatacatgcgcatactgtttcgacgccatgtagggggtatctggtcaaagttcgctgtctgatgcctgttctaatttagtggagtattactggcaatgtggtacaagcatcttgtcttgaaaatcgaaaactgcacggtatgtgtgcgccattttttgtctgatgaggtgtgttccatgcgtgtatttcatatgtagctacaccaatcgcgtgtccaccgaacgatgctaacttgctatgccgatggagcatgctttctacccgcatcgcaacccgcaaatccttgtccagtcgtttgtcttccatccaggaatgataccgagttctcatgtcacgcttgacgcttctttccgtcctgct

SEQ ID NO: 9323 - DNA, 4438 bp, Zea Mays
tgtacataaagtttgtagcagctagaaattagacgagaaatatagttgcaatcaaagaaaagcactttttgtagcatgtatttatgtgcgttaacttggatgctccttttctttcacatgtcacttctaaaagtctatttttgtttgaccgcaaaaaacccatctgacaatttgttgtggatgaggtacaacatacaagtttcctgttgcttatatatgttcttagaatcttgacaatggttgatgatgagctacttaagaaaagggcagaccccagtgctggaggctctcacttgagtggggtttggggaagggataaactggggcaagcttctccccccacaaatgcagttatgcggagaggctgcttcgaacccgccacctggtgactcaatgcaaactacctgagaaccctggactctagtattaagcgcaatacaaccgttataaagaagttgaagacaataaatgatgaacagaaggatgtgataatggatgagttaaaaagtgtgaatttgagtaaatttgtcagcgaagcagtttcttacatttgtgaggccaaacttcgctccgctgatatacaagctgctgttcaggtttgctcgctccttcatcaaagatacaaggacttctctccttgtcttatagaaggtctactgaagatcttctttcctggaaaatctggagatgatttggatgcagataaaaattcgagagccatgaagaagagaagcacattgaaacttttgattgaactatattttgttggaattgtcgaagatgctagcatatttgtaaatattataaaagatcttacatcagcagaacatttgaaggaccgtgaaggaactcaaacaaacctatctcttctatctacctttgctcgtcaagggaagttttttgtagggctacaacctcatggtcaagaagcttatgacgagttctttaaggacctaaatgttactgctgagcagaagaagttctttaagaaagccttgaactcttactatgatgctgtagctgaactactacaatcagaacatgcgtctcttcgtctaatggaggcggagaatgcaaaagttttaagtgccaaaggtgaactaagtgatgagaacacatcctcatatgagaaactcaggaagtcttttgatcagttactacgtggtgtttcctcgttggctgaatctcttgacatgcaacctccagtgatgccagatgatggaaatacaacaagagttactacaggaaccgatgcgttgccttcttctggaaaagaatcatctgcattggaacctatctgggatgatgaagataccaaagctttttatgaatctttacctgatctcagagcatttgtgccagctgtattactgggagaggttgaaccaaaatcaaatgagcaacatgttaagggccgtgagctatctggtgagtccacttcagaacaagagactgaactacatgacaatgttccaacttctgccactgaacgtcaactagaagttaaagtagatgatctagtgaaagagagtgaagacagagataaagagaaggggaaggatggagaaaaggaaaaatccaaggagaaggatctggataagaaaaatgaaagagagaaggagaaaggaagagtcttggatggcgcaagtctggataacctcctgcagaggctgccaggatgtgtcagtcgtgatctcattgatcaattgacggttgagttttgctacctaaattctaaagcaaatcgaaagaaacttgtgcgtgccttattcaatgttaataggacttcactggaactgttgccatactattctcgtttggttgcaacactctcaacctgtatgaaagatgttccaagtatgcttctgtctatgcttgaagaggagttcaactttttaataaataagaaggaccagatcaacatagaaacaaaaataaaaaatatacggtttatcggggagttgtgcaagttcaaaatggctcctccagctcttgtttttagctgtttgaaggcctgccttgatgatttcagtcatcataatattgatgtggcttgcaaccttcttgagacttgtggtcgttttttgtatcgctcacctgaaactaccattcgcatggctaacatgctggagatactgatgagattgaaaaatgtcaagaatttggattcacgccacagtacacttgtagaaaacgcctactacctttgtaaaccgcccgaaagatctgcgcggatatcgaaagttcggccaccgttgcatcaatacataagaaagttgcttttctcagatcttgacaaatcaagtgttgaacatgttttgcgccaactacgcaaattaccttgggcagagtgtcaacaataccttctgaagtgctttctaaaggttcacaaaggaaagtacagccaagttcatctgattgctcttctcactgctagtctcagccgctatcacgatgactttgctgtctcagtggtagatgaggttttagaagagataagggttggattggagttgaatgactatgggatgcaacaaaggaggcttgcccacatgcggttccttggagagctatacagctacaagcatatagattcatcagttgtttttgatacactgtaccttatcattgtgtttggtcatggaactccggaacaagatgtgctggatccaccagaagattgtttcagaatcaggttgatcattacacttctacagacctgtggtcactatttcagtaaggggtcttcaaaaaggaagctcgacaaattcttgctacactttcaaagatacattattagtaaagggcccttaccactcgacatagagtttgacattcaggatttatttggtgagctacgaccaaccatgtctaggtattcgtcaattgaggaacttgttgccgcgttagttgagtttgaagaaaatgaacgttcagccccagtagaaaaggttgaaaatgaaagacactccgacaatgaatctcagaaaagacactcgcgagatgctggtccatctgtgaatggtgaaagcgctgcaaatggaaccgaggaaaatggcaaggctcatgaagtagcagatagtgagagctattcagatactggcagcattgatggacgggaagaagaggaggatatattatctgaggataaatcaaatgatggctcagataacgaaggcgacgatgaagatgatggcattcctgttgtttctgatgaagatgaaaatgttgaggttagacagaaagtcatgaatgttgatcctaaggagcaagaagacttcgatcgagagctcaaagcccttcttcaggagagcttggagtctcgtaaatcagaggcccgttcaaggctccctttgaatatgatggtgccgatgaacgtcctcgagggttcaaaagactcaagggccacagaatctgagagtggagaagaaacagtagacgaagagggtgggaatgctgggggtagcagcaaggtgcgtgtgaaggtgctaatgaagaaaggacacaagcaacagacaagacaaatgttaattccggccgatagttcaattgtgcaaagcacgaagcagcaggaagctgctgagcttgaggagaagcagagcatcaagcggaggatccttgagtacaatgagagggaggaagaattgaatggagcatcccaaatggggaactggggccaaggagctaccagtaccagcagtatcagatcaggtggccggggcagctgggatggttcagcacggggaggtggtcgacaacggcaccacataacgggttctggtggtttctaccacagttatggcaggagaagataagttcgcctgtgtgagctatttcgccctgagccttttggcaggtagaaagcatcctagtctgacaaattgcctctagcaaatgagattagcgtttaacacagcttgatggacaattgcctctagcaccctagtctgaaaataagacaattctaccactggtcatgggagatagcaatgccttgagaaggagctgcaaatctgatggtcctaatggcttgagttgctacggtgtttggtaaagctggttgtgatggctgtacccggatacatgcgcatactgtttcgacgccatgtagggggtatctggtcaaagttcgctgtctgatgcctgttctaatttagtggagtattactggcaatgtggtacaagcatcttgtcttgaaaatcgaaaactgcacggtatgtgtgcgccattttttgtctgatgaggtgtgttccatgcgtgtatttcatatgtagctacaccaatcgcgtgtccaccgaacgatgctaacttgctatgccgatggagcatgctttctacccgcatcgcaacccgcaaatccttgtccagtcgtttgtcttccatccaggaatgataccgagttctcatgtcacgcttgacgcttctttccgtcctgct

SEQ ID NO: 9324 - DNA, 1330 bp, Zea Mays
gaggaggttggtgcaacaccacgcagagctgctccgagcgcaaaatgaccaacttcggttcatctaagtatatgggagcagtaaacttcactgggatactcagcaatgatcacacagaaaatcctgttgtcatcagatttctacaactggaatacagttgtcataaggtactgcgacggagcatcatttgctggggatgcagaggggggagatctggatggaaccaaacttttcttcagaggattacgtatctggaaagcagttgtagatgaactcatgggaaaaggaatggacgctgctaaacaggccttgcttacaggctgttctgctggttctctagctgcgctactgcactgtgataatttccatggacggtttcctcatgaagtttcagttaaatgcctttctgatgctggattttttattgacgagaaggatttatctggagaaagatccatgcggtcgctcatcagtggagtagttcaccttcagtgtttctttcctgctgaactgattaagggcatcaccacccccacgtttattctgaactccgattacgattcttggcagatacgaaacattctcgcaccaaatggatcctatcctggccaggaatggtctagttgcaaagcagatatccggaactgcagttgcgcacaacttgatgtactgcatggattcaagaagaaattagtcagtgaattgaaggttgccgaagataacaaggactggggcctgttcattgattcatgctttacccactgtcaaacaccattcgatatcacatggaattcaccgatctcaccaaggctcggcaacaagtctatctcagaggccgttggggattggtatttcgatagaaggcaaaacgcgaaacagattgactgcgagtacccatgcaaccccacatgcagcagtcttctgcctactgcttgattcgcaaagggctgcactgagatcaccaggcttttctcatttttcaaattagttttgctgaggattcaaaagggagctttgccttattggtaaaacctgcaattgactaaacacgacttgcagtagttgtgcttccatcaaaagcaatatgtcagaaccgttaagcaccaaactttcaggaactgtgcctcgtaacttccacgttcaaagaaattccagcagagcccacccccttagcctcttacaaaatcaccagttcgcatgaaaacccagcaatggaagctcataaggcctactaaatccacacgattaccctgaactcggcaccaagtcaaaccctaattaagcaaagaaagcccatccgcaaatataggactcgagaactcacctccac

SEQ ID NO: 9325 - DNA, 1506 bp, Zea Mays
ggctcgttgacttgacactcctcgccggcgctcgggggaagggagcggtgtgcttggatgggaccccgcctggttaccaccttcggagaggattcggttccggagctcacaactggctcgtcttccttgagggaggaggttggtgcaacaccacgcagagctgctccgagcgcaaaatgaccaacttcggttcatctaagtatatgggagcagtaaacttcactgggatactcagcaatgatcacacagaaaatcctgatttctacaactggaatacagttgtcataaggtactgcgacggagcatcatttgctggggatgcagaggggggagatctggatggaaccaaacttttcttcagaggattacgtatctggaaagcagttgtagatgaactcatgggaaaaggaatggacgctgctaaacaggccttgcttacaggctgttctgctggttctctagctgcgctactgcactgtgataatttccatggacggtttcctcatgaagtttcagttaaatgcctttctgatgctggattttttattgacgagaaggatttatctggagaaagatccatgcggtcgctcatcagtggagtagttcaccttcagaatgttaaagaagttttacccaatgactgcctccaaaagaaggatccaacagagtgtttctttcctgctgaactgattaagggcatcaccacccccacgtttattctgaactccgattacgattcttggcagatacgaaacattctcgcaccaaatggatcctatcctggccaggaatggtctagttgcaaagcagatatccggaactgcagttgcgcacaacttgatgtactgcatggattcaagaagaaattagtcagtgaattgaaggttgccgaagataacaaggactggggcctgttcattgattcatgctttacccactgtcaaacaccattcgatatcacatggaattcaccgatctcaccaaggctcggcaacaagtctatctcagaggccgttggggattggtatttcgatagaaggcaaaacgcgaaacagattgactgcgagtacccatgcaaccccacatgcagcagtcttctgcctactgcttgattcgcaaagggctgcactgagatcaccaggcttttctcatttttcaaattagttttgctgaggattcaaaagggagctttgccttattggtaaaacctgcaattgactaaacacgacttgcagtagttgtgcttccatcaaaagcaatatgtcagaaccgttaagcaccaaactttcaggaactgtgcctcgtaacttccacgttcaaagaaattccagcagagcccacccccttagcctcttacaaaatcaccagttcgcatgaaaacccagcaatggaagctcataaggcctactaaatccacacgattaccctgaactcggcaccaagtcaaaccctaattaagcaaagaaagcccatccgcaaatataggactcgagaactcacctccac

SEQ ID NO: 9326 - DNA, 405 bp, Zea Mays
gctagtagtgctccggatgtggaagctagaaagaaactgaagtttcatatggaaggtgtaaacttagcaagaccagataaggccaagcctaagggacgaacgatcaaaagtagcgagcaacaagttcttaggttgggtgtgaaaggagcaaagaagatgagcagaaagtgccaaaagtgtggcatcgctgatggtcacaacagtcgtacgtgtttaactgtggaggataataggattcgattggctaacctagctggacgcaagagaggacgaccttctggttcaaggaacaaaattggaggtgcaacaccaaagtggaatgagacatcaacgtcaaaaaacgaacagtgtatgtcgaagatgatgattcatctggtagagagtagaataccaaaagaattatga

SEQ ID NO: 9327 - DNA, 502 bp, Zea Mays
ctcgcccctgccggcgctctggcggacgaggccaccgccggagggcttcactacgtacgaggatgaggccaacaagttcaacattcaagttccgcaaggctggctggtcggcgccggcgaggccagcggcatcaagtccgtcacggcgttctaccccgagcaggccgccaccgactccaacgtcagcgtcgccatcatcgagatcgggccggacttcaccagcctcaagtccttcggcgacgtcgctgccttcgccgagggcctggtacgcctgtactacttggaatacacgtcgcagaaccccggcgagcggcggcggcacatcgtctcggccatcgggatggccttcaacggctggtacaaccgcctctacattgcgacaggccagggacgtacccctgggaaacaatttgtcaagaaatttcagggaagcacgtacttgtttgttaagatggaccaatgcaaggctacggtctacggatcggacctgacaaactactga

SEQ ID NO: 9328 - DNA, 2765 bp, Zea Mays
agtggatatttgaagcacacggtcttgtctcgctcacccgggcaatccgcgcgaggtgcggcgcacatagccaggacccagaggcgattaggcgaacgggcggcgcggcacgagtcgagttttgaccgtgcggcgcgccgcgcgcgtatcaggcaacaatggagacgccgcgccttgtagtcgggcggcgtcgcggggccactcctcggttccggcggcggcgcctgccgcatccgcgcggcggggcacattgcttccccttcgcccgcgctcgaccacccgtgcttataacccggtgcttctacttcccctcttccagttgcgttcgaatcccacacccagcaccactccgtgcggccacgctctcacaattgctgcgcacgcgcgtgcgtgtatgcgtggctgttcctcagctgttccggtcctcccattcgtgtttcagggtggggaacacggcgattctcgaagctccagtaacgtcaggtaccaggtttgcttgatgagcaacgtgagggtgatgttggggagctctttagcctggctcaatggaatatcctgtgcattaacaagcagcggcttatggccatgggggagccgaagaaactgcaggatgaaaataatttgcttctcgaggaaatacgagtactacaaacagaaataaaaggagagcttcatgtcatttcattaagaagagggattaatctcagattgtactcaatatttgaagaactaaaatgctattgtatttttcaaaacactagaagaattcctgaatcctaattttctgagcctgctgagccaatcacctgcgactgtgttagattctggttcccacacctgtgtcctggtaacactattcctgcctatgttggactcctatatggctatatccacgtgagtgagcttgaagatactcacaaacatggcaacttgtatatgcttcccactgatgtttcacccagtataactgcaattactttataatagtcaagtggcatatttgatttgagtcttttgatgtcatatttgttgatgctatatttgagactatgttcaatgcaggaaacatcttcatattgtgtatatctacagtaaaatttactcaataacatcatgtggatcattatcaacctatgttgtcagtttttatcttgtgagattcaaaaatgggtaatttggtggaggtgatactacccaagtatgcaacttctcttcactaactaaacctttcgtatataatacttgatagactgtttggacaccttaagcttttatgttgtagcggtaccattagtcatatgaatggggaagtttcttttgagttgatttaatgtaaaaaatgatgagcaatataaatttataacatgcttctaagcttccttttagttattactatgtacgagtaaactcctgaaatttgaatattaatatccaggcgagacatttttttgctcattctagatggatgctctaaactggacattcttctgaaggtttgaatttgattgtcaacttttagttttgatgacatagttcttaactgtgttttttattccatcaggacagcacgtcccaaatgattttgtgttaactagcaaacagttcgagataacttatgttttgcagtattgtcatattggtatatagtctacaattttcttctcttctcgttcttgctcacatgtgttacatttgaaattcgttataaaccttattaatatggactgtttttggcttgtgccacatttacatcttgcttattgcacgcaaagctatcatgctcaccgcattggtacggcacaaaataggtacatcagcataaacgtggatgtaattcatgatgtaaggagagctgaggcagagtatgaatcttatattttgctggtctttgccataataacaaaatatggactgggtaaagatacactcctagtgtgcaaaaagacgtaacaggtcctattatcttatctcgctattctcttattttagctgatgcttctgtatttgtgtagttctacaggcattttactcctaattttgcctcttttatgcagtacatcaactggtggtggtctttactattagaaccatctcagctctcctatttcagtcgttatatgttgttatatgttacatggctaccctgacgactttgagcgatatgtaggagtattagatttggggactattgtctcccccgttgaccttccaaatatatatttcaggacacaaaacataaagggaaatataaaagtctgttgtggttattttctagcccactgctgtgtctcttatttctctttgtgtgcagatgaaggcaataaagtatggatctgtgccagtacagataagctttcccagcgatgaatcaagggagtcggaggagcatgattggcacaatacagcactgtctcagtacatcatctcaacctatggagatccgtctctttctcaagtacttgatgactttaacaatgacccattgcattgtcagacctcgccggagaagcaacctcctgttgccggcgagctcaccctgctggtcacagaaaagactcacgcacacacacgaacacaagtgggcacactctgatttggtgctgtgaacaaccaacagcttttctgactctatttctctgtatataaagagacgtgtacagaccatgagcttacaacctgacagtttaccgcttaaagaaaggaaaaagaaatgtggggcacgatcaccctgatttgcaggccatgcccctcatcgttgagtgcca

SEQ ID NO: 9329 - DNA, 2555 bp, Zea Mays
cctctctcttcgcccacccccacattattctctccccaaatctgaccttccctcgtgcgaggcctcacctcttccgacgcgacgcgatacgcaccacacgcggagaccaagccgagcccatctagggttagcgtcccactgcggcggccatggacgaggcagcgacagcggccctggcggcggcgagggggcggtggacgcagtgggaggaggtggtggtgtccaacgaccgcggcagccgcctcgtgcactactacctccgcggcaacagcgaggagaagcagctggcggtggttgggcgggagcggagcccgcgtcacatgtcgtacgccgtgcaggggcggttcctccgcgcgctcgcggctgccgccggggcggtcgccgtcgcgccgtcgccatcacggtcgcctctgccggctgctggggcggacggcggcgctccgaggaggtggcggtccagacgggaggtcgtggactggctgtcctccctcgtttctggtcataattatggttcctcctcaatggcaactaggtgcagtagggattcatatgatgacagtgttaacaactgcacacaagttactgcttcgaaggatgtttcttctagggaaccttcaaatgtcttcacatggttaggagctccatgttattgcccacaacgtttgaagcactacaaatctttctgccgtagaggaattactatctcggtgcatagttttgtattcatcatgagtgaagagatgaagagacttattgcttatgtggaagatctctacgaggatacaaactcatgcaacatggtcaaggtacaatggttcgacaaagttgatgaggttggtgttcccttgcccatggatttcgatgacagggagatcttcttctctctgggtcgtcaagatctcaatgtagaatgcattgatggattggctgcagtcctgagtgtccagcactacgagaagttcaagggtgataccagatacaacttgtggcaaccttatttttgctgtcggcagattgataatggtgacatcaaaccttttgatgtcacacagctgcaaggctactggagccaggaagtacttaggaccatgttcaatgcaacttcctctctgaaggttttatggtgagaacatccaacaattgtgtcctggttgccatgtggaagtactctctcaagatagtggtataaggggatgttggtttagatgtttgattctgaagaggcataaagataaaatcaaggtgcgctacctagaacttcaggatgctgatgagactggaaacttggaggagtgggttatgctaacacgagttgccaaacctgatcaactgggtgtacgtttccttggaaggccaatggttcgtccacagcgcgtggaacaaagcaaggcctcatgctttgatgttggagccattgttgatgcgtggtggcatggtggctggtgggagggaatcgtgctgtaccaggtgggcagtgggcgtctacaagtttattttccaggagaaaagcgaacagctgaatttggtgaagatgagctgaggtgttcccttgagtgggttggtaacaaatggaatcctttgaagggaagaaaagatgtcacaagcaagctgacctccactgcagattgtggaagtgaatatttgattgcgaaacaagatccactgaattttcatgtgcctaaaaattcagaacctcaactagagggacatcaatatgacaagagggataacttgaggtggaggccaagaaagaggagcagaagatctggctcaagaaagcagtcggacacaagcagtggaagcagcagcggggacatggacctgttcagccccagccccagtggaagctttggtcaacataatttagtgcctgacgaggagacatgcaagagcagtggagagcagacttttatgggtgtgcctgtgcaggttcccaatcttgtgatgtccaggtgaaagccatcttagcaccggttgaagattaacatgttagcttctggagttacaccgaccttggcgagatgtggttttgtgcatccccaggttatttttgccagcacaacccagatccagttttctgcagtttttttggaggctcatcagctgtgatcagttagatgtgaaaatgtctcaccaagaaccagtatacagtttgtatgtagggagagaagaaaatgctcggtttggttttggttttagagctttcagttttttttcttttcttttcaatcctagtctttgttgtttgaaggacaggtcctagatttgacatagcctctttacatcggttattctttcccatagttgtcagtacttggtagtccttgttttttatttgtccatgcagtcttgtagcagtcgcgcgccttacgtaaaattatcctgaactgaactcagtgaaatgtcacaaaatagtgcttattgcctatttctgtgttcttttaaatgtcagttagggtactagttgggttacattttctcacagtggtgaactttattgggcctgcttctttctgcaccacagcctacggaatggttgtgaattgtgtgttagc

SEQ ID NO: 9330 - DNA, 2865 bp, Zea Mays
tctcttcgcccacccccacattattctctccccaaatctgaccttccctcgtgcgaggcctcacctcttccgacgcgacgcgatacgcaccacacgcggagaccaagccgagcccatctagggttagcgtcccactgcggcggccatggacgaggcagcgacagcggccctggcggcggcgagggggcggtggacgcagtgggaggaggtggtggtgtccaacgaccgcggcagccgcctcgtgcactactacctccgcggcaacagcgaggagaagcagctggcggtggttgggcgggagcggagcccgcgtcacatgtcgtacgccgtgcaggggcggttcctccgcgcgctcgcggctgccgccggggcggtcgccgtcgcgccgtcgccatcacggtcgcctctgccggctgctggggcggacggcggcgctccgaggaggtggcggtccagacgggaggtcgtggactggctgtcctccctcgtttctggaatatggagaatacaggtgtgccccagtggaagcagctgctggcttcctttgggccaattgcataaccttggcatttgggaatagagataagcgaagcagcagcatgaatgtcataattatggttcctcctcaatggcaactaggtgcagtagggattcatatgatgacagtgttaacaactgcacacaagttactgcttcgaaggatgtttcttctagggaaccttcaaatgtcttcacatggttaggagctccatgttattgcccacaacgtttgaagcactacaaatctttctgccgtagaggaattactatctcggtgcatagttttgtattcatcatgagtgaagagatgaagagacttattgcttatgtggaagatctctacgaggatacaaactcatgcaacatggtcaaggtacaatggttcgacaaagttgatgaggttggtgttcccttgcccatggatttcgatgacagggagatcttcttctctctgggtcgtcaagatctcaatgtagaatgcattgatggattggctgcagtcctgagtgtccagcactacgagaagttcaagggtgataccagatacaacttgtggcaaccttatttttgctgtcggcagattgataatggtgacatcaaaccttttgatgtcacacagctgcaaggctactggagccaggaagtacttaggaccatgttcaatgcaacttcctctctgaaggtgcgtttcaaggtccctaaatccagacccagttcagatggagggctgaagaggaagcgtgatgcattcaacgatgatgctaatccacagaagttcatttcttctggtgcttctacttctaggttttatggtgagaacatccaacaattgtgtcctggttgccatgtggaagtactctctcaagatagtggtataaggggatgttggtttagatgtttgattctgaagaggcataaagataaaatcaaggtgcgctacctagaacttcaggatgctgatgagactggaaacttggaggagtgggttatgctaacacgagttgccaaacctgatcaactgggtgtacgtttccttggaaggccaatggttcgtccacagcgcgtggaacaaagcaaggcctcatgctttgatgttggagccattgttgatgcgtggtggcatggtggctggtgggagggaatcgtgctgtaccaggtgggcagtgggcgtctacaagtttattttccaggagaaaagcgaacagctgaatttggtgaagatgagctgaggtgttcccttgagtgggttggtaacaaatggaatcctttgaagggaagaaaagatgtcacaagcaagctgacctccactgcagattgtggaagtgaatatttgattgcgaaacaagatccactgaattttcatgtgcctaaaaattcagaacctcaactagagggacatcaatatgacaagaggggtattgagaaatcttcagtcagcacaatttcacgagatcagaaacgtgtccttgccgacctgactaatgatttgaagttagataacttgaggtggaggccaagaaagaggagcagaagatctggctcaagaaagcagtcggacacaagcagtggaagcagcagcggggacatggacctgttcagccccagccccagtggaagctttggtcaacataatttagtgcctgacgaggagacatgcaagagcagtggagagcagacttttatgggtgtgcctgtgcaggttcccaatcttgtgatgtccaggtgaaagccatcttagcaccggttgaagattaacatgttagcttctggagttacaccgaccttggcgagatgtggttttgtgcatccccaggttatttttgccagcacaacccagatccagttttctgcagtttttttggaggctcatcagctgtgatcagttagatgtgaaaatgtctcaccaagaaccagtatacagtttgtatgtagggagagaagaaaatgctcggtttggttttggttttagagctttcagttttttttcttttcttttcaatcctagtctttgttgtttgaaggacaggtcctagatttgacatagcctctttacatcggttattctttcccatagttgtcagtacttggtagtccttgttttttatttgtccatgcagtcttgtagcagtcgcgcgccttacgtaaaattatcctgaactgaactcagtgaaatgtcacaaaatagtgcttattgcctatttctgtgttcttttaaatgtcagttagggtactagttgggttacattttctcacagtggtgaactttattgggcctgcttctttctgcaccacagcctacggaatggttgtgaattgtgtgttagc

SEQ ID NO: 9331 - DNA, 819 bp, Zea Mays
aaccaacccctatccgccccccgtcttttcccttttctctaccctctatctacccaccgttcccgtctctccgccgcttccttggaagacgaagaaaccctcctccaccaccaacccgatccagctacatccgttgagggccaggagcagctagccgtcttcgttcgatccgttcgcaccccccaacgcggttcgatttgtaaggcaggaaggagcgtgatggccaagacgagctcgttcaagctggagcaccccctcgagaagaggcaatctgaggctaaccgtatcagagagaagtaccctgacagaattccagtgattgttgagaaggctgagaggagtgatattcctgacatcgacaagaaaaagtacctcgtccctgcagatcttacagtcgggcaattcgtgtatgttgttaggaagagaatcaagctcagtgctgagaaggctatcttcatatttgtgaaaaacacccttccaccaacagctgctctgatgtcttcaatctatgaagagaacaaggacgaggatgggttcctctacatgacttacagtggtgagaacaccttcggactgctctagatggcccgcaatggggtcgccttgcccttgcccatgcctcctgtaaataagacctgccaagcaactgtgtatattctggtttcgtcgtcgcaagtggttgcgctctactgctaaagcctacctatcagttgtggagttgtcgtcgatgttatggacacacttaatcaagtttattaattgactggacctgaatcttgggtcagtaatgtgacatctcctatgtcgtttacggttact

SEQ ID NO: 9332 - DNA, 823 bp, Zea Mays
gtttcgtgcccccaaccaacccctatccgccccccgtcttttcccttttctctaccctctatctacccaccgttcccgtctctccgccgcttccttggaagacgaagaaaccctcctccaccaccaacccgatccagctacatccgttgagggccaggagcagctagccgtcttcgttcgatccgttcgcaccccccaacgcggttcgatttgaaggagcgtgatggccaagacgagctcgttcaagctggagcaccccctcgagaagaggcaatctgaggctaaccgtatcagagagaagtaccctgacagaattccagtgattgttgagaaggctgagaggagtgatattcctgacatcgacaagaaaaagtacctcgtccctgcagatcttacagtcgggcaattcgtgtatgttgttaggaagagaatcaagctcagtgctgagaaggctatcttcatatttgtgaaaaacacccttccaccaacagctgctctgatgtcttcaatctatgaagagaacaaggacgaggatgggttcctctacatgacttacagtggtgagaacaccttcggactgctctagatggcccgcaatggggtcgccttgcccttgcccatgcctcctgtaaataagacctgccaagcaactgtgtatattctggtttcgtcgtcgcaagtggttgcgctctactgctaaagcctacctatcagttgtggagttgtcgtcgatgttatggacacacttaatcaagtttattaattgactggacctgaatcttgggtcagtaatgtgacatctcctatgtcgtttacggttact

SEQ ID NO: 9333 - DNA, 3335 bp, Zea Mays
ggcgtccacagggggcgacacccgtgaccctgcccccgttcgacatcagcgctcctccccccgaccaccgtcgatttggtgtctgagccctcgctagatctcgcaccctcaccgaagccctcattggattcgacgccctcactggaggttgcaccgcgatgggatctaggaaccgtagatggcctcgaccacccacgtgggttgttgcctctgcggatgagacgcagcgccaaggggccagaggaaacgacgtgatggacctcatatcacagctcatgtcatggttcatgcctctcatcgcctcccgccgtggttcgccgaggccgccccatgctgcacgccatgggcagcgatgtcgccttcacgaagctcggcatggagtgctaccccaaggaggccaccgctgttggggtcaagggattccccgacatggaaaaataaccgacgacgagatcaatgccgcctccgtcacttgctgccgcatctacctcaggtccgagtctgaacctgattgcagagctgagaacaccttgaagctaggagatgtcatccagtaccatgaatgtggttaccgcattctctataagaagcgggcaccgatccatgtgtagtaccagcaaacttcccattttctatgactccaaggccttatgtcatccagcaatggcagttgccgttcagtttggactatagaattcaattatgagttcagtttgttgatattaaaggaaagatacaggtcagcctcttttacttaacaaggattcatacttaaatacttaacaaggattcatacttaaatttatctgatgcaatttttcaactgaacgtgaacttggcaggggtgagtacggagtagtgtacaagcgagttctgcattgagctgtcgtagagagcgtagacagacactctagccaacgttgttggctgggattggaacacaaaagcgagacaagggatgagaagcacaggaggagccaggtgaggtgaggtggcgacacacaggagtcgggcaagctcagctcatctcatctcatgctctactaaaaaggattagcccatctcaagagaaaagagtaacattgtcagcccactgcaataaccacactattaccagtcttgaaattcactttttgtttgtttgtcatagaaccagggattcatgacaggaaatgatctccttctcaagataagaaaattgcatttaagttactaatcagtgtatggtttactagtttggcggaggcctcaatccgggtctagaccaaggtcatggtggcgacgaaggtggaggccgaggtggagggtgatgcttccactctcagtcttggggtggggtcgtggggatgacatatgagagtggggtgcagtggtggctcgtcgacatcagccattggcacccttcccctgcccagttcgatgatgcaccctccctcctactacttcacgatggcaccaccatctccaggtaccgtgccgatggaggaaaggagaaacaaggtattttgaagattaagagtgatgccacatacttagcgatggggtgcttgatatcctagatattgtactagcttcagacctcgccgaattgacaccttcgaagaaatgaagtcgccagattggtaggctttgagtgtttcaccagaggaagtatgtagtgcagttaaggaaggaaatgaacttccatcagacttgatagacacactactaaagtggatcccaagcaatgatgaggagcttaggcttcgactgtcctcccatagcaccgccacaccgcatgcgtccgcggcggcgtccgcctcggcgccggtctcgcacaccgctccctagctggggaagttcatcgcctccgagcccttcaacgtggggggattcgattgggcgatctacttctaccccgatgggaagagcggcgaggatggcgttgtctacgtctcgctcttcatagccctggccagcgaaggcaccgatgtgcgcgcgctgttcgaggtcacgctcgtcgaccagagcggcaaggggcaagacaaggtgcatacccactttgggaggtctctcgagagcgacccatacaccctcaagtaccgcgacagcatgtgatgagtctatgtacaggttgtttcctacggtatgcttatctatggtggaaagaaaaagtgattgactcatacttgaaaagaaaagatggcctttgcccattgacgcctgagacaaccagaaatttgccatgacctcgttcctgaccaagaaaaactgtcaagcacagaatcacagttgatatattgggattccaaggtatcagaggctgatatggatgcaatgtggaaacatcctgatgtgtataaggagtggataaaatctggtgagagacgtggaaatgtacgattctcccatgatgcaaagaacatgccttacctttctcgcgtcgaggtgaaggatatgattgccttctcatgttgtgtatatgatggtggtgatgaggagaaggaaatggatgcagccagagaaataggttggagagggaaatttactaagagaggacgtgtaataagaccaggaattattagaatgagtggaaaatgtcctcttacacctttggaggttgggttaatgcttcgtggaatggatttcagcaataagactgcaatctttttggcatctggaaagatttacaaagcagagaagaacatggcttctcttcttgaaatgtttcctctcctacagacaaaagagacactggcatcagaagaggaacttgctccattcaagatggctgctgttgactatagtatttgtgcccaaagtgaagtttttgtgaccacacaaggtggaaatcccgcattttttatgggtcacaggagatacttgtatggtgggcattcaaaaacaattaaaccagacaaaagaaggcttgctgtactcttcaataatccacgtatagggtggacggcattgaagcggcacttgcttaatatgagagcatacagtgatgtcaaggggatcgaaatgaaaagaccaaacgaatctatatataccttcccgtgtcctgactgcatgtgccgcttgaacagaacagaacactcgaaatccaaacagagtagatagtatatttcgtatgtagaccaaatggctaaaaccatccaatattttcatagactgaaaatgcagagaaagcaacaaaggtgtatcaatacagtcgtacaagcttagtatcggatggtttttaatttgtatagcaaagcacgggcacatacctatatatcttttaatgtatgtaaatattcttaacctttaaaagatactaacaagcaggtataacgataattaatgtttctata

SEQ ID NO: 9334 - DNA, 3339 bp, Zea Mays
caggcgctggaggcgtccacagggggcgacacccgtgaccctgcccccgttcgacatcagcgctcctccccccgaccaccgtcgatttggtgtctgagccctcgctagatctcgcaccctcaccgaagccctcattggattcgacgccctcactggaggttgcaccgcgatgggatctaggaaccgtagatggcctcgaccacccacgtgggttgttgcctctgcggatgagacgcagcgccaaggggccagaggaaacgacgtgatggacctcatatcacagctcatgtcatggttcatgcctctcatcgcctcccgccgtggttcgccgaggccgccccatgctgcacgccatgggcagcgatgtcgccttcacgaagctcggcatggagtgctaccccaaggaggccaccgctgttggggtcaagggattccccgacatggaaaaataaccgacgacgagatcaatgccgcctccgtcacttgctgccgcatctacctcaggtatatcgcaagttcttcggcgggtactgcaactgctcataccatgattgcagagctgagaacaccttgaagctaggagatgtcatccagtaccatgaatgtggttaccgcattctctataagaagcgggcaccgatccatgtgtagtaccagcaaacttcccattttctatgactccaagtttggactatagaattcaattatgagttcagtttgttgatattaaaggaaagatacaggtcagcctcttttacttaacaaggattcatacttaaatacttaacaaggattcatacttaaatttatctgatgcaatttttcaactgaacgtgaacttggcaggggtgagtacggagtagtgtacaagcgagttctgcattgagctgtcgtagagagcgtagacagacactctagccaacgttgttggctgggattggaacacaaaagcgagacaagggatgagaagcacaggaggagccaggtgaggtgaggtggcgacacacaggagtcgggcaagctcagctcatctcatctcatgctctactaaaaaggattagcccatctcaagagaaaagagtaacattgtcagcccactgcaataaccacactattaccagtcttgaaattcactttttgtttgtttgtcatagaaccagggattcatgacaggaaatgatctccttctcaagataagaaaattgcatttaagttactaatcagtgtatggtttactagtttggcggaggcctcaatccgggtctagaccaaggtcatggtggcgacgaaggtggaggccgaggtggagggtgatgcttccactctcagtcttggggtggggtcgtggggatgacatatgagagtggggtgcagtggtggctcgtcgacatcagccattggcacccttcccctgcccagttcgatgatgcaccctccctcctactacttcacgatggcaccaccatctccaggtaccgtgccgatggaggaaaggagaaacaaggtattttgaagattaagagtgatgccacatacttagcgatggggtgcttgatatcctagatattgtactagcttcagacctcgccgaattgacaccttcgaagaaatgaagtcgccagattggtaggctttgagtgtttcaccagaggaagtatgtagtgcagttaaggaaggaaatgaacttccatcagacttgatagacacactactaaagtggatcccaagcaatgatgaggagcttaggcttcgactgtcctcccatagcaccgccacaccgcatgcgtccgcggcggcgtccgcctcggcgccggtctcgcacaccgctccctagctggggaagttcatcgcctccgagcccttcaacgtggggggattcgattgggcgatctacttctaccccgatgggaagagcggcgaggatggcgttgtctacgtctcgctcttcatagccctggccagcgaaggcaccgatgtgcgcgcgctgttcgaggtcacgctcgtcgaccagagcggcaaggggcaagacaaggtgcatacccactttgggaggtctctcgagagcgacccatacaccctcaagtaccgcgacagcatgtgatgagtctatgtacaggttgtttcctacggtatgcttatctatggtggaaagaaaaagtgattgactcatacttgaaaagaaaagatggcctttgcccattgacgcctgagacaaccagaaatttgccatgacctcgttcctgaccaagaaaaactgtcaagcacagaatcacagttgatatattgggattccaaggtatcagaggctgatatggatgcaatgtggaaacatcctgatgtgtataaggagtggataaaatctggtgagagacgtggaaatgtacgattctcccatgatgcaaagaacatgccttacctttctcgcgtcgaggtgaaggatatgattgccttctcatgttgtgtatatgatggtggtgatgaggagaaggaaatggatgcagccagagaaataggttggagagggaaatttactaagagaggacgtgtaataagaccaggaattattagaatgagtggaaaatgtcctcttacacctttggaggttgggttaatgcttcgtggaatggatttcagcaataagactgcaatctttttggcatctggaaagatttacaaagcagagaagaacatggcttctcttcttgaaatgtttcctctcctacagacaaaagagacactggcatcagaagaggaacttgctccattcaagatggctgctgttgactatagtatttgtgcccaaagtgaagtttttgtgaccacacaaggtggaaatcccgcattttttatgggtcacaggagatacttgtatggtgggcattcaaaaacaattaaaccagacaaaagaaggcttgctgtactcttcaataatccacgtatagggtggacggcattgaagcggcacttgcttaatatgagagcatacagtgatgtcaaggggatcgaaatgaaaagaccaaacgaatctatatataccttcccgtgtcctgactgcatgtgccgcttgaacagaacagaacactcgaaatccaaacagagtagatagtatatttcgtatgtagaccaaatggctaaaaccatccaatattttcatagactgaaaatgcagagaaagcaacaaaggtgtatcaatacagtcgtacaagcttagtatcggatggtttttaatttgtatagcaaagcacgggcacatacctatatatcttttaatgtatgtaaatattcttaacctttaaaagatactaacaagcaggtataacgataattaatgtttctata

SEQ ID NO: 9335 - DNA, 3474 bp, Zea Mays
cgcaggcgctggaggcgtccacagggggcgacacccgtgaccctgcccccgttcgacatcagcgctcctccccccgaccaccgtcgatttggtgtctgagccctcgctagatctcgcaccctcaccgaagccctcattggattcgacgccctcactggaggttgcaccgcgatgggatctaggaaccgtagatggcctcgaccacccacgtgggttgttgcctctgcggatgagacgcagcgccaaggggccagaggaaacgacgtgatggacctcatatcacagctcatgtcatggttcatgcctctcatcgcctcccgccgtggttcgccgaggccgccccatgctgcacgccatgggcagcgatgtcgccttcacgaagctcggcatggagtgctaccccaaggaggccaccgctgttggggtcaagggattccccgacatggaaaaataaccgacgacgagatcaatgccgcctccgtcacttgctgccgcatctacctcaggtatatcgcaagttcttcggcgggtactgcaactgctcataccatgattgcagagctgagaacaccttgaagctaggagatgtcatccagtaccatgaatgtggttaccgcattctctataagaagcgggcaccgatccatgtgtagtaccagcaaacttcccattttctatgactccaagcaatggcagttgccgttcagtttggactatagaattcaattatgagttcagtttgttgatattaaaggaaagatacaggtcagcctcttttacttaacaaggtaagagctctaaatttatgttagtatagtagaagtttttttgttgtaaatatcacttgcatatacgccagctagatgctcactatttgtcctctctcaaggtctcaatctgtctgatgtttattcaaccgattagctatcatcataaacctgaataacattttgctttgttcatgttcaggattcatacttaaatacttaacaaggtaagagctctaaatttatgttagtatagtagaagttttttttgttgttgtaaatatcacttgcatatacgccagctagatgctcactatttgtcctctctcaaggtctgaatctgtctgatgttttattcaactgattaactatcatcataaacctgaataacattttgctttgttcatgttcaggattcatacttaaatttatctgatgcaatttttcaactgaacgtgaacttggcaggggtgagtacggagtagtgtacaagcgagttctgcattgagctgtcgtagagagcgtagacagacactctagccaacgttgttggctgggattggaacacaaaagcgagacaagggatgagaagcacaggaggagccagtttggcggaggcctcaatccgggtctagaccaaggtcatggtggcgacgaaggtggaggccgaggtggagggtgatgcttccactctcagtcttggggtggggtcgtggggatgacatatgagagtggggtgcagtggtggctcgtcgacatcagccattggcacccttcccctgcccagttcgatgatgcaccctccctcctactacttcacgatggcaccaccatctccaggtaccgtgccgatggaggaaaggagaaacaaggtattttgaagattaagagtgatgccacatacttagcgatggggtgcttgatatcctagatattgtactagcttcagacctcgccgaattgacaccttcgaagaaatgaagtcgccagattggtaggctttgagtgtttcaccagaggaagtatgtagtgcagttaaggaaggaaatgaacttccatcagacttgatagacacactactaaagtggatcccaagcaatgatgaggagcttaggcttcgactgtcctcccatagcaccgccacaccgcatgcgtccgcggcggcgtccgcctcggcgccggtctcgcacaccgctccctagctggggaagttcatcgcctccgagcccttcaacgtggggggattcgattgggcgatctacttctaccccgatgggaagagcggcgaggatggcgttgtctacgtctcgctcttcatagccctggccagcgaaggcaccgatgtgcgcgcgctgttcgaggtcacgctcgtcgaccagagcggcaaggggcaagacaaggtgcatacccactttgggaggtctctcgagagcgacccatacaccctcaagtaccgcgacagcatgtgatgagtctatgtacaggttgtttcctacggtatgcttatctatggtggaaagaaaaagtgattgactcatacttgaaaagaaaagatggcctttgcccattgacgcctgagacaaccagaaatttgccatgacctcgttcctgaccaagaaaaactgtcaagcacagaatcacagttgatatattgggattccaaggtatcagaggctgatatggatgcaatgtggaaacatcctgatgtgtataaggagtggataaaatctggtgagagacgtggaaatgtacgattctcccatgatgcaaagaacatgccttacctttctcgcgtcgaggtgaaggatatgattgccttctcatgttgtgtatatgatggtggtgatgaggagaaggaaatggatgcagccagagaaataggttggagagggaaatttactaagagaggacgtgtaataagaccaggaattattagaatgagtggaaaatgtcctcttacacctttggaggttgggttaatgcttcgtggaatggatttcagcaataagactgcaatctttttggcatctggaaagatttacaaagcagagaagaacatggcttctcttcttgaaatgtttcctctcctacagacaaaagagacactggcatcagaagaggaacttgctccattcaagatggctgctgttgactatagtatttgtgcccaaagtgaagtttttgtgaccacacaaggtggaaatcccgcattttttatgggtcacaggagatacttgtatggtgggcattcaaaaacaattaaaccagacaaaagaaggcttgctgtactcttcaataatccacgtatagggtggacggcattgaagcggcacttgcttaatatgagagcatacagtgatgtcaaggggatcgaaatgaaaagaccaaacgaatctatatataccttcccgtgtcctgactgcatgtgccgcttgaacagaacagaacactcgaaatccaaacagagtagatagtatatttcgtatgtagaccaaatggctaaaaccatccaatattttcatagactgaaaatgcagagaaagcaacaaaggtgtatcaatacagtcgtacaagcttagtatcggatggtttttaatttgtatagcaaagcacgggcacatacctatatatcttttaatgtatgtaaatattcttaacctttaaaagatactaacaagcaggtataacgataattaatgtttctata

SEQ ID NO: 9336 - DNA, 1610 bp, Zea Mays
actagatagatgctgtcatgctgaggacgaaggcaagcatgttgggcacagcgccatagtatcaaactatcattttgagccgtttcgcgtaccctaaaatcagtggcaacagcgccatagcatcgtcaactccatcaagccgttaccatcaacaacgattgcttgctgccgactgccaagcggggccggtcaatccagaagttggcagcctccaatcgcagcatccctccgagatcgctgccccgtccccctcccccggcttatcccctatcccctcctcccccgctccttccacacaaacctccatgccccttcttcctctcctccccgtcatggcttccaccttctcccccacttccgccgcgagggccctcctcccgggctccacctcccgcccactcttcctcgccgcttcagcttcctcagggcgcattcaaccatccaggaagggactggacttccgccgcggccgattcaccgtctgcaatgtcgccgctcccaccgccgccgaacaggagacccagcgccccgtgtacccgttcgcggccatcgtggggcaggacgagatgaagctctgcctgctgctcaacgtcatcgaccccaagatcggcggcgtcatgatcatgggcgacaggggcacggggaagtccaccaccgtccgctccctcgtcgacctgctcccggacatccgcgtcgtcgtcggcgaccccttcaactccgacccggacgaccccgaggtcatgggccccgaggtccgccagcgggtcctgcagggggacaccggcctccccgtcaccaccgccaagatcaccatggtcgacctgcccctcggcgccaccgaggaccgcgtctgcggcaccattgacatcgagaaggcgctcaccgagggcgtcaaggcgttcgagcccggcctgctcgccaaggccaacaggggcatactgtacgtcgacgaggtcaacctgctggacgaccacctcgtcgacgtgctgctggattccgctgcgtcggggtggaacacggtggagagggagggtatctccatatcccaccctgctcgcttcatcctcatcggctctggtaacccggaggaaggggagctcaggccccagctgctggaccggttcgggatgcacgcgcaggttggtaccgtcagggacgccgagctcagggtgaagatcgtggaggagagggctcgtttcgacagggatccgaagacgttccgtgagtcgtatcatgacgagcaggagaagctccagcagcagatatcatctgcacggagtaaccttggcgctgtgcagattgaccatgacctccgtgtcaagatatccaaggtgtgctctgagttgaacgttgatggactcagaggtgacattgtgactaacagggctgccaaggcgctggctgcgttgaaaggaagggacagcgtcaccgtggaggacattgctactgtcattccaaactgcttgaggcatcggctccgcaaggatccgcttgaatccattgactcgggtttacttgtcattgagaagttttatgaagtctttagctagattgttcttgagattaaagctgccatgccatgctccatttactcatgtttttgtccctgg

SEQ ID NO: 9337 - DNA, 1850 bp, Zea Mays
actagatagatgctgtcatgctgaggacgaaggcaagcatgttgggcacagcgccatagtatcaaactatcattttgagccgtttcgcgtaccctaaaatcagtggcaacagcgccatagcatcgtcaactccatcaagccgttaccatcaacaacgattgcttgctgccgactgccaagcggggccggtcaatccagaagttggcagcctccaatcgcagcatccctccgagatcgctgccccgtccccctcccccggcttatcccctatcccctcctcccccgctccttccacacaaacctccatgccccttcttcctctcctccccgtcatggcttccaccttctcccccacttccgccgcgagggccctcctcccgggctccacctcccgcccactcttcctcgccgcttcagcttcctcagggcgcattcaaccatccaggaagggactggacttccgccgcggccgattcaccgtctgcaatgtcgccgctcccaccgccgccgaacaggagacccagcgccccgtgtacccgttcgcggccatcgtggggcaggacgagatgaagctctgcctgctgctcaacgtcatcgaccccaagatcggcggcgtcatgatcatgggcgacaggggcacggggaagtccaccaccgtccgctccctcgtcgacctgctcccggacatccgcgtcgtcgtcggcgaccccttcaactccgacccggacgaccccgaggtcatgggccccgaggtccgccagcgggtcctgcagggggacaccggcctccccgtcaccaccgccaagatcaccatggtcgacctgcccctcggcgccaccgaggaccgcgtctgcggcaccattgacatcgagaaggcgctcaccgagggcgtcaaggcgttcgagcccggcctgctcgccaaggccaacaggggcatactgtacgtcgacgaggtcaacctgctggacgaccacctcgtcgacgtgctgctggattccgctgcgtcggggtggaacacggtggagagggagggtatctccatatcccaccctgctcgcttcatcctcatcggctctggtaacccggaggaaggggagctcaggccccagctgctggaccggttcgggatgcacgcgcaggttggtaccgtcagggacgccgagctcagggtgaagatcgtggaggagagggctcgtttcgacagggatccgaagacgttccgtgagtcgtatcatgacgagcaggagaagctccagcagcagatatcatctgcacggagtaaccttggcgctgtgcagattgaccatgacctccgtgtcaagatatccaaggtgtgctctgagttgaacgttgatggactcagaggtgacattgtgactaacagggctgccaaggcgctggctgcgttgaaaggaagggacagcgtcaccgtggaggacattgctactgtcattccaaactgcttgaggcatcggctccgcaaggatccgcttgaatccattgactcgggtttacttgtcattgagaagttttatgaagtctttagctagattgttcttgaggtttatcaatttcagagccttcagtatcttcacacatgtttcagttagctagttttatcttccaactttttttttctaatgcctattcatcgaaggcattgaatcttaaagtttcctgtgctcatttcttcatggtctgtcaatggagaatgatacgttgtgagccccgatatgacaacatgttgatttcttaacacttttttctaatagattcgccagcaaattatgcgacttatctgtttcctactctcaatttcgatagggactataactggttgttttgtgggt

SEQ ID NO: 9338 - DNA, 1874 bp, Zea Mays
actagatagatgctgtcatgctgaggacgaaggcaagcatgttgggcacagcgccatagtatcaaactatcattttgagccgtttcgcgtaccctaaaatcagtggcaacagcgccatagcatcgtcaactccatcaagccgttaccatcaacaacgattgcttgctgccgactgccaagcggggccggtcaatccagaagttggcagcctccaatcgcagcatccctccgagatcgctgccccgtccccctcccccggcttatcccctatcccctcctcccccgctccttccacacaaacctccatgccccttcttcctctcctccccgtcatggcttccaccttctcccccacttccgccgcgagggccctcctcccgggctccacctcccgcccactcttcctcgccgcttcagcttcctcagggcgcattcaaccatccaggaagggactggacttccgccgcggccgattcaccgtctgcaatgtcgccgctcccaccgccgccgaacaggaggcgacggcgtcggccgcgaaggagacccagcgccccgtgtacccgttcgcggccatcgtggggcaggacgagatgaagctctgcctgctgctcaacgtcatcgaccccaagatcggcggcgtcatgatcatgggcgacaggggcacggggaagtccaccaccgtccgctccctcgtcgacctgctcccggacatccgcgtcgtcgtcggcgaccccttcaactccgacccggacgaccccgaggtcatgggccccgaggtccgccagcgggtcctgcagggggacaccggcctccccgtcaccaccgccaagatcaccatggtcgacctgcccctcggcgccaccgaggaccgcgtctgcggcaccattgacatcgagaaggcgctcaccgagggcgtcaaggcgttcgagcccggcctgctcgccaaggccaacaggggcatactgtacgtcgacgaggtcaacctgctggacgaccacctcgtcgacgtgctgctggattccgctgcgtcggggtggaacacggtggagagggagggtatctccatatcccaccctgctcgcttcatcctcatcggctctggtaacccggaggaaggggagctcaggccccagctgctggaccggttcgggatgcacgcgcaggttggtaccgtcagggacgccgagctcagggtgaagatcgtggaggagagggctcgtttcgacagggatccgaagacgttccgtgagtcgtatcatgacgagcaggagaagctccagcagcagatatcatctgcacggagtaaccttggcgctgtgcagattgaccatgacctccgtgtcaagatatccaaggtgtgctctgagttgaacgttgatggactcagaggtgacattgtgactaacagggctgccaaggcgctggctgcgttgaaaggaagggacagcgtcaccgtggaggacattgctactgtcattccaaactgcttgaggcatcggctccgcaaggatccgcttgaatccattgactcgggtttacttgtcattgagaagttttatgaagtctttagctagattgttcttgaggtttatcaatttcagagccttcagtatcttcacacatgtttcagttagctagttttatcttccaactttttttttctaatgcctattcatcgaaggcattgaatcttaaagtttcctgtgctcatttcttcatggtctgtcaatggagaatgatacgttgtgagccccgatatgacaacatgttgatttcttaacacttttttctaatagattcgccagcaaattatgcgacttatctgtttcctactctcaatttcgatagggactataactggttgttttgtgggt

SEQ ID NO: 9339 - DNA, 2403 bp, Zea Mays
tgtttcatccatcgtttctcaatgaagtctatgattctcttaagttgttgctgactacacatataaccagtcaacaaaagaaaatgtcttgagcatgctggggtcaatgactaaggttttgcagtcatcttctgataaaacatctttagacactaaagaggaaaataagttttttgagtccgatatactggataaagtgtggcacatcctttatgatgattgtctgtatgctcttggtacttgtgtggaaggggaactcaagcatttccacaaggcgagatacaagcttgcgcaaggatattatagaagaggtgaagcaggggacctggaacgggctaaggaagagctctcgttctgtttcaaatcttctcggtcttcctttacagtaaacatgtgggagattgatggcactgttagaaaaggaaggaggaaaaatccaaatgtgggtggatccagaaagaatctggaggtcagtttgtcagaaagttcacggaaattcattacgtgcattagaaaatatatgatactctatttaaacctgctggagaagaacacggacctgtggactcttgagaaggcttatacttatctgcgaacagataagaggtttgcattgtgtttaggtgatattgttcctgttggtcttgggaagtatattctagttctaacggcagcaattcataatcctgagattcgtcgagcttctggtgatgcttctgttgagcaattacttgagaaaatgttcactgtattcatggatcatgcgaacatgtgggctgatataagcaatataccagaggtgaacagtccagaattatcagaaagcaatctttacagctatatccaccagtacatccatttgctcgagagtgatgtacgactagatgttctagaaggactaaacgagaagataagaaagcgtttcaagacaccgaagttatcaaatagtaacttcgctaagatatgcaagcatgcttctctggcatggtgccggtgtattctcatcaaactggcctcaatcactccactgcctgaatccgcagatgcaaccaatcagcctgcaccattatccaatgggcttctactctatgttgacttgcaacctgatgagcttcttatctcatcccctgatgggcctgctcaattcaaagggcttgacatgaactggtttgagacacttaacagaattaaaaacatcccggtcaagcaaacatccgaagataacttggagactgctgttacgttaatgaagagcacttataacttttatcgggagagcccttgtggaacatttccttcaggtatcaatctctacacggttacaccatcacaagctcctattgaagggctaccgccaaccgctgctgtagttgagacgctcgacttaagtattccaagaaaactccttctgtgggtatacactctggttcatggtcgttactcaaatatatcctccgttgtaaagtattgcgacgagatgaagttaagaagtaaaagaggaaccccagctgcgtctgcttcgtcacaagttgtgcagccagtgtcgcatagtaccgtttcttcccaagttgtatctaaagaaaagagctcccaagttgaacccgctgaagcagcacaaaatccttctgatctagctgccacttgcgttcctgcataccaagaagttggtggtgctagtgcctcgcaaagtgccattgaggcccagaaagctactgctgcggcatctcagctcactcgcagtggttcatcaagggcaatggaaaatgcacaggacggcggggagaggaagtaacgagatagagttcgattttttttatcctctatgctacatcgtatggatgcatatgatcctgcctgacgattctcaggtctcagctctccgtggctccgtgtgcaaatctctgccacgggcgtgttttaacgcctgattggatggttgcccgctggcgcgcccggccagcctcgtacggccacttcggacgcatctgcatcttcggaggtacccgcagatgtagatgaatggccgtaaaatggtttggtctgcgtctctttacatataaccaaataaaaactcagataaagttaactcatgtggtggtctatgttgagatgatgcgggtaaccaatcgaacggttaacaaattcaggtcgtatgtatatcctggtttacagttagtgtttcctaagtgcatttgtagattatagagctgtcaagattgaacgatacatctgtaaggtgttacaaatgctaaatgctaatcctgattttgtggctgatgctaaaaacctgtggactcttaattaccacagactgaactttccctcattttggcccaacaaatacaatagcagaggaagagtttcagttggatttggtggaacggtaggagcgtaaaatatcac

SEQ ID NO: 9340 - DNA, 2108 bp, Zea Mays
tttaccttccaggcagctgctgggctcgtgacccacgccgtctcggaccaacccgagcgccgaaccccaaggctcgcgaccgcgacactcttgtgtcctcctgctctccagatctcgccgtcggcggcggcatgctcccctccaccgtcggcggccgcggccgctacctcatgctcggcatcgcccttgccctcgctgccctgctcgcgctcgcctccgcttccgagtccgaccacaagtacaaaactgaagagccagttaagctttgggtgaataaagttggcccttacaacaatcctcaagaaacttacaactactacagccttccattttgtcaaccgtctgagaaccctacacataaatggggtggtcttggagaggtcctgggtggaaatgagctgattgatagtcagcttgaaataaagttcttaaaaaacgtggagaagggcttcatttgtacacttgagctagatgctaaaaaggtccagcagtttgctgatgccattgaaagctcatattggtttgaattttttatagacgatctgcctctttggggttttgttggggagactgacaagaacagtgaaaacaagcattatctttacacgcacaagaacatccttgttaaatacaatgataacaggataattcatgtaaatctcacccaagagtctcctacgcttcttgaagatggtaagaaattggaaatgacatattcagtgaagtgggtagcgactgatgtgtcatttgcacgccgttttgaagtgtacctggactatcctttctttgaacaccagattcactggttctccattttcaactctttcatgatggttattttcctaactggtttggtttcgatgatattgatgcggactttgagaaacgattatgccaaatatgctcgtgaagatgatgatctagagtccctggcgaggggctatcatcacaaccttcattgtgtgctatgctcttacatcttttatttctggatatgttagtggtggtctttactcaaggaatggtggcaaaaactggattaaagcgatggttcttacagcgtccctgtttccgttcttgtgtttctcaattggcttcgcgctgaatacaattgctattttctaccgctcattagcagcaataccatttggaacaatggttgtcatgtttgtactttgggctttcatctcctttcccttggtgcttttgggaactgtcgttggtaggaactggagtggagctcctaacaatccctgccgagtaaagactattccacggcctattcctgagaagaagtggtaccttacaccttctgtcatctcattgatgggtggcctgcttcccttcggtagcatcttcattgagatgtactttgtgttcacatcattctggaactataaggtgtattatgtctatggcttcatgttgctggtctttgtcatccttcttatagtcaccatctgcgtcactattgtgggtacttatttcttgctgaacgccgagaactaccattggcaatggacgtcgttttcttctgcagcctcaaccgctctgtacgtgtatctgtactccatctactactaccatgtgaagacaaagatgtcaggcttcttccagacaagtttctatttcggctacacgctgatgttctgccttggcctaggcatactttgtggagctattggctatctagggtcaaccctttttgtaaggagaatctacaggaatatcaaatgtgattaaatccctgctgcttaagctagcaacagaaaaatcatatgtattgtcaggaggcatggcctaaaaaaatggattttaatggtagaccctgattttggaactgctgaggacttgctcccctttgttcgttgttatacgcatttttgtttgcctgcttattcctgcgagatcgtcctcgcaatgtatacctgtgatagtcgagcattagtctggagcacctgtgttcatcattctcttttttttttgtttctgttactttattcggtaggatgtaatcagtgaatgttcgtgcggcgctctactaattaaggcaacaaggggtaggctccttcctctggtcttgttgttatgccttccttcaatctatc

SEQ ID NO: 9341 - DNA, 4335 bp, Zea Mays
ttgagaccggctaatcgaaagaaaaaaaaaaacagccgccacggatctcctccgctgagtcattttgtagccgaaaccctagcgctccgccgaggcgccgagcaccaggctccagcctcgcctaagaaaaagccgaggccgagacaaactacttgtactaactcagctgctatgccatggatctggagatcgttgggcggtgtgccttactgttcgacgatgacgcgacaacggaggtcgtcaactccggcggttccttgtcccctgggcggccatcggcgcagcagacctcctcctcgaccgccacgacatccgccacctccttgaccgcgtgccccctcccccgcgtcgcgcctactcagtggccctcctctccacgccctcccccgacggcgtctctgagagtctgagaccgagcccgatcgcgagcgctatctggacgtcccggctggcgacggtgaatacgagggttctggagatgcagccccctcaggtataaatggatcttcctttgcgccgtctcctctatcctctcgtatctgtagctgtcagcttcttcattccttttttgtgtgtgtctagcttctgccttaccctttgtggatatatttgagctccagtttagtttgttccattctacgttttgagtgtcgttctgccgacgttgtttcgttctatgtttcgtcatgtgtcaagctgtcaatgagtcattattctacatttttcggactcatcagcttgagtcttacgggtgtttgaatgcactagaactaatagttagtgactaaaattagttgagacatttaaacaccctagctaataattcagctattagctatttttagtaagacaccgatggctatgcaagcagtggttctgtgcaagcgtgcaagcaaaccatttgatccattacattacgattcaaccacagatacaaccatggtttgttaggagctattttataaagattattgttgagacatttaaacaccctagctaataattcagctattagctatttttagtaagacaccgatggctatgcaagcagtggttctgtgcaagcgtgcaagcaaaccatttgatccattagattacgattcaaccacagatacaaccatggtttgttaggagctattttataaagattattgagctagtggtggaagagtttaagtgttaaatgtgatttacggttggatcacgatctaatggattagatggtttggttgcacgtttgcacaaaaggactgcttgcatagcggtcgttgccttttagtaaattagttaaggattttttaaactggtgctctcggttttgttgttctcatttttactcttagttgtgttttttttgctcagttttgtccttctgttctatagcactggaagggcaaaactgagaaaaaaacacaactaagagtaaaagtgagaaaacctgcaaaaccgaggatacaacttaaaaaacccattagttaatagttatgtagctatttgttagctagctaattccactaataacttttagtcaactaactactagttctagtgcattcaaacacccccttaaactttataaggattttttcagatattactcccttatatatgacgtacaagcatatcacacgtacatattatcttctctgctgtttgatttttttggttaccagcagactaatgtcgtactaactgtgttttcttgtaaacaaacaaggttcatagcatatatccagttgtatccaaataacagtatcgctgccacatgtttaaagctagcagtgttcattgtacatatgtgtttttccattgtgtacttttaacgttgcaggaaggatgctttgattagttcatgagcatctttaatcatttcaagtaagaaggtttcttctgttgctcggaagatataattttgcctgcatgttttcttccctacttctatttctgaaaatagctatccatggggttttgttggattttaactttagcataccccaacttacttgggactaaaagactttgttgttgttgctgttgttgttgtactatgtagcaatcatttagctgacataattttgcttatctatgaaatgcgacagatactgaacaggtttattataatgttgttcctttctcatatggatgtctttctggttcagatgaactaaattattcggacttgtgttatcctcctccattttatgtgccagaaagcttgttgaataagctgatggttggagacttggagcagagatgaagttcctactagtgatgcacattgtttccctgcaatgtatcttgatgtaaggaatataggcagtccaagtcacatggtagaagtcctaaccacaaggacaaaagagattcttgtgaccggaggaacagaagaaatcctgagagtgacgacagaagctctcttgagtgcgctgacaacggttctcgtgagtgtgccgactgaagatgatcaatggagcgcaaaaacagcagttatggcatggtatccaatatccattgcttctgatagaagctcagctgggccatcagagaagcagctgtatgacaagcaagggaacagtagattccatctggttgtggggttaaaactatctccagcagcttatctatccccatacatatatttaaactctattttgcgaacagtgcaaaacaatgtttttgggtaaactataaatagactgctgcaaacggtctaagaaggaacctattcggaaagtcaatgtaaatgaagcggctgctatagtaatggtaatggtggctacttgtggactgggtgctgcaaatgactcacttaacaccatgaaaggaaccaaggacaatgttcgcacccattttagtcatgatccttcttccagctttggatatttctcatcttaacaggatcaagatgcactgtccgaacgcatttcaaatggtgaggctgatgcttcacttacaggtagtggacacaaccccaaagggaacgttttggaattataaattattgatgatgattggattgcaaacactattgcaaaagctgctgctgcagtagcctccaaagaggcagattcttcagaagcttccatgacaaaggagcagaagctgaaagctgagaggcttcgccgtgcaaagatgtttgctgcaatcattaagagtggagacaagaagatgaatgatttagctgtgtttgctgcaatcattaagagtggagacaagaagatgaatgatttagctgcatcatcggatccaactagtgaagctgccaaggcaattcctgatatgaatgtgtctggacttgatcagcaatctgtggctaaggaacgtgaaggtagttctgatccgtttgaacatgagggaccaaacttgacaaatcataataaagactctgatgatgaaccaaacagagtgcggaagtatagaaagaaacatcgagaatcccatgaggaaaaagatgaatcggaggatatctataagcactcgaggaagaggcatcacccagagcattcaagaggccctagcaaggatgttcacaaacataagcacaagagcctcaaggtcgcacagaagtgtccgcgtctggatcaggtgccaagtttgaatcagacaagctgctcgatgacattgcacaatcaactcaggtaacaactgaagtgccgagtgaactgagagcaaaaatcagagcgatgttgctcgagagactgtagtattcaacgttatgtccttaggcctctgatctgtagccaactgctctgtcgatttctgtatttgcttcgaacgctccaactgtgcccattttacttgaaatcagtgacctgcacgccaagttcgttggcctgctccacatgttgaagtttctgctgcacgcataggtttgaacgtcttgaactcttgatgaatcagtggtccgcctgcaggctgcagcgtcatatttctacgggatatttctagcggatttctgcactgatggaataattaatgtggtcttcatgtggaggacagcatctctgttttgtggtgttgaggacagcagcatcaacagtcttttgactgttgtaggacagcaggcagcagcagtctttttgactgtactttagcatctagagtacaacacatgtgtgctgcagtagcatctaaaggataacatatttgtgctgcagtgtgtagtgtggtatgtagtgtagtccctagagctataaataacccttctaaaggtatgttattttgagtagtgtgtgagtaataaatcaaaaattgcttcaactcgtagtgtcatccgagtaagaattccattgcttacaaagacaactattttgttctattatagtgattttagtg

SEQ ID NO: 9342 - DNA, 1572 bp, Zea Mays
gtgacaactgtgccagttgaaggagatgagaaagtaatttgcaattttaggcggctagttcttgcagtatttgctttcatcatcaatggataaaaccgtacggttgtggcacatgtcaagcacttattgtttgaaaaccttctcacacactgactatgtgacttgcatccagttcaatcctgttgatgatagatacttcattagtggttccctggatgagaaggttcgcatttggagtattccaaagcgtgaaatagttgattgggtcgaccttcatgaaatggttactgctgcctgctatactccagatggaaagggcgctctggttgggtcccacaagggcagctgccatctgtatgatacatctgatgacatgctttgctacaaaacacagatcgacctacaaaacaagagaaggaaatctagccagaagaaaataacaggatttcagtttgtcccaggggattcttcaatggtcataatcacatctgcagattcacggatcagagttcttgatggttttgagctagcgcataggtttaaaggattccgaaacacaagcagccaaatctcagcttgtttagctggaaatgggcggtatattatctcggcaagtgaggattcccatgtatatatctggagaaacaatgatggtccgaaaccaagtagaaagaagggcattgtttctgtcacagatagccatgaatacttccactgccagagtgtgacagttgctgttacctggccttttgccagcaccgcaatgacttgtttaatgaaccccgggaagcaagaagagcttgagcgtgggtctgagccgcaagatctgcaaaccaaacttgccaaggcacaggagatgccagatgttgagtaccggagcacaaatatcacgagtaacaactcgaatcataataatggtgaccggacatctccgacttggcctgaaaaacttaacacaccaccaaatcaaagtctcagggctactacctgccatgccaacgagggagatcaagctctgaatcggtcggcctggggcctagtgattgtcacagcaggccgtggaggtcaaatcagaacatttcaaaactttggttttcctgtaagagtatagcatgaatatgaatacgtaagataatagtcactgccattcaggagtgtagtttgtgtatagataggagatagtgggtgagtttcacactattcagggattgggtctgattgttccttggcgtgcatgctagagatcagaatcttcatctgacatacactgtgtactgcgaaacttggtatttatttaccctgaggcctaaattgtacacgaaagagaaagccctagagagcaacactatcagctgactgcagataatttatctgtccgctaaaacccctcctttcgctattactattccgaaccattgcatgttcttgtaagaaaaaaaaatacatgtggtgaaattgtcgttttggctttgtggtctcatggtattggaaccgtgaataatttttacatgttcgaacagtcctggcaaatgcagtgtttatgcgtcagataagtcaataaagaagaaaaaa

SEQ ID NO: 9343 - DNA, 1990 bp, Zea Mays
accccagtaaacccaaacccaactcctccctccccacttccccagtccccagtcctcgcggccgaaacccttgctcccttccgcgatggccggccggggcgcctccccggccgcggcggccgccgtccaggtgcgctgcgccggctgccgcggcgtgctcgccgtggctcccggcatgaccgagttcatctgccccaagtgtcgcatggcgcagcgcctcccgccggagctcatgccgccctccccgcccaaggcctccccgactccgcctccctcaggtccaactccgcctccaccacctccaccttcgctgccgcctccgcctccgcctccgcctcagccagtgccgcaccctctgacccgccgctccgctccccgggcgcagggcgtggaccccaccaagatccagctcccctgcgcgcgctgcaaggccgtcctcaacgtgccccacggcctcgatcgcttccgctgcccgcagtgcggcgtcgacctcgctgttgacttgtccaagctccgccatttccttgcatctgctggcccaggcttttttccgcccccactcccacctcccccacccccgcaacccccagtgccaatgcctcatctgccctttctgccgatgatgccacgccttccattgcccatgctgccgatgctctctcctgctgagctaccggaggagatcaatgaggttgcagttgatgttgagcgcgacgaagatgaaagtggcacttttggggaaactttcattgattatagacctcccaagctatcttttggttttcctcatcctgaccctgtagtagaaacatcctccttgtcagcagtgcaacctccagaacctacttacaagttgactatcatgaaagaattggatgaaaccaatgcattatcttccttacagattgaaacaatagtgtatgcttgtcagaggcatcatcatcatcttccaactggagctagagcaggtttcttcatcggtgatggggctggtgttggtaaaggacgtaccgttgctggattgatctgggaaaattggcagcagggaaggcataaagctttgtggatatcaattggttcagacctgaaatatgacgctcgcagagatctggatgatgttggtgcaaaatgtgtggaagtgcacgctttaaataagcttccatattctaagctagactctaaaacctttgggatcacagatggagttgtttttgtaacttatagcagcttgatagcatcctctgagaaccgttcccgtttgcaacagttggtacagtggtgcgggtctgagtttgatggtcttctggtgttcgacgagtgccacaaggccaaaaatctgattcctgaggcagggagccagcccacccgcactggtaaagctgttcttgagattcaggatatgttacctcaagcacgggttgtttattgttcagcgactggtgcatctgagcctcgaaatttaggttatatggttcggcttggtctctggggagatggaacatcgtttgagaatttcaaccaatttttaggtgctcttgagaaaggaggtgtgggtgctcttgaacttgttgctatggacatgaaagccaggggaatgtatgtttgccgtactctaagttacaagggtgctaactttgatatcctagaatcacttctggaggaaagaatgatggaaatgaccatcaaagagggtatttggaaggaagaagatgacacaatcaacatgtgggagaagatgacaacctgcatttggaaggtggcctcaaaggtgtgttgatggtggtatgaggaagtccaaagggctattaaggagaagaaagaatgctacaaagactgtaccatgacaggagtgtggacaacgtaaagaagtacaagattgcaaagcgagctataagtgtggcaaatgatagagcctatgaggatctttacagtacagtacgaacggagagaacatatataggatgattagggtttgtgagaggaagataag

SEQ ID NO: 9344 - DNA, 1878 bp, Zea Mays
gataaatagcaggccgcggacacagccgagacctttccatttccagagttccaaggcttcccttttaccccttcgcttcccatggcgccgtgggtgtgggtggcgttgcaggcggccgccgtggctgcgtccgcggcggaggcgctgagcctggacgtccaccaccgctactcggccaccgtgcgggagtgggcggggcaccgcgcgccgccagccgggacggcggagtactacgcggcgctcgccgggcacgacctccgccggcgctcgctggcgggagggggggaggtggccttcgccgacggcaacgacacgtaccggctcaacgaactgggattcttgcattacgcggtggtggcgctggggacgccgaacgtgacgttcctggtggcgctggacaccggcagcgacctcttctgggtgccctgcgactgcatcaactgcgcgccactagtctcacccaactacagggatctcaagttcgacacttacagccctcagaagtcgagcactagccgaaaggtcccatgcagcagcaatttgtgcgatgaacagagtgcatgccggtcagcaagcagcagctgcccctacagcatccaatacctgtctgataacacatcatccaccggtgtgctggttgaggatgtcctgtacctggtcacggagtatgggcggcaacccaaaatcgttacggcccccataacgttcggctgtggacggactcagacgggttcatttctgggcactgctgcacccaatggtctacttggcctgggcatggacaccatatcggtccccagtttgctagcaagtcagggagttgctgctgccaattccttctccatgtgcttcgcacaagatggccatggtagaatcaattttggggacactggaagctcagatcagcaggaaaccccgttaaacatgtataaacaaaatccatactacaacataagcatcactggtgctacggtggggagtaaatccattcacaccaagttcaacgctattgttgactctggcacctctttcacagctctgtctgatccgatgtacactcaaatcactagcagcttcaactcacaagtccaggataagccaagccagcttgactcttctctgccctttgaattttgctactctataagtccaaaggcttctaccaatcctccgaacataagcttcacggcggaagaatccgatggcatattgcttggctgttatgaagagcgaaggtgttaacttaataggggagaattttatgtctgggctgaaggtcgtgtttgatcgagagaggaaggtcttgggctggaaaaactttgattgttacagtgtgggcaactcaagaagcaaccttccagtgaacccaaatccttctggtgttccccctaaacctgccttgggacctaacagctacactcctgaagctaccaagggcgcctcgcccaatggcacccaagtcaatgtcttgcagccttctgcaagtttttcgccgaagctgcgttgcaacagaaacgtcctcgtcgccgctgctctgctgttcctcgtgatcctttgatcacctcaactccccatgacaatcttttcagaaaccaaatcgacagatatgatagattttagttaaacttggtttacgttgtatgtattgagttacgtatagtgtgatagtatcacattcttttggcctgtgtccacagttccagtaggagttaggatagaacacgggatgagtccatagccctttttttttgcacgttcataatgtacctggtggatgtactgtgtacatattagatatgacttcaggatgtattgattttatagaataattgaataacgatgctcgcatacacagatatatatacttcgcattgcttc

SEQ ID NO: 9345 - DNA, 1966 bp, Zea Mays
gataaatagcaggccgcggacacagccgagacctttccatttccagagttccaaggcttcccttttaccccttcgcttcccatggcgccgtgggtgtgggtggcgttgcaggcggccgccgtggctgcgtccgcggcggaggcgctgagcctggacgtccaccaccgctactcggccaccgtgcgggagtgggcggggcaccgcgcgccgccagccgggacggcggagtactacgcggcgctcgccgggcacgacctccgccggcgctcgctggcgggagggggggaggtggccttcgccgacggcaacgacacgtaccggctcaacgaactgggattgatctcaagttcgacacttacagccctcagaagtcgagcactagccgaaaggtcccatgcagcagcaatttgtgcgatgaacagagtgcatgccggtcagcaagcagcagctgcccctacagcatccaatacctgtctgataacacatcatccaccggtgtgctggttgaggatgtcctgtacctggtcacggagtatgggcggcaacccaaaatcgttacggcccccataacgttcggctgtggacggactcagacgggttcatttctgggcactgctgcacccaatggtctacttggcctgggcatggacaccatatcggtccccagtttgctagcaagtcagggagttgctgctgccaattccttctccatgtgcttcgcacaagatggccatggtagaatcaattttggggacactggaagctcagatcagcaggaaaccccgttaaacatgtataaacaaaatccatactacaacataagcatcactggtgctacggtggggagtaaatccattcacaccaagttcaacgctattgttgactctggcacctctttcacagctctgtctgatccgatgtacactcaaatcactagcagcgtaagtgtgcaaaaggatttataaatgatctctcgctctgcttttcttcttacacatgttcattcttttgatcagttcaactcacaagtccaggataagccaagccagcttgactcttctctgccctttgaattttgctactctataaggtatcttcatctattaactaacagcctctcatagttatatctacacttactgtatgctgtacccaatggattcgttgctgcacactccagtccaaaggcttctaccaatcctccgaacataagcttcacggcggaaggtggaagcgtgtttcctgtcaatgatccaataattaccattacggactctgtatctaatccgatggcatattgcttggctgttatgaagagcgaaggtgttaacttaataggggagaattttatgtctgggctgaaggtcgtgtttgatcgagagaggaaggtcttgggctggaaaaactttgattgttacagtgtgggcaactcaagaagcaaccttccagtgaacccaaatccttctggtgttccccctaaacctgccttgggacctaacagctacactcctgaagctaccaagggcgcctcgcccaatggcacccaagtcaatgtcttgcagccttctgcaagtttttcgccgaagctgcgttgcaacagaaacgtcctcgtcgccgctgctctgctgttcctcgtgatcctttgatcacctcaactccccatgacaatcttttcagaaaccaaatcgacagatatgatagattttagttaaacttggtttacgttgtatgtattgagttacgtatagtgtgatagtatcacattcttttggcctgtgtccacagttccagtaggagttaggatagaacacgggatgagtccatagccctttttttttgcacgttcataatgtacctggtggatgtactgtgtacatattagatatgacttcaggatgtattgattttatagaataattgaataacgatgctcgcatacacagatatatatacttcgcattgcttc

SEQ ID NO: 9346 - DNA, 1868 bp, Zea Mays
cagcaagtcagctatagtgattatacgtgtgacaaatcacgcaaaagctggcaacacgatccaataaccatactttgaaacacaggatcgtcaatttgacaccaattcattacatgtggatcaactccggttattggcacacgaaagcacagttgccgtggagtaaatgaacatggaactggctactaacatttgctagtggttaaacagtaaatcatcctaccctacaaatcaaggtcgatgggggcacgaaattattcccaattccctgccctcactgcacatccctagaccacaaactgtataaccatccacagctactcagggtactcatgcacgctacatcgaaacaatctcattgcacatcctttcaagcgcaccctacaaccaatgcttcagggaggaacacagttgatttgcacagttggaaggattagacctatattaacaaattcaattctcttcacaatggactctgcaaaaataagagctcccattcatgatacccactattctgcacagggttttgatagcagagaccgtctgtctccttttaagttttaacagcaaattacaaggattggaggtagagctaggaagtgttaactaactccattccccatctcatcggttttggagctcttgtgctgccgtaagttgaccatccatgttaaaaacaaagaggcaaattttctctatgaaagctattgtatcagcaagaaaataatagcagtgtgctaccttactcttcttgtgcttatgcacatctactgaatcttctgttccctcatgcttcctcttctgatacaaatggtgagcattgtccatcaaaggtatatatggtttaaaatgaagctattcagagtttttgaccatacagaaaatggactaaccttttcatgatggccacttttatcttttttcttatccttgtctttgtctttatctttgtccttactccgatccttatgccgatgtttgtgcttcttgtgttccttgtctttgtctttgtgccttttatgcttcttctctttgtccttggactcactttttggtttacccgaaatagtcggtatacctttttcagtctaaggcaaatccacaagagctgtttctcgaagttggaacgcttgccccagagtttccatatcaaagggctgaatataagcaggtttatccctcagatatgcattatgaacaagttgatctaactccattccttctcctttgcgaatttcagtgtctcccacaacattgtgaagataatgtgtatctgatattgccagcggcaaaggtttcttgcaaaagaaatcatggtgtggcagcagtttgtagtggctgatcaaatcaacagcaccagtgagctcccttggtcctgaaatacagagatcgtattatcaatcaaccacatagcagacaaataaggtttcagaaaagataggtgcactgatatatctatgatacaaaatttattctagcatacaatagacattagatgcagtaatgcggctcataaaacaactttgtgcactatgacacaaaatattaaccgtccaagttccaactaacgcattgtgaactgtaaataagtaaataaaacagttaaaattttgccattgtaaaaagaactgtagtaaacagctgactacaagacatactggcctcaactggcaaaaccgcaaaagaatcagcaccagaagtttgtatttaaaattccaagcatataattattactaatttttttgcaaactaatgacgataactaataatcaagcaagctgtgatactaatataactctgttgctttgtgcccacatgaattaggatttagcatttcagatttgcatactgaataattggcatataag

SEQ ID NO: 9347 - DNA, 1469 bp, Zea Mays
gcgcatttccttgaacctggaacgggcacgctgctggaggtttcgatcgactccgtccatggccggctccgctgcttgtttgaggtaagaatgaatgttcagtaccgtggagagtgccacttgcacacttgactccccgactgacgtgtttggtgtgaggcatttgtcctccatgtgaacggaggaagccggtgatccactgccttcagctggcagggcctcagagcacatctgtgctgtggtcaacacagattttggggagcagttctcctgctcagacagggactgcgcctgcaactggggcttccgaagctgcttgattgcagcagaggcatccttgcctactgaattacccagcttgcgcgggtacgggtgcgtcggcctcctcttcggcctcggcggcggaatctgaagttgcggtggagcacctacgctgttgttgctgttgtccccagaggattctcggatgacatcaccttgcaagcaacacaatccatggaatttcaggcagaagggggttttgatgtgtttttttttttcgttctgtgcgaaaggcaggcaacgagaccttggagaagaacttctgggcgtggctcctgatctgcacggcagtcttgctgcctatgtgctcttgtatacggcgccaggcacggccgtgctgctgcagggcctccaagaagagcttgtgctcgtcctcggtccatttctccctctgcttggatatcgtgtatggcttgcgtgccttaggggcccgtgctcctcctggcaagtccatgtcgccggagctcagggtgttcttcagatgatccatgaagtctctgtggccgacgtgatctgcagccggcctttgattgctcctcgcctggaaacgagccatctcaggatttctgaaccagcagaaccacagccaccgagtctgatagcggctcttcaccacgagcacgaatcaagcagcagcagcagcaggaggaggcgagagcgtgcgccaccgagacgaagccaccagctcctgaacacccttgcgagtgctgccggtttcgcaggggagaagagaagagaggagaggagaggagggaggcaaggggcgaaatggaaggaaaggctgtatgtatggtgcagcggttgggagagggagggcggagaagaaaaggggcggcgagggcagggcgccacgtcggacgggatttttccgctggaggagcttttccgtgcgcgcttttccgtccgccctcacgccgccaccgggaccggatgaaataatctatccgtctttaccggcaacggcgggggcccggagcggaggacgactgggcgccgctcgattcttgtggccgtcgctcctccgcgggtcgggttccctcgcctcgcctcgcctccagctgctcacctcaattatgctgggggctgccgctcctgtctgggcgcgagtaaaaccatgggctgtcgtggggtcgcacgacagggtgggg

SEQ ID NO: 9348 - DNA, 761 bp, Zea Mays
acgccccagctccaccctcccacggatccacacgaaaccacctcccgctcggcacttctccaaacttccccattccctcccaaaccccattgataaatacccctccccaccccaaatccgaactcagtcgcccacaaaaacccagtaactcgcatcttcctccgtgatccaagttctagcagcgcagcgctcggtttcggcaatgtcggggcgcggcaagggcggcaagggtctgggcaagggcggcccggcgatccggaggctggctaggaggggcggcgtcaagcgcatctccgggctcatctacgaggagacccgcggtgtgctcaagatctttctggagaacaccgtcaccgccatggatgtcgtctacgcgctcaagcgacagggccgcaccctctacggcttcggcggctaggtcgcttcctcatctggtggcgaactgcatctgtgtcggcggtggtcgtgttgtgtgcctaatctagtgtagtccgttctctatatcgtcgctgtgttctgtggtgtcttgtatcccatttcctgcaataccaacttgccattatcaatggaaaaccctcgttttcatcctcgacgtgtctagttctgattttgttttgttctcgtttattgttcgtatgagatgtacatagggctgctgttgctttggtgtttgattgcaatttttattttgcccagagagctgcagttctgtgtgttatgcaaaaaagttctgtgattgattggatctcttcgtttggaca

SEQ ID NO: 9349 - DNA, 4657 bp, Zea Mays
cctcctacctactaataatcccctccagccagcaattctcccgcaaaaaaagacaaaaccctaaacccgcggagccggggtggagagcagccattccttcgctcccctccgcaatggcgtcgcgccgagccagcaacggccgctctcccctcgtgcggaaacagagtcagatcaccgcctttttctcctcccctaccccctctccgtccccctcgggcccgagccccggcgcatccaagccctctccatcgccgctgaaccctagtgcgaggacgaggtccccacttgccgcggtatccccctcctctcccaagctgccacagccgcagcagaaacagaaggaggtaaagaaggttaaggaggagcatgatgccgccttggtgcctgcgcccgcggccgcggaggtggtggggaggtgtttgcgggtgtactggccgctggacgacgcgtggtacaagggcaaggtggaggcctacgacgcggcctcccgcaggcaccgcgtgaagtatgacgacggcgacgaggaggaggtcgatctcaggaaggagaagttcgagtgggccgccgtcgttgaggagtcgaccttgctgccggcgaggaagctgcggcgtctccggcggatgtctgatatctcggtggcaaaatcaccggctgaggcagaggatggcgcaggggattccactgaggacgaggactggaagagggatactgttgtggaggatgcttctgaggaggtggagctggatgaggaagacgaggaggaagttgttgcagtgcgatcacgaaagagaaatccaaagaattccttgatgtcaggttcaacaccatcgacattgggttctggtttgacatcagaatcggagccaagaatttcgaagaggaggaaaaacgtggatgtggcctcattggattttgctaaaaggttcaccttcgaagcagttaataccaatagaaaagttgacccagaagtgccaatgagctgtggccagaaggggcaaactacggggaatgactacactgctcctactggggatgcagctgagcgctttgggcagcgggatgctgagaagtttaaattccttggagaagggcgcaaagacgcaaaaggcagacgtcctggaaacccgggctttgatccgagaacacttttattgccacctcagttcttgaagaatttgacaggagggcagaggcaatggtgggaattcaaatcacagcacatggataaggttctgtttttcaagatgggcaaattctacgaactatttgagatggatgcacatgttggagcaaaggatcttgatcttcagtacatgaagggtgaacagccccactgtggattcccagagaagaatttatcagtgaatttggagaagttagctgagaagggttatcgagttctggttgtcgagcaaactgaaacacctgaccagcttgaacttcggcgtaaggagatgggtataaaggacaaggttgtcagacgtgaaatatgtgcagtagtcacaaaaggaacactaatagaaggagagcacctactggcaaacccagatccttcatacctcctgtccgtgactgaaagttaccaacgaagtccaaataagagccaagacacatgtaccattggtgttagcatagttgatgtttctacaagcaaatttattgtaggacagttccaagatgatccagagcgccatggattgtgttcaattttgtctgaaatgaggcctgtggaaattataaagcctagtaaaatgctgagtccagaaactgagaaggcattaaacaacaacacaaggaagcctttaataaatgagctggttccgtccacagaattctgggacgcagaaaagactattgatgagataaaacagtactacagctcagccaataaacagaaaaaagccgatgatatacaagactgtgtggactgtctgcctaacttattacgcgagttaattggagcaggtgataaaacatatgcactttcagctctaggaggttccttattttatttaaggcaaacccttctggatgagaaaatacttccatgtgctgagtttgagccacttgcatgctcggggttcatcaacaatatccgaaaacatatgatacttgatacagcagcattggagaatctagaacttttggaaaatacaagaactggtggcctctcagggaccctgtatgcacaactgaatcattgtgttactggatttggaaagagattgctcaaacggtggatcgcaaagccattgtatgatcgcagagaaatacttcggcgtcaaagtgctgttgctactttcaagtgatgaaaacaagagaagttcatcagttgttctttatgaagatgcatcaaagaaaactgcttcaacagtttacttctgcgctttgtggatgccagcagatgttccatgcatgttcttctattagtacattgatatgctcagagggatctcaacttattgatttgctgtcaccaggcaaaggcctatcaaatatttcatctattttagaccgattcagagatgcatttgattggtcagaagcagaccgcaatggtcggatcattccttctgaaggttgtgatcctgaatatgatgccacttgcaatgcaatagaagagatcaaatccagtctaaaagagtacttgaaggagcaacgaaagcttttgagacctgcatcggttaattatgttaatgttggaaaagatatgtacctaattgaagtgcctgagagtttgggaggttcagttcccagaaactatgagttgcagtctacaaaaaagggtttctatcggtactggacgccagaactgaaagagctaatattagaactttcaaaggctgagtcagagaaagaatcaaaattgaaagccattcttcagaatctgattcagctatttgttgagcatcacactgagtggaggcagctggtttctgttgttgctgagcttgatgtattgacaagtcttgctattgcaagtggttattttgagggaccaagttgctgtccaactataaaagaatcaaatggcacagacgatactcctactttccatgctagaaatcttggacatcccattctacgaagtgattccttaggcaagggttcatttgtaccgaatgacgttaagataggtggtccagggaatgccagttttattgttcttactggtccaaatatgggtggtaaatcaactctcttgcgccaagtttgtcttaccattatactggctcagattggagcagatgttcctgcagaaaaacttgagctttctcttgttgaccgtatcttcgttcgaatgggagcaagggatcatattatggctggccaaagtacattcttggtggagctcgaggagactgcctcagtgctttcatcagctaccaagaattctcttgtggtgttagatgagcttggacggggtacatcaacttctgatggacaagctatcgcggcttcagttctggaatatctagttcatcaggtgcagtgtctaggcttgttttctacacactatcataggttagcaatggaacacaacgataccaaggtatcgctgtgccatatggcgtgcgaggtggtcgagggagtaggaggtctggaagaagtgactttcctttatagattaacacctggtgcttgccctaaaagttatggtgtaaatgttgctcgattggcaggaattcctactaaattgcttcaaagagcgaatgaaaagtcgagtgaatttgaggccaattacgggaagcgacacaagatgaccaacgataagcacgtcagtgcacagagcgatgataagttttctgccataagggatctgtttcgaattgtgaagacatggcctcgtcctgaagatcaggaagcgagtataagcatgctccgtaaattgcagaagcgtgccaaggtataggctgtggaaggctaggtaggcgattgttacatagcatgctcgcctggtagagatggcctcgttttgctaccttggtggcattttttttgttggattggcgtcataccgagaggggagaaaattacgtggacacgggttccaatcgaggacagcattgccctaggtttagtgtggaagcagaaaaaggctcagtcccatcggatgtgtcaggattcattgatgggacgtggattgagaattctgcgtctacagctttactatcccttccaacaattttgtgccctcactaattctcctaccaggccaggagccccaaggtattggtctgtcctggtttgttcgagctcggtagggtgttggatcagtgctgacctgagacgtggagaaacatcccggactgtaactttcctgaagggttaattatgattactatatgtaaatcagaactactctctcgaagttgcaaggcaacttaggattaattttagtgcctttttgtattctgaaaagttcgagcttgtatttagtcgagatttgagctgtaatccaaaacaaaataggccccactccaacgttttatagccttatcgtagaacgatacaggacacgtggacatgaatcttactacggttattcccatctgggttagtttgtgaacttaaatcctttgggatctcctggggtgaggaattttaggagatactatttaaataagatatttaattatttatgataggttttttc

SEQ ID NO: 9350 - DNA, 943 bp, Zea Mays
cgagttatggtggttgttttctattacactttctgtgcaatctatctagcttgttcatataagaagccactgtgatatggttactatagcatacatcagaaagaccagcagatttttgtgtgtaaagatttgcgagcaccattcactttttcatcagtgtgaaattaaaacacttcaagcatgagctctcaccgtgtgaagtggaatgaggacaatttgtatgaaattgagtcaaacaaaccggtgaggcagaagataacagagccaaagacaccatatcacccaagatagatgatgatggatcattgtcgccaacacgtcctttcgacaaatgtcttgatgagactgtccaggctgaagctatcttaacagccttaaatggtgtggcttcttcaagcattagcatttcaaaggatgatggttggggatcgtcagatgatgatacagatgccatagatcaagatgctgaccctgaagctgacacgacaaggttgagtttcaaggagcatcgccgtgcccactacgatgagtaccgcaaggttaaggagctgatgaggactggatcccttactgctgaggaggccgatgaggataacagagctgccaccagctccgaagacaaaggtgtggggaaaggagggccgaatgataacatgaagccctcgcctcaaacatgaggagttcatatgaaggttctgattcctctgttatttattgtatcattgtatgcaatacagttgttactcttgttttgttttgagatgctggtgtgccaaaatggatttgatgaccgataattttattggtgttggctacctggtcgaatggtcgtcgctccattttgttggtgacttaacaatttcaattgagaaaatatgtttcaaaccgagcaaactgcttgatgctgaaatcagttattcgccaagagtgaatcttcctatca

SEQ ID NO: 9351 - DNA, 638 bp, Zea Mays
caacctcttccatggctcaaaggatgtcttgcgaaagctgaaatcgttcctaagcggtgatgaagcattgggctacgcacaatatgttatcaagtgggaacagattcctatagaaaagcggaatcatttgataagagaaaggcaggaacatttccaaaagcagaggattgagaactctatgggttcgtcagaacccacagccaagcagatatcgtaccttcgaagcttggggtgcaccatcactccgacttctcgcttacacgcatcacatcttatcgaaaagtacaaatcgctctaacttggttgaagaaagtacaaatcacaacattttattgttttttatgtacatgccgtccatactacaaatgtagtagtgttgtgtactggatacatcaaggttgtacggcagctccgatcatatctattgtctgttcttcttagccatattcctgtagtacatgctgcattgttgtgacaccaagagtttttgcttctcttgggccttggcagtggtattggctaggcactggctaaccttgtactccattcctacttatatgaactccattgtgtttattattcatgagataaaaaaacattacactgaataaactgtcatctaagcaaatgaaaaaaaa

SEQ ID NO: 9352 - DNA, 3818 bp, Zea Mays
ccccagcatatccaccacagtaaccaaaacctcgccggcggcgggcggcggcgggcggccatgtcgcactggaaggagaaggagaatgctccacctctcccgctctacccaagcggcgcctctaacccctctcatctcctcccctgcaagcgcccgctgcaatccccatccccatgcccaccgctgcgccggccgctcgtcgatatcactggcaacgcattggaacagcggggcgggtatgggtatacaactcccctcccgaacgcttccaggccttgcgggtttcttctgcacgacgacgaagacgacatgaacgaggcattcttgcgggaggtggacgccatctgcgaggagcgtgcgcggtccacggccaggaaggaggaaaaggagaaggagaaggagaaggagaagaagccagcagaggagcataaggggacgggcggagtggcgctcatggcggcagcgggcacgattgacgccgctggaacagagacagcaacgcttgacgatgctttctgggaggaggtgagcgccatctgtgaggagtgtgatgcccagtctgctgccaagagccaggagaggacgaaggaggaggggagcttggtgctgtcctgcgatgatgcttcactcccccctgctatttccatcaccgcggagggtggggagtttgaagatgcattctgggagatcaatgccgttatggaggagcacaatgccaaagctcatgccaagtatcaggaggggctcaagggaatggaggagaaagatggattgttagcactgtgcggtgatcatgatccttcagtttccccagtaatatccgttgcaatggggggtggagcgcttgttgatgcactccttggtgaggttgatgctgccgtccatgatgggcatgctgatatgtctgctgctaagggccaggtggaacagcaagatatggaactagaaaaggaggaagatgaagcgtgtgctccaaagaagtacaatgaatatttgcactccttgaatgataggcagaaggaggctgcatgtaatgatgttgctgttcctctaatgattgttgctggtccaggaagtggaaagacttccacaatggttggtagggtgctcacacttctcaaagaggctaggacgcacatctgaattcataatctacggacatggacagcaacgaagggcgcttattgagacagagcgccttttggaaaatgacaaaaataatggtgttggagatacaactaaacagtatgatggggacataaaaaattctttcaaagacaaagctaaaaagtggcagaaatttattacacaggcaaaagcttcaggaagaactccagaggactatgaaaaaaagggtgatttgacaggagcttctgttcttcgacattacaatgaaatattaagatcttgtaatgctcttgattaccatgatttcattaactcatctataacccttctcacaaattttcctgaagtgtacaaagagtgtcaggatatgtggcgggcaattgtagttgatgagtttcaggataccagtgctatgcagtattgtcttctgaagattctagcttcccacaatcatataactattgtcggtgatgaagatcagtccatcttcagtttcaatggtgccgatgtatctggctttgattcatttcgtaaagattttccggatcataaagagatcaggttgagcaagaattaccgctccacacgtgcaattgttgaagcagcaactgctctaattcagaacaacactaagcggcatcatcctaggcttgtagagaccgacaacccttctggctgtaagatcactgtcaaggagtgccacagtgaagattcacaatgcgcatttgttattgacaaaatcattgaaattacatctggtaccgctgaggggtgcaactttggcaacattgctgtcctatatcgaagacagataactggcaaagctttccaagtctccttccgcaacaggaaaattccctttaacattcatggtgtggctttctacaggaaaaaggtgatcaaagctatcatggcaatacttcggaccacattacctggttgtgatgatggtccttggcgtcaagccttcaaggcccttttacccggtgacaaagaagaaaagaagaagattatatatcatgttcaaaagatttcactggctagaacgtgtagttttttaactgctgctagtgacatcttcagcgctaaggtctctggtaccttcaaaagggcccagattactcaaggacgtaaggttttatcgaccttggatagcctatcaaaacttgttgaaaaggaacaatcagtttcagtcatcatttcgtctgcgggagacatgctacctcagaaatatctccttgagaagcgtgctgttgttgatgttgataatggcaagttattaaatgaagatagtgatatcagatcggtccttcagtttttaatggatgatgtgtctgacttcttgtcaacacatttttctagttcaatggagagaagcaagactgatgagaaaggctgtgcttctacacttaaagctttcattgattatatatctttgagggaaactgaaaattttcgatcccgaaaggaggaaaataagaattctatcacattaacaactattcatcagtcaaaaggtttggagtgggatgttgtgtttattgtgcaggcaaatgattcggaaattcctttgttgcatgagtacaatggtagtgtgaaagaagctggaagcacactggaggaggagaggaggttactctatgttgcaatgacacgagctcggaaaaagctgtacatcttgcatgttacaattgattctaaccgtcagcttctgcaaccatcacgttttctcagggaaattcctgatcaccttcttgaggtgcagggcgaagagcctctgagaaaaatgcctgaacgaccttcaggtgatgttccttttgatgactctgaagtggatacatcaatcggaaagccaattatgggaccaaacgaagcttcatcttatccagaacaggctcaggcatgccttgctaatgatttcttgagaaggtttgatattgatgatagatcggtagtctcacatatatttcatcattggggcaagaagcaggcatttcaaaatccaaagagattacttgaaaagatcagttttgtaattgatgaacgcctacgtggtaaaggatacaagcgcaaggatgtcttgcgaaagctgaaatcgttcctaagcggtgatgaagcattgggctacgcacaatatgttatcaagtgggaacagattcctatagaaaagcggaatcatttgataagagaaaggcaggaacatttccaaaagcagaggattgagaactctatgggttcgtcagaacccacagccaagcagatatcgtaccttcgaagcttggggtgcaccatcactccgacttctcgcttacacgcatcacatcttatcgaaaagtacaaatcgctctaacttggttgaagaaagtacaaatcacaacattttattgttttttatgtacatgccgtccatactacaaatgtagtagtgttgtgtactggatacatcaaggttgtacggcagctccgatcatatctattgtctgttcttcttagccatattcctgtagtacatgctgcattgttgtgacaccaagagtttttgcttctcttgggccttggcagtggtattggctaggcactggctaaccttgtactccattcctacttatatgaactccattgtgtttattattcatgagataaaaaaacattacactgaataaactgtcatctaagcaaatgaaaaaaaa

SEQ ID NO: 9353 - DNA, 1765 bp, Zea Mays
gcagctgctgcaccgcgcgctgcggctgggcggtcgccgcagggccggcgtcctgatgctgctcgcagtcgtgtccgccgctgtcttctcctctctcttcgccgtcgtcaaagatgacagcaattcaatcagtatcgtaaataattatgaagtaccaaatgccatacagaagtcagtgtatcccagcacaacacggcctctaatgatgtctggaaaccaatactccaccagtgttgtcaacaaaatcgagcttccaaatcggcttcatcttacgcatttgccttgatgcccctacaagcttcaccatcacctgtcgtaaagaacttaaactatgtatcagaagatggtgttactgcaaatttatcaaatctaggatctggatttggagggcatccatctctggagcagagaaacaaatctttcaacattaatgagtcaatgactgtccactgtggctttgttagaggaaagaagcctggccaaggtactggattcgatatcaaggatgatgatctgctagagatggagcaatgccgtgagctagtcgtagcttctgctatttttggaaattatgatatgattcagcatccgaggaacatcagtgaattttcaaaggcaaatgcatgtttctatatgtttgtagatgaagaaacagaggcttatgtcaagaattctagttctttgtacaataataataaagttggactgtggaggctggtggttgtccgaaacctcccttatgaagatccaaggcgtacgggaaagattccaaaacttctgctccataggctttttccaaacgtgaaattttcagtttggatagatgcaaagcttcagcttgttgcggatccctatctcctgcttgagaggttcctgtggaggaagaataccacttttgcaatctctcggcattacaaacgctttgatgtgttcgaagaagcagaagctaacaaagctgctggaaagtattacaacgcatccatcgattaccaaatagagttttacagaaatgagggcctaacacattattctcctgccaagcttcccatcacaagtgatgtccctgaaggctgtgtgatcatcagagaacacatccccatcacgaacctcttcacgtgcttatggttcaatgaagttgatcgcttcacctccagggaccaaataagtttcagcaccgtccgggacaaaatcagggctagagttggctggatgcccgagatgttcatggactgcgagaggcgcaactttgtcgttcaggcgtaccacagagagctactggagcagatgattgcatcaggtaggatgcccccttcgggggctgtggtggtgaccgacgcagcaccatctcggaaagtccgggcaggtagcaggaaggctactccgtcgaagaagccctccgtgaagcggaaaaaagagaagaaatcgagctcgcgacggcgtctcccgaaacccgtcgccggtggtttgggtgctatgtgacctaagttttcgtcgagtagcagagtcttgatactcccacagtcacacacttatacagcgtgtaccggaatacaaacaatgttccattacttaggtctggggcttgtaatcgtgccccggcgaaatttgttcatattactcttcatcgttgttgtacataacatctccaaaccaatattcaattttgttcattgatgttatgttcagttatttgtgctcgtgtcagggggcgccccctgcctagacacttctctttattttgtaaaatttgtacaaatagaactag

SEQ ID NO: 9354 - DNA, 4018 bp, Zea Mays
aggaggggagccggagatgttctactcgcagttcatcttggccaagaagggccccctcgggaccatatggattgccgcacacttggagcggaagctgcgcaagaaccagcgaagctttgctgaagataaaacaagctttcaggtccactgctgttgatctacctcctgaggagtcaactgctccatatcactctataactctgcctgagacattcgatcttgatgattttgaactgccagaagctgtgtttcaaggcgatactgatcatcatgtgagcacaaaagagcagatcactttgcaagacaacccagagaaaacaggatattcaacatcccagtttggcctagatgaaagatttggtgatggcagttcatcacatattggcttggacttggaggaggaattaattctgaacaaggaccactcaattcatctcgagtctgatgatggtattattattcaaggtcggtcatcggtcccttctactgatatggagattgatgataacaaaagtacaaacataacagctgaaggatacagcaacatggacggtgggccttctagtcatgtaaagttaggtccactgaatgcagatgacctaggaggaaacagtatccgtaactggactggttacaatgtacagactcctgatttgaatgatatattattgcataataatgaggatattgcaggcccatcaacttcgtactatcaacctagcccatttacttgtgatgaacctgcatcaccagagttcattagcgctcaggccccagctacacctggtttaatggaagagacagttccttccagagtccatgaaagtcctgttctgagtccacagagaaaggcatcaccatcaactaatgatgaaactgcaaaggctgacactcctgctgcaccagcctcagattttctccattcagctacaggaaatgccagtgatgtggtgggtgctgagatgacagaacttggattggcgaaaccggtgcaagttgagtcttctgttgtgcaggactctgatgcatcggtgcaacagcacacaagtgagggtttaccatcccagggtcaagcttcacacttggaagctgctgctgataagttggtcggctctgatggtatagctgcatcggttgatgaaacggtaactgtcaatgcaaccattgaagatgtacctttggctgtaaatgattcagagccatgtgttgatggttctgctggaccatctgtggtgaacctggtacagatggatggtccattatttgatgcacaaggtacagtactaagtgcagattttcaacatgaagtccaagcaatgcaacaagtagtggcatctaacgatagactgaatgaactatcaacttcagaatttgccgagcctgagaaaatgctgacagctccgaatgctgaattcaatcatgcgattgacttggggcagataactgcggaaaaaggaacaattgaatctgatggaagtaacataataggcagcctaacaagcagaaaaagacacctggaatatagcttaccagctttagagagtgagaccactaaaaagttgcctagccgaccacatgttaaaagaaccaatgattttgttcctcatgatgatgatatactggcatctattttagtcggtaggacccctgggttcacacttgattcaacaccactaccaccaagggaatcatctctgaaacgcccaaggttggggtcgaagatgggtacactcaagagaaaagtgcagatagatgatgccatggtcctgcatgctgatactatacggcaacagttgatcaatactgaggatatacggcgcattcgtaaaaaggctccatgcactcgttccgaaatatggatgattgagaaaggttcactggaagatgatttattccacgagcccatcttttcctgcctatctgaggagctaaacaatttacacaatcggacatatgagactattgtacaccctgctgttcagagaatggaactacatggtcaattagacatgcctgaaacaataccagaatatagaaatattgctgggtttggttctgctactattgatggcccacttcacataccagatgggattcaatcagatgccatgttgtcaggcgcaaatgttgcatatggcgctacagctgcttttggtttgcaaattcctcctgactaccaggttaaccgtgcatctaatgattttgttgtcggcactcagcttcaagaggtggctaaaccttttattggtaatgagcacgaagtggcacctcctgacagagagcatgctcaagtagatacattgtatagtgaccgttttcaaggtgttccatctgatttgcagaggagtaatgatgcaaatgtttctagtcaagatgtggttctagataactctggccaagcttgtgctcatgcagtggacggcatgacaagggagtttaatcattttgttcatagagacgctaatctttttgggagtactgaggtccctgcttctgagattactggggtggaatataatcaagatgcctctggttttcctcgacaaacagaggatgacaacacggtggagtataatcaagatgcctctggttttcctcgaccaacggagggtgggaatgcggtggagtataatcaagatgtctctggttttcctcgaccaacagaggatggaaaaacggtggagtataatcaagatgcctctggttttcctcgaccaacagaggatgaaaacacggtggagtataatcaagatgcctctggttttcctcagccaaccgaggatgaaaacacggtggagtataatcaagatgcctctggttttcctcggccaacggaggatgaaaatgccgcgtctgctacgggagataattctggcttccaagaaaacaacacgggttctcatatggatctggatatgatgaatgactatgaagtgaaggaatgcaacgattttgggagtgcgattcatggcgttgatacagattttctgaactatggtgacgacgacaacgacgacgacttcgtcgacgccgacgagccaaatcccagtgagttccagtctctcgacaacagcggctggtcttctcgcaccaggggtgtcgcgagatatctcaagactctgttcgacgaggagtccggtctggggaggaagagcgtcgccatcgaccatctggtgcgcgggaagacgcggaaggaagcgtcgaggatgttcttcgagaccttggtgctgacgacgaaggactacatcagcgtggaccaaccgaaccccttcgactttgtgagcgtgaagccaggcccgaagctgctcatgtcagagttctagttcaacaaagtcagcgtaccctggcgcgatacattccctcttaccattgtatccatcatcacaccgaccaacaacaacaccgcagatatccccccccccctcctcttccaaaaccatttttgtgtatgttgttgcagttcccctcccctgtagcatctggtgcgctgatccgttgttgttgccagggcgtctgtccgagtaggatggtggttgtgttgtaccgtcggctatccaacagtatatagtagtagtatgattttagcgacactcggtgaagcccgccatgtaatctgctagggttcatgctcccctaagttactgtcgctttagactggctaaagcccgtagaggaattgtatacgagaaggacagggacagcccgagatgatgaatgatgtattgatgtgcctgttgactatgtgaggactgacggttttaactcaataattcaagtgacctttcctgtgaaccatgaatccatgccggatatgaggtaaagatgaggaatggcctcgtacatccgtgcctttcgcgatgaaagaaagtggcttgtgatttgttttcccgttacaggccgatgggcgatggtggcccagggaagaagagacgagagcaggagaggaacgagaagagaaggcgagaaatcggtagaggacgacgagtggctggcaagaggatcatgtcgtcacggtcac

SEQ ID NO: 9355 - DNA, 4997 bp, Zea Mays
cacgtactctgtcaaacgatacgccgcgatgcttccagacaagcgccatccccttcctcgccccacacgccgtcgtgttggccgcgcctctcttcaaccttttcttgagcattggcgagagcccttcacatggtgcggcgctggcatcgttgttggcgacctctgcgcggtcggatctgcaaaggttgcagctagcgcgcctacagtacgtcaacatggtgcggcatctctttttgcagatccccaacttgctacgccgccggccgccgcatcggaactccttgcaccgcttgcctttcttctcccattcaaccggcaagcgttccctggctcaataacgcaactgggggatgtctgtcgctatctccatataggaaacgacaggtaccaacaaaaaaagtgacccttttgacgacgtattgcgtgggcaaggcatgacagtgcgacaagagagaaactaacaaagagctctgttcgttctgctgattgcttatgattcgactcgcagtggcggtagctgggagagcttgggactggccagacacgaccaactcaccactgtaataagacgacttttatacatagctgacagtacgcaacctcagttcaggcgcaagaaactactggacgcgtgtcgcctggaaaaggattccgcacaatcacaggagtgagagcacgaaacctgtgccatattttttttgtcttcgatttgcagctccaagcagcagagctgcagagaggcgtcagcggagcacaagctggcgtccaagcaaagcccgctgaagtgtccccccctgcctttcttctctccttcactctctcgttcgtggcgacgcttgtgcgaccactcaccgtagcccgctcgacgccagttattcgccgtgcagctcgccggcgacgagcaccctccagcctaaggaggggagccggagatgttctactcgcagttcatcttggccaagaagggccccctcgggaccatatggattgccgcacacttggagcggaagctgcgcaagaaccaggtcgcggacacggacatcggcgtctcagtagattccatcatattccctgacgttccaatcgcacttcggttatcaagtcatcttatgttaggcgtggtcagaatctattctcggaaggtcaactacctattccatgactgcagcgaagctttgctgaagataaaacaagctttcaggtccactgctgttgatctacctcctgaggagtcaactgctccatatcactctataactctgcctgagacattcgatcttgatgattttgaactgccagaagctgtgtttcaaggcgatactgatcatcatgtgagcacaaaagagcagatcactttgcaagacaacccagagaaaacaggatattcaacatcccagtttggcctagatgaaagatttggtgatggcagttcatcacatattggcttggacttggaggaggaattaattctgaacaaggaccactcaattcatctcgagtctgatgatggtattattattcaaggtcggtcatcggtcccttctactgatatggagattgatgataacaaaagtacaaacataacagctgaaggatacagcaacatggacggtgggccttctagtcatgtaaagttaggtccactgaatgcagatgacctaggaggaaacagtatccgtaactggactggttacaatgtacagactcctgatttgaatgatatattattgcataataatgaggatattgcaggcccatcaacttcgtactatcaacctagcccatttacttgtgatgaacctgcatcaccagagttcattagcgctcaggccccagctacacctggtttaatggaagagacagttccttccagagtccatgaaagtcctgttctgagtccacagagaaaggcatcaccatcaactaatgatgaaactgcaaaggctgacactcctgctgcaccagcctcagattttctccattcagctacaggaaatgccagtgatgtggtgggtgctgagatgacagaacttggattggcgaaaccggtgcaagttgagtcttctgttgtgcaggactctgatgcatcggtgcaacagcacacaagtgagggtttaccatcccagggtcaagcttcacacttggaagctgctgctgataagttggtcggctctgatggtatagctgcatcggttgatgaaacggtaactgtcaatgcaaccattgaagatgtacctttggctgtaaatgattcagagccatgtgttgatggttctgctggaccatctgtggtgaacctggtacagatggatggtccattatttgatgcacaaggtacagtactaagtgcagattttcaacatgaagtccaagcaatgcaacaagtagtggcatctaacgatagactgaatgaactatcaacttcagaatttgccgagcctgagaaaatgctgacagctccgaatgctgaattcaatcatgcgattgacttggggcagataactgcggaaaaaggaacaattgaatctgatggaagtaacataataggcagcctaacaagcagaaaaagacacctggaatatagcttaccagctttagagagtgagaccactaaaaagttgcctagccgaccacatgttaaaagaaccaatgattttgttcctcatgatgatgatatactggcatctattttagtcggtaggacccctgggttcacacttgattcaacaccactaccaccaagggaatcatctctgaaacgcccaaggttggggtcgaagatgggtacactcaagagaaaagtgcagatagatgatgccatggtcctgcatgctgatactatacggcaacagttgatcaatactgaggatatacggcgcattcgtaaaaaggctccatgcactcgttccgaaatatggatgattgagaaaggttcactggaagatgatttattccacgagcccatcttttcctgcctatctgaggagctaaacaatttacacaatcggacatatgagactattgtacaccctgctgttcagagaatggaactacatggtcaattagacatgcctgaaacaataccagaatatagaaatattgctgggtttggttctgctactattgatggcccacttcacataccagatgggattcaatcagatgccatgttgtcaggcgcaaatgttgcatatggcgctacagctgcttttggtttgcaaattcctcctgactaccaggttaaccgtgcatctaatgattttgttgtcggcactcagcttcaagaggtggctaaaccttttattggtaatgagcacgaagtggcacctcctgacagagagcatgctcaagtagatacattgtatagtgaccgttttcaaggtgttccatctgatttgcagaggagtaatgatgcaaatgtttctagtcaagatgtggttctagataactctggccaagcttgtgctcatgcagtggacggcatgacaagggagtttaatcattttgttcatagagacgctaatctttttgggagtactgaggtccctgcttctgagattactggggtggaatataatcaagatgcctctggttttcctcgacaaacagaggatgacaacacggtggagtataatcaagatgcctctggttttcctcgaccaacggagggtgggaatgcggtggagtataatcaagatgtctctggttttcctcgaccaacagaggatggaaaaacggtggagtataatcaagatgcctctggttttcctcgaccaacagaggatgaaaacacggtggagtataatcaagatgcctctggttttcctcagccaaccgaggatgaaaacacggtggagtataatcaagatgcctctggttttcctcggccaacggaggatgaaaatgccgcgtctgctacgggagataattctggcttccaagaaaacaacacgggttctcatatggatctggatatgatgaatgactatgaagtgaaggaatgcaacgattttgggagtgcgattcatggcgttgatacagattttctgaactatggtgacgacgacaacgacgacgacttcgtcgacgccgacgagccaaatcccagtgagttccagtctctcgacaacagcggctggtcttctcgcaccaggggtgtcgcgagatatctcaagactctgttcgacgaggagtccggtctggggaggaagagcgtcgccatcgaccatctggtgcgcgggaagacgcggaaggaagcgtcgaggatgttcttcgagaccttggtgctgacgacgaaggactacatcagcgtggaccaaccgaaccccttcgactttgtgagcgtgaagccaggcccgaagctgctcatgtcagagttctagttcaacaaagtcagcgtaccctggcgcgatacattccctcttaccattgtatccatcatcacaccgaccaacaacaacaccgcagatatccccccccccctcctcttccaaaaccatttttgtgtatgttgttgcagttcccctcccctgtagcatctggtgcgctgatccgttgttgttgccagggcgtctgtccgagtaggatggtggttgtgttgtaccgtcggctatccaacagtatatagtagtagtatgattttagcgacactcggtgaagcccgccatgtaatctgctagggttcatgctcccctaagttactgtcgctttagactggctaaagcccgtagaggaattgtatacgagaaggacagggacagcccgagatgatgaatgatgtattgatgtgcctgttgactatgtgaggactgacggttttaactcaataattcaagtgacctttcctgtgaaccatgaatccatgccggatatgaggccgatgggcgatggtggcccagggaagaagagacgagagcaggagaggaacgagaagagaaggcgagaaatcggtagaggacgacgagtggctggcaagaggatcatgtcgtcacggtcac

SEQ ID NO: 9356 - DNA, 6177 bp, Zea Mays
cacgtactctgtcaaacgatacgccgcgatgcttccagacaagcgccatccccttcctcgccccacacgccgtcgtgttggccgcgcctctcttcaaccttttcttgagcattggcgagagcccttcacatggtgcggcgctggcatcgttgttggcgacctctgcgcggtcggatctgcaaaggttgcagctagcgcgcctacagtacgtcaacatggtgcggcatctctttttgcagatccccaacttgctacgccgccggccgccgcatcggaactccttgcaccgcttgcctttcttctcccattcaaccggcaagcgttccctggctcaataacgcaactgggggatgtctgtcgctatctccatataggaaacgacaggtgcgacagatttagattttcaggtgatgcgtggtcgggatcgccggatcaatcaaaataagtgtgaaatttgagaggccgtggaacttccagatcgagtagtatccatccagatcgatatcccagaagaccaagcctggccatgaaacgcatgctaccccgatctcttcttcaccttttcttatccgcaggtaccaacaaaaaaagtgacccttttgacgacgtattgcgtgggcaaggcatgacagtgcgacaagagagaaactaacaaagagctctgttcgttctgctgattgcttatgattcggtaattacctctacaccatgtccttttcgatcgataatgaacaaagtatatataggtgcacgaacgtgctagatcctagattacttttagctaggtcccaagcagccgaaaatgtgtgcatgctttcagataagcaatgtctctgtctattgcacgattttttcgggcttgttgaatcgcccccgcccctaaaaataattataaggaaatgaagcctgacattcttgctcagactcgcagtggcggtagctgggagagcttgggactggccagacacgaccaactcaccactgtaataagacgacttttatacatagctgacagtacgcaacctcagttcaggcgcaaggttagtctgatgatctgccttcattttgaatctcgattttgctgcttcatgcatgtatcatttgcgtcatcgatcatgtgctttttttctaagatctgtcattcgttttgcacgcacatcattttcctttgagttacctttacaaagatgacggacttcagcaagcgtctgcatatgcaattccttttcttgcctatccatcgatttactcatagattttattttcttcttagctcgatcaaatacttacatgttcgttttttgtttctagccattgggttggaattagatgatggatcgcacataacatacatagcactcttttttagcataccacctcatgcttaacgcatttcttatatatatacacaggttaactttccaggtaactcaaaccgacacagcttaagataaagttggcctccatattaattgctacttacatattatcatcatctttttccccaaaaaatcttactagaatactaagaccatttttacacagcaaccacataaagttggacccaacatcaacaatgattttacaaactctcttgaatcacctccaaaaggttcttattatacatctccaatagaattatctaaaattaaaattatgttcgtttcttacaggttgaaacaacaacttttgaagactggccatgaatatctagataaaactactggacgcgtgtcgcctggaaaaggattccgcacaatcacaggagtgagagcacgaaacctgtgccatattttttttgtcttcgatttgcagctccaagcagcagagctgcagagaggcgtcagcggagcacaagctggcgtccaagcaaagcccgctgaagtgtccccccctgcctttcttctctccttcactctctcgttcgtggcgacgcttgtgcgaccactcaccgtagcccgctcgacgccagttattcgccgtgcagctcgccggcgacgagcaccctccagcctaaggaggggagccggagatgttctactcgcagttcatcttggccaagaagggccccctcgggaccatatggattgccgcacacttggagcggaagctgcgcaagaaccaggtcgcggacacggacatcggcgtctcagtagattccatcatattccctgacgttccaatcgcacttcggttatcaagtcatcttatgttaggcgtggtcagaatctattctcggaaggtcaactacctattccatgactgcagcgaagctttgctgaagataaaacaagctttcaggtccactgctgttgatctacctcctgaggagtcaactgctccatatcactctataactctgcctgagacattcgatcttgatgattttgaactgccagaagctgtgtttcaaggcgatactgatcatcatgtgagcacaaaagagcagatcactttgcaagacaacccagagaaaacaggatattcaacatcccagtttggcctagatgaaagatttggtgatggcagttcatcacatattggcttggacttggaggaggaattaattctgaacaaggaccactcaattcatctcgagtctgatgatggtattattattcaaggtcggtcatcggtcccttctactgatatggagattgatgataacaaaagtacaaacataacagctgaaggatacagcaacatggacggtgggccttctagtcatgtaaagttaggtccactgaatgcagatgacctaggaggaaacagtatccgtaactggactggttacaatgtacagactcctgatttgaatgatatattattgcataataatgaggatattgcaggcccatcaacttcgtactatcaacctagcccatttacttgtgatgaacctgcatcaccagagttcattagcgctcaggccccagctacacctggtttaatggaagagacagttccttccagagtccatgaaagtcctgttctgagtccacagagaaaggcatcaccatcaactaatgatgaaactgcaaaggctgacactcctgctgcaccagcctcagattttctccattcagctacaggaaatgccagtgatgtggtgggtgctgagatgacagaacttggattggcgaaaccggtgcaagttgagtcttctgttgtgcaggactctgatgcatcggtgcaacagcacacaagtgagggtttaccatcccagggtcaagcttcacacttggaagctgctgctgataagttggtcggctctgatggtatagctgcatcggttgatgaaacggtaactgtcaatgcaaccattgaagatgtacctttggctgtaaatgattcagagccatgtgttgatggttctgctggaccatctgtggtgaacctggtacagatggatggtccattatttgatgcacaaggtacagtactaagtgcagattttcaacatgaagtccaagcaatgcaacaagtagtggcatctaacgatagactgaatgaactatcaacttcagaatttgccgagcctgagaaaatgctgacagctccgaatgctgaattcaatcatgcgattgacttggggcagataactgcggaaaaaggaacaattgaatctgatggaagtaacataataggcagcctaacaagcagaaaaagacacctggaatatagcttaccagctttagagagtgagaccactaaaaagttgcctagccgaccacatgttaaaagaaccaatgattttgttcctcatgatgatgatatactggcatctattttagtcggtaggacccctgggttcacacttgattcaacaccactaccaccaagggaatcatctctgaaacgcccaaggttggggtcgaagatgggtacactcaagagaaaagtgcagatagatgatgccatggtcctgcatgctgatactatacggcaacagttgatcaatactgaggatatacggcgcattcgtaaaaaggctccatgcactcgttccgaaatatggatgattgagaaaggttcactggaagatgatttattccacgagcccatcttttcctgcctatctgaggagctaaacaatttacacaatcggacatatgagactattgtacaccctgctgttcagagaatggaactacatggtcaattagacatgcctgaaacaataccagaatatagaaatattgctgggtttggttctgctactattgatggcccacttcacataccagatgggattcaatcagatgccatgttgtcaggcgcaaatgttgcatatggcgctacagctgcttttggtttgcaaattcctcctgactaccaggttaaccgtgcatctaatgattttgttgtcggcactcagcttcaagaggtggctaaaccttttattggtaatgagcacgaagtggcacctcctgacagagagcatgctcaagtagatacattgtatagtgaccgttttcaaggtgttccatctgatttgcagaggagtaatgatgcaaatgtttctagtcaagatgtggttctagataactctggccaagcttgtgctcatgcagtggacggcatgacaagggagtttaatcattttgttcatagagacgctaatctttttgggagtactgaggtccctgcttctgagattactggggtggaatataatcaagatgcctctggttttcctcgacaaacagaggatgacaacacggtggagtataatcaagatgcctctggttttcctcgaccaacggagggtgggaatgcggtggagtataatcaagatgtctctggttttcctcgaccaacagaggatggaaaaacggtggagtataatcaagatgcctctggttttcctcgaccaacagaggatgaaaacacggtggagtataatcaagatgcctctggttttcctcagccaaccgaggatgaaaacacggtggagtataatcaagatgcctctggttttcctcggccaacggaggatgaaaatgccgcgtctgctacgggagataattctggcttccaagaaaacaacacgggttctcatatggatctggatatgatgaatgactatgaagtgaaggaatgcaacgattttgggagtgcgattcatggcgttgatacagattttctgaactatggtgacgacgacaacgacgacgacttcgtcgacgccgacgagccaaatcccagtgagttccagtctctcgacaacagcggctggtcttctcgcaccaggggtgtcgcgagatatctcaagactctgttcgacgaggagtccggtctggggaggaagagcgtcgccatcgaccatctggtgcgcgggaagacgcggaaggaagcgtcgaggatgttcttcgagaccttggtgctgacgacgaaggactacatcagcgtggaccaaccgaaccccttcgactttgtgagcgtgaagccaggcccgaagctgctcatgtcagagttctagttcaacaaagtcagcgtaccctggcgcgatacattccctcttaccattgtatccatcatcacaccgaccaacaacaacaccgcagatatccccccccccctcctcttccaaaaccatttttgtgtatgttgttgcagttcccctcccctgtagcatctggtgcgctgatccgttgttgttgccagggcgtctgtccgagtaggatggtggttgtgttgtaccgtcggctatccaacagtatatagtagtagtatgattttagcgacactcggtgaagcccgccatgtaatctgctagggttcatgctcccctaagttactgtcgctttagactggctaaagcccgtagaggaattgtatacgagaaggacagggacagcccgagatgatgaatgatgtattgatgtgcctgttgactatgtgaggactgacggttttaactcaataattcaagtgacctttcctgtgaaccatgaatccatgccggatatgaggtaaagatgaggaatggcctcgtacatccgtgcctttcgcgatgaaagaaagtggcttgtgatttgttttcccgttacaggccgatgggcgatggtggcccagggaagaagagacgagagcaggagaggaacgagaagagaaggcgagaaatcggtagaggacgacgagtggctggcaagaggatcatgtcgtcacggtcac

SEQ ID NO: 9357 - DNA, 7387 bp, Zea Mays
cacgtactctgtcaaacgatacgccgcgatgcttccagacaagcgccatccccttcctcgccccacacgccgtcgtgttggccgcgcctctcttcaaccttttcttgagcattggcgagagcccttcacatggtgcggcgctggcatcgttgttggcgacctctgcgcggtcggatctgcaaaggttgcagctagcgcgcctacagtacgtcaacatggtgcggcatctctttttgcagatccccaacttgctacgccgccggccgccgcatcggaactccttgcaccgcttgcctttcttctcccattcaaccggcaagcgttccctggctcaataacgcaactgggggatgtctgtcgctatctccatataggaaacgacaggtgcgacagatttagattttcaggtgatgcgtggtcgggatcgccggatcaatcaaaataagtgtgaaatttgagaggccgtggaacttccagatcgagtagtatccatccagatcgatatcccagaagaccaagcctggccatgaaacgcatgctaccccgatctcttcttcaccttttcttatccgcaggtaccaacaaaaaaagtgacccttttgacgacgtattgcgtgggcaaggcatgacagtgcgacaagagagaaactaacaaagagctctgttcgttctgctgattgcttatgattcgactcgcagtggcggtagctgggagagcttgggactggccagacacgaccaactcaccactgtaataagacgacttttatacatagctgacagtacgcaacctcagttcaggcgcaaggtaattgttttgcatgtctatgacgagcatcgtcacttttggaccacgaatcttttttgtgtactgaaaccttttcagttctttatatgtttaagctatctctggctcttgaattaccctagaatctggttaaccttgtctttgctcttatatacttatttactctctaatatacatataatcatcatacatttacattatactatgctgcgctaaacggattggcacgcgcgcatgggcgcgcgctatacactagtatatgtttgatagagaacacatccaagcgtgtgagagcaatttctagtgtgttgtagtgagaggttgcattgatcgacactatattatggtcgagttgcaagttagcggtatatgttatgtttgtaggctgctgcctcttaaatggttgtaacaccaaaatattatgttggaatgtatgaaaattctccaaatgttttgaattaaaactattactaccttttaagttaattttctaaaacaaatagatgataatattaaatcttggatagttcaaatttaggcttgaattttcaaactggcctacaactttagcttataagatggcttgttgttacagcatacagttcccgtgtaagtttatgataaataactttagcttataagatgggttgttattacataaattaagatattagtttaacttaatttaaatataaacaatccgagttgaaccgagctactctggaatcctggatcaaaatgaacgtgctagtaagctactagcttttagtcatgccctaattaagaagtaacagtcaaatcacttcgccctttcgcctagagacctacaccactcctcatttgacgatgcacacgtgtaggaagatctgcatcgactatactgtaccggttatatcggtttcagccggtactgatttatattagaatcgatgtcggttgataccgatcgatcgatgcttgataacatgttaaacgattcgaccagtaccaatccaaatcacttgataatgacggattttaacgacgttataatttaattggtgtacatgtacatcgtgtcagcttatatccgttttaaaccgtttgaaattcaataaatccaaaaaacatattaactaagagaatattcctaccattttctccacagccacgtgaccagtttcacagactcacagctcaaggaggtatttaatttgccaattttgcacctcacccaataactgtcgtacatataatatagtctaacatccaagtttcgaaaagaaggcactaaaattaatttaggatgttattaaccaaaaatcattcttcaacacattcttaaacgaggtatctaaatattccaacttcttaaatattcatatttagtctctagacttagggacctcttgtgcactccttatagcctatttcgtacgtcaatcataccgtaaaatcatttaccagccacgagtgatggactttgaataattgaagccgtggaaagaatgaatttaaaattctcgttggccaagtttgaagatgacttttttcaaaaaaaagagaaaaacgaccaacctgtgattcatacaaaacgaaaatattaataaagagaataacgatgattattgaactttatcgtacaaatgaaatcaaatttaaagctgcaagtacaaatgaaaattcgagcaaataattgagaactatttactaacctaataattgaggactatttatcgtacaaatgaaaattcgagctagaatactttaaatatatttactaacctaataagtgagaactatttggagaccaaggttgattttattcccaaacgaggtgtttggttcgaggaatgaactaatccattatcatttcactcttcattttttatttggtttgaagaatgaaatgagttgatctatcaccacctcattcctcatagttatttagctagtattaatatgagaaatgtggtcatcccaccaaatttgagaaattaatccatgatgcacaaccttatttttgatgcagtgattccttaaatcaagcaaccccaatatgtatctaccaatttgctgaatctaaagaggtgtttagtttctaggtactaatttgtagtcactttattttgttctattttaggttcttaaatttgtaaatttaaactctatattgatttcaatatttgacaatttaaaaattaaattaaaataaaatagagggacttaaaattaatccatagaaactaaacacccatcagtttataatctttttttttagaaactactggacgcgtgtcgcctggaaaaggattccgcacaatcacaggagtgagagcacgaaacctgtgccatattttttttgtcttcgatttgcagctccaagcagcagagctgcagagaggcgtcagcggagcacaagctggcgtccaagcaaagcccgctgaagtgtccccccctgcctttcttctctccttcactctctcgttcgtggcgacgcttgtgcgaccactcaccgtagcccgctcgacgccagttattcgccgtgcagctcgccggcgacgagcaccctccagcctaaggaggggagccggagatgttctactcgcagttcatcttggccaagaagggccccctcgggaccatatggattgccgcacacttggagcggaagctgcgcaagaaccaggtcgcggacacggacatcggcgtctcagtagattccatcatattccctgacgttccaatcgcacttcggttatcaagtcatcttatgttaggcgtggtcagaatctattctcggaaggtcaactacctattccatgactgcagcgaagctttgctgaagataaaacaagctttcaggtccactgctgttgatctacctcctgaggagtcaactgctccatatcactctataactctgcctgagacattcgatcttgatgattttgaactgccagaagctgtgtttcaaggcgatactgatcatcatgtgagcacaaaagagcagatcactttgcaagacaacccagagaaaacaggatattcaacatcccagtttggcctagatgaaagatttggtgatggcagttcatcacatattggcttggacttggaggaggaattaattctgaacaaggaccactcaattcatctcgagtctgatgatggtattattattcaaggtcggtcatcggtcccttctactgatatggagattgatgataacaaaagtacaaacataacagctgaaggatacagcaacatggacggcccatcaacttcgtactatcaacctagcccatttacttgtgatgaacctgcatcaccagagttcattagcgctcaggccccagctacacctggtttaatggaagagacagttccttccagagtccatgaaagtcctgttctgagtccacagagaaaggcatcaccatcaactaatgatgaaactgcaaaggctgacactcctgctgcaccagcctcagattttctccattcagctacaggaaatgccagtgatgtggtgggtgctgagatgacagaacttggattggcgaaaccggtgcaagttgagtcttctgttgtgcaggactctgatgcatcggtgcaacagcacacaagtgagggtttaccatcccagggtcaagcttcacacttggaagctgctgctgataagttggtcggctctgatggtatagctgcatcggttgatgaaacggtaactgtcaatgcaaccattgaagatgtacctttggctgtaaatgattcagagccatgtgttgatggttctgctggaccatctgtggtgaacctggtacagatggatggtccattatttgatgcacaaggtacagtactaagtgcagattttcaacatgaagtccaagcaatgcaacaagtagtggcatctaacgatagactgaatgaactatcaacttcagaatttgccgagcctgagaaaatgctgacagctccgaatgctgaattcaatcatgcgattgacttggggcagataactgcggaaaaaggaacaattgaatctgatggaagtaacataataggcagcctaacaagcagaaaaagacacctggaatatagcttaccagctttagagagtgagaccactaaaaagttgcctagccgaccacatgttaaaagaaccaatgattttgttcctcatgatgatgatatactggcatctattttagtcggtaggacccctgggttcacacttgattcaacaccactaccaccaagggaatcatctctgaaacgcccaaggttggggtcgaagatgggtacactcaagagaaaagtgcagatagatgatgccatggtcctgcatgctgatactatacggcaacagttgatcaatactgaggatatacggcgcattcgtaaaaaggctccatgcactcgttccgaaatatggatgattgagaaaggttcactggaagatgatttattccacgagcccatcttttcctgcctatctgaggagctaaacaatttacacaatcggacatatgagactattgtacaccctgctgttcagagaatggaactacatggtcaattagacatgcctgaaacaataccagaatatagaaatattgctgggtttggttctgctactattgatggcccacttcacataccagatgggattcaatcagatgccatgttgtcaggcgcaaatgttgcatatggcgctacagctgcttttggtttgcaaattcctcctgactaccaggttaaccgtgcatctaatgattttgttgtcggcactcagcttcaagaggtggctaaaccttttattggtaatgagcacgaagtggcacctcctgacagagagcatgctcaagtagatacattgtatagtgaccgttttcaaggtgttccatctgatttgcagaggagtaatgatgcaaatgtttctagtcaagatgtggttctagataactctggccaagcttgtgctcatgcagtggacggcatgacaagggagtttaatcattttgttcatagagacgctaatctttttgggagtactgaggtccctgcttctgagattactggggtggaatataatcaagatgcctctggttttcctcgacaaacagaggatgacaacacggtggagtataatcaagatgcctctggttttcctcgaccaacggagggtgggaatgcggtggagtataatcaagatgtctctggttttcctcgaccaacagaggatggaaaaacggtggagtataatcaagatgcctctggttttcctcgaccaacagaggatgaaaacacggtggagtataatcaagatgcctctggttttcctcagccaaccgaggatgaaaacacggtggagtataatcaagatgcctctggttttcctcggccaacggaggatgaaaatgccgcgtctgctacgggagataattctggcttccaagaaaacaacacgggttctcatatggatctggatatgatgaatgactatgaagtgaaggaatgcaacgattttgggagtgcgattcatggcgttgatacagattttctgaactatggtgacgacgacaacgacgacgacttcgtcgacgccgacgagccaaatcccagtgagttccagtctctcgacaacagcggctggtcttctcgcaccaggggtgtcgcgagatatctcaagactctgttcgacgaggagtccggtctggggaggaagagcgtcgccatcgaccatctggtgcgcgggaagacgcggaaggaagcgtcgaggatgttcttcgagaccttggtgctgacgacgaaggactacatcagcgtggaccaaccgaaccccttcgactttgtgagcgtgaagccaggcccgaagctgctcatgtcagagttctagttcaacaaagtcagcgtaccctggcgcgatacattccctcttaccattgtatccatcatcacaccgaccaacaacaacaccgcagatatccccccccccctcctcttccaaaaccatttttgtgtatgttgttgcagttcccctcccctgtagcatctggtgcgctgatccgttgttgttgccagggcgtctgtccgagtaggatggtggttgtgttgtaccgtcggctatccaacagtatatagtagtagtatgattttagcgacactcggtgaagcccgccatgtaatctgctagggttcatgctcccctaagttactgtcgctttagactggctaaagcccgtagaggaattgtatacgagaaggacagggacagcccgagatgatgaatgatgtattgatgtgcctgttgactatgtgaggactgacggttttaactcaataattcaagtgacctttcctgtgaaccatgaatccatgccggatatgaggtaaagatgaggaatggcctcgtacatccgtgcctttcgcgatgaaagaaagtggcttgtgatttgttttcccgttacaggccgatgggcgatggtggcccagggaagaagagacgagagcaggagaggaacgagaagagaaggcgagaaatcggtagaggacgacgagtggctggcaagaggatcatgtcgtcacggtcac

SEQ ID NO: 9358 - DNA, 8224 bp, Zea Mays
cacgtactctgtcaaacgatacgccgcgatgcttccagacaagcgccatccccttcctcgccccacacgccgtcgtgttggccgcgcctctcttcaaccttttcttgagcattggcgagagcccttcacatggtgcggcgctggcatcgttgttggcgacctctgcgcggtcggatctgcaaaggttgcagctagcgcgcctacagtacgtcaacatggtgcggcatctctttttgcagatccccaacttgctacgccgccggccgccgcatcggaactccttgcaccgcttgcctttcttctcccattcaaccggcaagcgttccctggctcaataacgcaactgggggatgtctgtcgctatctccatataggaaacgacaggtgcgacagatttagattttcaggtgatgcgtggtcgggatcgccggatcaatcaaaataagtgtgaaatttgagaggccgtggaacttccagatcgagtagtatccatccagatcgatatcccagaagaccaagcctggccatgaaacgcatgctaccccgatctcttcttcaccttttcttatccgcaggtaccaacaaaaaaagtgacccttttgacgacgtattgcgtgggcaaggcatgacagtgcgacaagagagaaactaacaaagagctctgttcgttctgctgattgcttatgattcgactcgcagtggcggtagctgggagagcttgggactggccagacacgaccaactcaccactgtaataagacgacttttatacatagctgacagtacgcaacctcagttcaggcgcaaggttagtctgatgatctgccttcattttgaatctcgattttgctgcttcatgcatgtatcatttgcgtcatcgatcatgtgctttttttctaagatctgtcattcgttttgcacgcacatcattttcctttgagttacctttacaaagatgacggacttcagcaagcgtctgcatatgcaattccttttcttgcctatccatcgatttactcatagattttattttcttcttagctcgatcaaatacttacatgttcgttttttgtttctagccattgggttggaattagatgatggatcgcacataacatacatagcactcttttttagcataccacctcatgcttaacgcatttcttatatatatacacaggttaactttccaggtaactcaaaccgacacagcttaagataaagttggcctccatattaattgctacttacatattatcatcatctttttccccaaaaaatcttactagaatactaagaccatttttacacagcaaccacataaagttggacccaacatcaacaatgattttacaaactctcttgaatcacctccaaaaggttcttattatacatctccaatagaattatctaaaattaaaattatgttcgtttcttacaggttgaaacaacaacttttgaagactggccatgaatatctagatagtactacaccatctacatagtaattgttttgcatgtctatgacgagcatcgtcacttttggaccacgaatcttttttgtgtactgaaaccttttcagttctttatatgtttaagctatctctggctcttgaattaccctagaatctggttaaccttgtctttgctcttatatacttatttactctctaatatacatataatcatcatacatttacattatactatgctgcgctaaacggattggcacgcgcgcatgggcgcgcgctatacactagtatatgtttgatagagaacacatccaagcgtgtgagagcaatttctagtgtgttgtagtgagaggttgcattgatcgacactatattatggtcgagttgcaagttagcggtatatgttatgtttgtaggctgctgcctcttaaatggttgtaacaccaaaatattatgttggaatgtatgaaaattctccaaatgttttgaattaaaactattactaccttttaagttaattttctaaaacaaatagatgataatattaaatcttggatagttcaaatttaggcttgaattttcaaactggcctacaactttagcttataagatggcttgttgttacagcatacagttcccgtgtaagtttatgataaataactttagcttataagatgggttgttattacataaattaagatattagtttaacttaatttaaatataaacaatccgagttgaaccgagctactctggaatcctggatcaaaatgaacgtgctagtaagctactagcttttagtcatgccctaattaagaagtaacagtcaaatcacttcgccctttcgcctagagacctacaccactcctcatttgacgatgcacacgtgtaggaagatctgcatcgactatactgtaccggttatatcggtttcagccggtactgatttatattagaatcgatgtcggttgataccgatcgatcgatgcttgataacatgttaaacgattcgaccagtaccaatccaaatcacttgataatgacggattttaacgacgttataatttaattggtgtacatgtacatcgtgtcagcttatatccgttttaaaccgtttgaaattcaataaatccaaaaaacatattaactaagagaatattcctaccattttctccacagccacgtgaccagtttcacagactcacagctcaaggaggtatttaatttgccaattttgcacctcacccaataactgtcgtacatataatatagtctaacatccaagtttcgaaaagaaggcactaaaattaatttaggatgttattaaccaaaaatcattcttcaacacattcttaaacgaggtatctaaatattccaacttcttaaatattcatatttagtctctagacttagggacctcttgtgcactccttatagcctatttcgtacgtcaatcataccgtaaaatcatttaccagccacgagtgatggactttgaataattgaagccgtggaaagaatgaatttaaaattctcgttggccaagtttgaagatgacttttttcaaaaaaaagagaaaaacgaccaacctgtgattcatacaaaacgaaaatattaataaagagaataacgatgattattgaactttatcgtacaaatgaaatcaaatttaaagctgcaagtacaaatgaaaattcgagcaaataattgagaactatttactaacctaataattgaggactatttatcgtacaaatgaaaattcgagctagaatactttaaatatatttactaacctaataagtgagaactatttggagaccaaggttgattttattcccaaacgaggtgtttggttcgaggaatgaactaatccattatcatttcactcttcattttttatttggtttgaagaatgaaatgagttgatctatcaccacctcattcctcatagttatttagctagtattaatatgagaaatgtggtcatcccaccaaatttgagaaattaatccatgatgcacaaccttatttttgatgcagtgattccttaaatcaagcaaccccaatatgtatctaccaatttgctgaatctaaagaggtgtttagtttctaggtactaatttgtagtcactttattttgttctattttaggttcttaaatttgtaaatttaaactctatattgatttcaatatttgacaatttaaaaattaaattaaaataaaatagagggacttaaaattaatccatagaaactaaacacccatcagtttataatctttttttttagaaactactggacgcgtgtcgcctggaaaaggattccgcacaatcacaggagtgagagcacgaaacctgtgccatattttttttgtcttcgatttgcagctccaagcagcagagctgcagagaggcgtcagcggagcacaagctggcgtccaagcaaagcccgctgaagtgtccccccctgcctttcttctctccttcactctctcgttcgtggcgacgcttgtgcgaccactcaccgtagcccgctcgacgccagttattcgccgtgcagctcgccggcgacgagcaccctccagcctaaggaggggagccggagatgttctactcgcagttcatcttggccaagaagggccccctcgggaccatatggattgccgcacacttggagcggaagctgcgcaagaaccaggtcgcggacacggacatcggcgtctcagtagattccatcatattccctgacgttccaatcgcacttcggttatcaagtcatcttatgttaggcgtggtcagaatctattctcggaaggtcaactacctattccatgactgcagcgaagctttgctgaagataaaacaagctttcaggtccactgctgttgatctacctcctgaggagtcaactgctccatatcactctataactctgcctgagacattcgatcttgatgattttgaactgccagaagctgtgtttcaaggcgatactgatcatcatgtgagcacaaaagagcagatcactttgcaagacaacccagagaaaacaggatattcaacatcccagtttggcctagatgaaagatttggtgatggcagttcatcacatattggcttggacttggaggaggaattaattctgaacaaggaccactcaattcatctcgagtctgatgatggtattattattcaaggtcggtcatcggtcccttctactgatatggagattgatgataacaaaagtacaaacataacagctgaaggatacagcaacatggacggtgggccttctagtcatgtaaagttaggtccactgaatgcagatgacctaggaggaaacagtatccgtaactggactggttacaatgtacagactcctgatttgaatgatatattattgcataataatgaggatattgcaggcccatcaacttcgtactatcaacctagcccatttacttgtgatgaacctgcatcaccagagttcattagcgctcaggccccagctacacctggtttaatggaagagacagttccttccagagtccatgaaagtcctgttctgagtccacagagaaaggcatcaccatcaactaatgatgaaactgcaaaggctgacactcctgctgcaccagcctcagattttctccattcagctacaggaaatgccagtgatgtggtgggtgctgagatgacagaacttggattggcgaaaccggtgcaagttgagtcttctgttgtgcaggactctgatgcatcggtgcaacagcacacaagtgagggtttaccatcccagggtcaagcttcacacttggaagctgctgctgataagttggtcggctctgatggtatagctgcatcggttgatgaaacggtaactgtcaatgcaaccattgaagatgtacctttggctgtaaatgattcagagccatgtgttgatggttctgctggaccatctgtggtgaacctggtacagatggatggtccattatttgatgcacaaggtacagtactaagtgcagattttcaacatgaagtccaagcaatgcaacaagtagtggcatctaacgatagactgaatgaactatcaacttcagaatttgccgagcctgagaaaatgctgacagctccgaatgctgaattcaatcatgcgattgacttggggcagataactgcggaaaaaggaacaattgaatctgatggaagtaacataataggcagcctaacaagcagaaaaagacacctggaatatagcttaccagctttagagagtgagaccactaaaaagttgcctagccgaccacatgttaaaagaaccaatgattttgttcctcatgatgatgatatactggcatctattttagtcggtaggacccctgggttcacacttgattcaacaccactaccaccaagggaatcatctctgaaacgcccaaggttggggtcgaagatgggtacactcaagagaaaagtgcagatagatgatgccatggtcctgcatgctgatactatacggcaacagttgatcaatactgaggatatacggcgcattcgtaaaaaggctccatgcactcgttccgaaatatggatgattgagaaaggttcactggaagatgatttattccacgagcccatcttttcctgcctatctgaggagctaaacaatttacacaatcggacatatgagactattgtacaccctgctgttcagagaatggaactacatggtcaattagacatgcctgaaacaataccagaatatagaaatattgctgggtttggttctgctactattgatggcccacttcacataccagatgggattcaatcagatgccatgttgtcaggcgcaaatgttgcatatggcgctacagctgcttttggtttgcaaattcctcctgactaccaggttaaccgtgcatctaatgattttgttgtcggcactcagcttcaagaggtggctaaaccttttattggtaatgagcacgaagtggcacctcctgacagagagcatgctcaagtagatacattgtatagtgaccgttttcaaggtgttccatctgatttgcagaggagtaatgatgcaaatgtttctagtcaagatgtggttctagataactctggccaagcttgtgctcatgcagtggacggcatgacaagggagtttaatcattttgttcatagagacgctaatctttttgggagtactgaggtccctgcttctgagattactggggtggaatataatcaagatgcctctggttttcctcgacaaacagaggatgacaacacggtggagtataatcaagatgcctctggttttcctcgaccaacggagggtgggaatgcggtggagtataatcaagatgtctctggttttcctcgaccaacagaggatggaaaaacggtggagtataatcaagatgcctctggttttcctcgaccaacagaggatgaaaacacggtggagtataatcaagatgcctctggttttcctcagccaaccgaggatgaaaacacggtggagtataatcaagatgcctctggttttcctcggccaacggaggatgaaaatgccgcgtctgctacgggagataattctggcttccaagaaaacaacacgggttctcatatggatctggatatgatgaatgactatgaagtgaaggaatgcaacgattttgggagtgcgattcatggcgttgatacagattttctgaactatggtgacgacgacaacgacgacgacttcgtcgacgccgacgagccaaatcccagtgagttccagtctctcgacaacagcggctggtcttctcgcaccaggggtgtcgcgagatatctcaagactctgttcgacgaggagtccggtctggggaggaagagcgtcgccatcgaccatctggtgcgcgggaagacgcggaaggaagcgtcgaggatgttcttcgagaccttggtgctgacgacgaaggactacatcagcgtggaccaaccgaaccccttcgactttgtgagcgtgaagccaggcccgaagctgctcatgtcagagttctagttcaacaaagtcagcgtaccctggcgcgatacattccctcttaccattgtatccatcatcacaccgaccaacaacaacaccgcagatatccccccccccctcctcttccaaaaccatttttgtgtatgttgttgcagttcccctcccctgtagcatctggtgcgctgatccgttgttgttgccagggcgtctgtccgagtaggatggtggttgtgttgtaccgtcggctatccaacagtatatagtagtagtatgattttagcgacactcggtgaagcccgccatgtaatctgctagggttcatgctcccctaagttactgtcgctttagactggctaaagcccgtagaggaattgtatacgagaaggacagggacagcccgagatgatgaatgatgtattgatgtgcctgttgactatgtgaggactgacggttttaactcaataattcaagtgacctttcctgtgaaccatgaatccatgccggatatgaggtaaagatgaggaatggcctcgtacatccgtgcctttcgcgatgaaagaaagtggcttgtgatttgttttcccgttacaggccgatgggcgatggtggcccagggaagaagagacgagagcaggagaggaacgagaagagaaggcgagaaatcggtagaggacgacgagtggctggcaagaggatcatgtcgtcacggtcac

SEQ ID NO: 9359 - DNA, 1874 bp, Zea Mays
gggcgcgaccgcgcgaaggggaggaatcccttcctccgcgagtcgcgagccgtggagatccgtcccactccacccctccgctccgccccagacctcgctacaaacctgccgcgaaaatagcagccgcccgtttgctctctcccgtctccgcactcctcccgcgatgagcgacccgcggggccgcgccgccggtcccgaccgctacggggacgaaccgcacgacctcccgctcgccgaggacgcaaacggcgaggaagcgtggcagacgcccgagaaagaggcggttgccgtgtcggaaggggccgctgcgcggagtggggatacgaccccggacgctgaacaggagagcgatgacggagaggaaggagtgggctccccggatcaggcggaacccaatgcgagcggggagggcgtaccgcccgtggccgcgactgtggagccggatgggattgttagcggcgcaaaggtggagacgaacagcgaggacgccatcagccatgacgccgacgaggaggagaaggacgacgacgatgactccacccaggatgcgtctccgatagccgaggtgaatgtggagggcgagagtggcgccgttcaccgcttggaggtggaaccggacccctttctcgatggagatgcctctgggacggaggaggagcaagccgcgttcatggtggagctggagcgcttccataaggagcacagtctcgagttcaagccgcccaagttctatggcaagggcctcaactgcctcaagttatggaggcaggtcgcccacctgggaggccacgagcaggtaacggtttgtaaactatggcgtcaagttggagagactttcaggccgccaaagacctgcacgactgtttcttggtcatttcgaattttctatgagaaggcacttcttgaatacgaaaaacacaaagtccggactggtcagcttcagataccaccgcctggtttaccacagcctagtggtgctgaccgtgaggtagttgtaaatcaatcatcttctgccagagttagaagggatgttgcagcacgtgctatgcagggttggcatgctcaccgcctccttgccaatggcacttatggggataacattttgaaggacaaagattcaatgccatcttcaagtcgtgataacctaaaaagctttggggtgctcaagagaaagaaagcatctagtccagagtatgctctcaagtcgtcctgctcaaaaataaataagtctgaggaagattctatggtcattgacgttggagaaccagccgactgggtgaagatcaatgtgcggcagactaaagattgctttgaagtctatgcactagttcctggacttctacgtgaggaggtgcatgttcaatcagatcctgctggacgtctggttatcacaggggatccagagcagcctgataatccttgggagatcactccgttcaagaaggtggtcaacttgccatcaagaatcaatcctcaccaaacatccgctgttgtcacgcttcatgggtttatgtcagttctgttgaggaaataggatttcatttgagcagatacatgatgtcaagctgacttagcagaactcttctgtagttggatgctggttgctggtgttgcgatctgttgccaccttgtttattgttacagtagtagccataaaattagttggttcatgtgtgtattccagtttcatagagaaaggacatgttggtcgtagtagggctaatttgacattatggttactaattattctttaaatacctctctggatcactccagggcgccctaaagctgcattttttatttatttatgaagctaactgatgtctctttgtggcagaaatcaactgtgtttcagtgacagaaattaacgccta

SEQ ID NO: 9360 - DNA, 1979 bp, Zea Mays
gaaggggaggaatcccttcctccgcgagtcgcgagccgtggagatccgtcccactccacccctccgctccgccccagacctcgctacaaacctgccgcgaaaatagcagccgcccgtttgctctctcccgtctccgcactcctcccgcgatgagcgacccgcggggccgcgccgccggtcccgaccgctacggggacgaaccgcacgacctcccgctcgccgaggacgcaaacggcgaggaagcgtggcagacgcccgagaaagaggcggttgccgtgtcggaaggggccgctgcgcggagtggggatacgaccccggacgctgaacaggagagcgatgacggagaggaaggagtgggctccccggatcaggcggaacccaatgcgagcggggagggcgtaccgcccgtggccgcgactgtggagccggatgggattgttagcggcgcaaaggtggagacgaacagcgaggacgccatcagccatgacgccgacgaggaggagaaggacgacgacgatgactccacccaggatgcgtctccgatagccgaggtgaatgtggagggcgagagtggcgccgttcaccgcttggaggtggaaccggacccctttctcgatggagatgcctctgggacggaggaggagcaagccgcgttcatggtggagctggagcgcttccataaggagcacagtctcgagttcaagccgcccaagttctatggcaagggcctcaactgcctcaagttatggaggcaggtcgcccacctgggaggccacgagcaggtaacggtttgtaaactatggcgtcaagttggagagactttcaggccgccaaagacctgcacgactgtttcttggtcatttcgaattttctatgagaaggcacttcttgaatacgaaaaacacaaagtccggactggtcagcttcagataccaccgcctggtttaccacagcctagtggtgctgaccgtgaggtagttgtaaatcaatcatcttctgccagagttagaagggatgttgcagcacgtgctatgcagggttggcatgctcaccgcctccttgccaatggcacttatggggataacattttgaaggacaaagattcaatgccatcttcaagtcgtgataacctaaaaagctttggggtgctcaagagaaagaaagcatctagtccagagtatgctctcaagtcgtcctgctcaaaaataaataagtctgaggaagattctatggtcattgacgttggagaaccagccgactgggtgaagatcaatgtgcggcagactaaagattgctttgaagtctatgcactagttcctggacttctacgtgaggaggtgcatgttcaatcagatcctgctggacgtctggttatcacaggggatccagagcagcctgataatccttgggagatcactccgttcaagaaggtggtcaacttgccatcaagaatcaatcctcaccaaacatccgctgttgtcacgcttcatggtcagctgtttgtgcgtgcaccatttgggtcatcctgatatgtagatatgaaatcatttttagttcagttttgttgactgtggcgcctcttcaccggtgatattccttgatatcactagggtttatgtcagttctgttgaggaaataggatttcatttgagcagatacatgatgtcaagctgacttagcagaactcttctgtagttggatgctggttgctggtgttgcgatctgttgccaccttgtttattgttacagtagtagccataaaattagttggttcatgtgtgtattccagtttcatagagaaaggacatgttggtcgtagtagggctaatttgacattatggttactaattattctttaaatacctctctggatcactccagggcgccctaaagctgcattttttatttatttatgaagctaactgatgtctctttgtggcagaaatcaactgtgtttcagtgacagaaattaacgccta

SEQ ID NO: 9361 - DNA, 3909 bp, Zea Mays
cagagacttcggttcgcgtttctctccccgtgccccgccttcctcggctcctcctccctccctccgaccacgacctctcactcccgcgtcgaactcgccgtcctcttctccctccccatcttggccggttctggccgtctatccctctctcccttttccacgcccaggccaacgccaaaaaaaactgcagcgcgcgctaagcgagccgcgcgaggaagcactcgcaggcaacgaccggcttgccgatcggcggggcgccaccgattgccatggagccggacgacgaggcgctgaaggtggcgcgcggcccgccgcaccagcgccgcgggatctcctacagccagccactgacgcgggacgccgcgtccgcgcgccgcgccgcgctgcgcaagcacagcctcgacgacgagcacattctgcctgcctcccactccctcaactacccgctccaccacgatccctcgggcatggtgcccatggtctaccaccctccgctcccgccccaccagcaccaccccagcgcttcctactcctccaatacccgacgctcggccggcggcctcagcgagggctccatgacgctcgagcgcgccatgtcagagtacggcggtggccatggctccctcccggagttcgtcggcgcggggggcggcaagggcatcttccgtgtgccgcttcgcgccgccatgcacccgggccgtccgcccccgcttgaggtacggccccacccgctccgcgagacgcaggcgggctccttcctccgctcgctagccgccgagccgcagcgccgccagctctgggccggggccgagtccgggattagggtgtggtcgctcgacgaggttttcgccgagtggggcgccggcgcgcgccgcggcgacgaggagagtgcgcccttccgcgagggcatgcccgcgccgcccgcgctgtgcgtcgtcgtagacagggccaaccgcctgctgtggacagggcataaggacgggaggatccgatcgtggcgcatggacctcgacgcggccgccacggctcctgcgcccccggccgctggtgccggcgacggcggcgggagcgttggagggagtagtcacggcggggcaagcaataatgcgccagtgttcagggaagccctcacgtggcaggcctatggccggacgcccgtgctctccatggtcgtcacttcgtatggtgagatatggtcgggttccgagggtggaatgataaaggtgtggccttacgatgccattgccaagtccctgtcattgtcaccagaagagaaacatatggcggctttgttggttgagagagcctacatcgacctgaggaaccattgcacagttggtaatgtttgctcattgcccgcttctgatgttaagtacatgctagcggatcattcccgggcgaaagtttggaccgtgactagcatgacatttgcactctgggatgctcgtacaagggagttgctgaaagtatttgggatggatggccaagttgactcagcaaagctagagacacctgtcatgccagagcaacctatggaggaagagatcaatcctaatcctaaagcaaaaccttcgaagaaggacaagtcacaaggttctttgaacttcttccaaaaatctaggaatgctttaataggagcagccgatgcggtgcgcagggttgcaacaaaggggacatttgtcgaagataaccgcagaacaggagcggtggctcaagcaatggatggaacaatctggtcaggatgcacgaatggcgccattattctgtgggatggaaatgggaatagagtgcaagaattccatcatcatacttcttctgtgcagtgcataaaggcacttggagaaagggtgtgggtgggatatgccagtggcatgattcaagtcatggatgctgaaggtagggcttgagggcagcgcgaatgggcaatggtggatagacaatattggcaaagcgcttgatgagggaacatcattccaccgagttggttctaggcagttggctgcattgcttattgctgcatgggcaagaaagagcctaaaaccatatgttggagatgttgaagctgctgcagtgccgtgtggtcttggacgtgctattggcaataagggtggcgtaggattgagaataagggtatatgatcgtaaaatgtgttttgtgagtaatcactttgctgcacatctggaagctgtgagcagacgcaatgctgactttgaccacatttatcggacaatggctttcaacaaacctcatggatcgacagcttctgctacatctgtccaattgcacagaacagtgaatgtcaatggaaatcaggttgaagaagtgaggcctgacctagcagaagctgatatgattgtatttcttggtgatttcaactaccgtctttatggtatcacatatgatgaagcaagggacatggtttcacaaagaagcttcgattggctaagagagaaggatcagcttcgagcagaaatgaaagctggaaaggtattccaaggaatgcgtgaaggtataatcaaatttcctccaacatacaaatttcaaaagcaccaaccaggtcttggaggttatgattcgggtgagaagaagcggatacctgcttggtgcgatagggtactatatcgtgatagccgttctgtatcagtagctgaatgctcgttagagtgccctgtagttgcttcaatcacatcgtatgtggcatgcatggatgtcacagagagtgaccataaacctgtgaggtgtacattcagtgttgatattgctagagttgacgagttaataagaaggcaagagtatggagaaataattgaatcgaatggaaaagtacgctctttgttccatgatgcttgttttgttccagacactacagttagcataagcgaaatcacactggaaaatcaagagaatattgtattccaaattacgaataaatgcgaaacaagcaaagcagctttcgagatcctatgtgacgggcagtcaaccaagaaggaggatggaactaaatcagagcttcttcctagggcatcctttggcttcccactttggctcgaggtccaaccagccgtcggtctgataaaaccaggtgaaacggtggaaattacactacatcatgaagatttttacacgcaggaagaattcgtagacggaataccacagaactggtggtgcgaagacaccagggacaaggaagctgttctcagaataaatataacaggcagcagctcaaccgaaaccaagacgcacaccatcaacgtccaacatcgctgcccaccatcatcggcgccaccgccgatgatgaaccaaccggtagccaccgtgcctccgagcaatgtccttgccagcgaggggcactcgaagcgctcctccaagaagagccagtccaagcaccgggaacagcaacaacagcagcaggattacccgcagtttgggagctcggaggtacatgacctgtgccgcatgcggtgcccttgagacctgtacaagctactcctacatcacttcaaaggagtatggatactgaagttgtgtctatgaggtgggaattacgagttttaggtttctcacatcgaatccaagtcccggagggccccgcagaagggagagagaagcctgggagaggagttgctccggctctgtacatatgcttcactcgatcagctgcctctcatgtagcccaagcaaagagtctagagtcctgagatgacagtgctaataacttgttgttttattcttgttccttgttaagggctgttgtctagatagttgaagccaaggatatttgaacaatgcttgatgtaatatgttccatagaattaccttaggtttgttctctcttcacgcagcagttctaatgatcttgtacttcttgactgttgccattcttaataagaaaccgtccagtcatttgat

SEQ ID NO: 9362 - DNA, 2043 bp, Zea Mays
gcgcgatatatactttgggacaacgacgacgacgacgccgccgagaaaattcttggatttccagaaggccccgatcgatcgaccgaggcggcgaatcatccgtccactcgctggcctcaccacctccccgtgcgcagccgtcgtcgtcctctcctcccttatcgatcgggttccggttccggccgctcaactcttctagtcttcttccttcctttccttcctttctcccccgtcccgctctggcctcctgcgtcctgctgccctgtgattgaagcaggcaacggccggctgttgggacggtagataaatagtaaatcggttgatactactgctgctgctgctattaaccgctcgggctggccggggcccccctcctcctcctgttgcttcgattccatcacacatcagcttggtgcattcgtcttcctgcttcctccttgcttcgtctctcttcagttcagtctccccttggagcgaggatgccttgtgcagcctggtctgcagggcggggctgagtcgtcgtcgtcggtgcaaagacgactgagggaaatatatatatatgtcagctgctgctgtagctctggaggaacctgctgtacaaatggtgatggtgagcgtggcgagcccgaggagcccggcggtgcggtcggaggaggacctgggcccggcgtggctgcggccgctgctgggcacgagcttcttcgtgccgtgccggctgcacccggagctgagcaagaacgagtgcaacctcttctgcctcggctgctgcacgggcgacgccctctgcgcctactgcctgccggcgcaccgagaccaccacgtcgtccagatacgtcggtcgtcgtaccacaacgtgatccgggtgtcggaggtggggaagctgatcgacatctcccacgtgcagacgtacgtgatcaacagcgccaagatcgtgttcctcaacggccgcccgcaggccaggcccggcaagggcgtcaccaacacctgccagatctgctgccggagcctcccggactcctttccgcttctgctccctcggatgcaagctgggagggatgcagtgggacccgagcctgacgttcgccatacggccgaaacgcgggcagggatccggcgacgacggcggctccggctccgacgactcgttcagccccaagaagccacggaggatggccgggttcgacctcggccgcttcgagcggccgggcggcatccggtggtccgacgacgagggcagcaggtccaacaacgggctcatcacgccggggacaccgccgatcaaccggtgccggccgtccaggaggaagggcatcccccaccgcgccccgttctacggttagctcgctcgtctaagctcctccagcggttggagtgcaacacccagtcgtcgtcgtcgtcaacctttaaaataatacagtaaaactcttcagccagcacgagatgatgctgtgtgacactcatcaggtctgagcagtgaagtgatccaaaatctgctgctggtggtaggtcaccatatatagctaggtacatatgtttagagctatagcttgttacataatagatatatagttgtatacatgcatacatacactacacaaataatgtaggcgaaagatatatgtacatgccagtatattgacaagggttgtcagtatctgtatagacataatctcaaaaaaggagatagaaacgtaggtagggtttggatttcattattagcttggctagtagtagtagtggtcgagattgatatgtgaaaaggaacaagcatcatgtatttatctcagtttgtagtatttgcctgcttgcctccgccacccaatgcgtttattagcgttgtggtgcgaagctaagagtttttgttaatctcctccttaattaggagcttaatctgatgtaaacagagtgtatgtatgtatgtatatacacacacaagtatggcgtatgtatatgtttgtgtaccatcagaaattgaagaaagatatggggaagaaataccttgtgggggtgtatgtaaggctatatctagcattttagttatca

SEQ ID NO: 9363 - DNA, 2630 bp, Zea Mays
atgacaccaaatactcttctctccactccacgagcatcaccaaaaaatcagacatattttcgtatttttaccatattttctcggcccattcacgatagcccaactgcccgagaaatattggcactttcagtaggcctgccggcccaccagagtacgcagctagccagacagccagcctccaacacctacctgcctccatcacaattacccccaaatccactgtcccttccatacgcaattgagtggagagccggaaaccctcttcagactacggctgtggaaggtgtcatccgccgacgagggcccgaccttctccggtcatatcttccccaaggccccaagctaggccgagcctcaagcgccaggcgcgccaccatccggagcagccaagcctggtgcatcgccgccgtcctcaactctatgctgccaggggcgccaccagccaccaggccatgcatggaaggatttcaagtggaactaaatataaattatgtcaagaaggacaaaactccatttgtggactatccagaactcaagaaagagtggtggccagactttgtggagtgggttacctctgatgagtatattgctctaggagaaaaggtcgagaaaagccaaagcatgaagaagttctgtcaaaaactaggccggcgaagctatactgtacaaaagagaaaatgggcaaaggaagatgcacaagcattaactgagggtaaatctattccatttcaagacatgccaggtggtcgtcataaggattgggcaagggcgaggaatccttctagcgatgtgaacataacagagtcgcatccaatcataaagaaaattgtagatctaaatgaaaagtcagtagctggtacctttacaccattggataatatggacatacttgcaacaacaatagggagtaatcatccagggaggacaacaggggtgagtgcttatgtgggtttagggatgggtcttgctcaaggtgatggccctcgtaagaagaaacgtagaacaacgaaagaatatgtcaagaggattgtggatgagtatgaggccaagtttgacaaactgacagccctgtgtcagagtatggagtgtcgattaaacaattctgagagttgctcatcatcaaaatttgttgatacaccagaccatgcaacacatcattcagttaactcattacaagaggtgatgaaatgcaagttagtggtgcagataggtccgcaatctgttgtggtcgctagagggcaggcttaccctcgaaaggatgttgtaaccgtccatgggattgagcggaaacaacagttcatgcaaagcctcaacaagtcccacacacatcgcctcagggcttttggtgcttatgtcgacaaaaaggtcgccataacaagaattttggtcgcacagttatatggaaacatttttagtctaaatactattttactcaaacctatgcaatatgacgttataaatatttacatggtttatgttttcaagggtcgtgctggttttgcaacttgtccattattgcctgatgagattgcaaatgttcgagaacggttgctcgacttcttcatgaatgaggtgatagacattggtggatcagcagggttgaaggacttaaaatatgaaggcatcattcattttcgtaagcattggaaaaacacggagcctattattattagggaagcatttgagccttctctatcatcaagctgggatcccttgagtatttggagaggtatccaggagatcatggatgaagaaatggatgaagatgtcatagtcaaggctgtggactgctcgaaccaatcagagatatcgagctcaaacagtttatcaaaggctacttagatggcagcaaaggaggagatgaccacttgttgatgctgaaattgaaagagtggccccgacccagtgtcttggaggtgtttctgttgtgccaaaggccagaatttattgtcaactttcctcttgttgattttattcatcctagatggggtctcctaaaccttgctgccaagttacccccagatgccttacaacctgaattagggatgaaactgctaattgcacatggaagtcaccaagaacttggtaaaggtgattcaatgacaaatctaatgattaacatgtgcgatgtggttcacatgttaatgcgtgcaactaaagtgcattaccaatgtcccaagagggttaaatatcctatttatgatcaaacagtgtaccttaacaattatcataagaagatgttgaaggatcaatatgtttgggtattgaagcttgtatgtattgaagaaaatcgagcagattacaatggactcagctcggtcgagaccaatatgttcaagctctgcaaggtgaggtctgttcagtttggccagaaaggcatcccctacctgaacacctacgacggtcgcaccatccgctaccctgacccgctcatcaaggccaacgacaccatcaagatcgatctggagacctacaagatcaagaacttcatcaagtttgacgtcggcaacatggtcatggtgactagcaggaggaacaccgggcgtgtaggagtcatcaagaacagggagaagcacaagggcagctttgagaccatccatgtgctgcttggagctttttgctatgtctag

SEQ ID NO: 9364 - DNA, 6047 bp, Zea Mays
gtcagctgatatgatgtacctcatttggataacaatttgactggcaccagattttacagaaatatgcaggaggggctagggcaaaggatgcatgtacctcatggtatcaatctgtgtatcgcaacttcttccatgccctttcaggcgcaatctttcattgagcccagtaccggacaagtgaaccctcctgtaacatctgaaaacttatctgctaactcacaagctgttaatgatgctggagcagttgaaggtactgacatgaacgaaaaatcggttcaaaaacctaagaggaaaaaacataggccaaaggtcattaaagaaggacaatcagcaaagctgcagaagcctaaaactcccaagcctcccaaggaaaatgggaatcagcctactggaaaaagaaagtatgtcaggaggaagggactaagtgcaccagctgaacaaattccactatgtgctgatacacacactagagctaaaccaggagtagtccaaagatgtttggactttgatgtggaggaccagcatggacatttggatctggtaccgcaaacccaggaaacagagatacagactggtcctgcggacacacaaccatcaatatctggagttgaaagaagtaatgttcaaatatcataccattggggtggtacaagcagttctattagttcagttgacccaatagctggtatacacggattacaggcagactgcaattctaaaagagtcagttttgatctgaacaattctatagtaagtcagctgccaaccaattattctagtccaatggacagctctgaacaatttttcaattttgatttaagagaagaagttcgaacaaaccagttattgcctcatctaaccagctcggtagatcacacacgacacccctcggtcaattttgaccaatacataagcacatctcaagattgtccagaaaaatcacccagacattatcagatggtcagtagttatagaattctagaaaatatgacaacagcttctcagtataccgaaagggtgtctatggggggcaatttcaaccctgaagcttgtatgggcgaagatgcaataatcaaacaaatggcccaaagctatagacctctagaaagtccatttgtacctcccaatcataatgaaagggatatgatgaacggaaatctgaacgagtttcctgtgaagaatgattacttgaagttttctaccaatagtaactaccaaactggagcaggttttgatcattgttctccagactattcagatgttcttgcaatgggtacaaaaagagaacatgatgctatcagtggccatcagatttctcttggcattgactttattaactcaaatagaacaaggaagttctgtagtgatgaccccctttccactagctctcaaacatcttactgtcctcaatcatgcaaaaggatgaggccagaggatcatagcaatcagctccatggaactatggttcccaagcttcgctgcacagaacatacctttgcctggcagtactgtgaaccaattgggagaaagtaataccttgaggaatggagtgcatcaaattcaaccttgggaaattacatataggctacatgactctagagacaatttttctttaccagggaacacacagttctcgaatggcacagtgaatccatcctcagaaaactatattcagagtaatgctattcatgaacatcaatgcttagaaaacgttgtggctaaggtgccagttttgtctgaaacacaaaatacttccactcaagagggccataaccactgcactgctgctactactgatgagcatatcagaactacaagtgatgaagttgttagatccctcacccgacgtgcaagccaaccaactacaaatgggaactacaatattaaatcttctagagtaactgcagaagcaaactgcactgagaagccaagaaaaaggggtcgtccaagaaaagtagtaaaccccaatggggagccaaaagaaagaggtactaaagggaaacaaaatgttggtcatgcagaacttatatcaccaaaaggttcatgtgctgactttttaaaaactaatggtattacttatgcttctgaatcttccactggaattactcctaggatgtcaactgtggagttgaaaagttctgaccaagataaggagattcatggaggtgccatgcctcaagctacagcagcatcagttgatcctttagatggcataattgaaaagattaagctcttaaccataaacggaccagacaagggtgtgtcagaggtacctaaaaatgctcttgttccttatgaaggtgaatttagtgcactgattgcatttgaggggaaggcaaagaaaagccgtcctcgggccaaagtgaacatcgatccagtcaccactatgatgtggaacttattaatggggccagatatgggtgatgatgccgaagggttagacaaggataaagagaagtggcttgatgaagaaagaagagtgttcagaggacgggttgattcattcattgctcgtatgcatctagttcagggggataggcgtttctctcgatggaaaggatcagtcgtggattcagtcgtgggtgtatttcttacccagaatgtttcagatcatctttctagttctgctttcatggcggttgctgccaaatttcctgttaagatagaggtccctaaaaaacctgtggctgagatgtctcatactcctgaacagaaggatagttgttctggactgtttggtgattctatcaaattgcagggcaatatatacattgaagagataagtgacattaaatcgttaattactacagaagataatgaagaaagtaataataacgaattgattggaaactctgctgggaatggagtaaactgtgcaactggaggatgccatgtctcttatagtaagtcactaactggatcccatggaaatgggctatcaggatctgtttttccaactaccggcttttcaggtgtggtagaaactgaagatggatcactggaggatgttatttcttctcaaaattctgctgtttcttcccagaattccccagattatgttgttcgtagaaccgatccaataggttctagttcgttacaaaatttcactgaagagggctgtattatgagaaatatgtccaatgggactggcatctctactgactatacattgtttctgccaattcaagatccaaaaggcatgctcggattatcagaatattgtggacttaatcctcttccagtttcaggtgtgaacaaggacatgttgcttgatctaaacagatcatatcagccattacatacttatatgccctatgatcagaatagtgagtctgatttcacaggtgtgtcatgtttgaaccatatgggtaaatcattccacacaggccctgataaagtgaatctttccagtgttacacagtctgaggctagtctttaccctattgatcctttagaacaaggcgacttttcaccactaattaaacaaaacttccaaccattacatagttcagacgaagtgccatttttcaaggagcactcttcatgtaatgattttttgaggaacaaaactgaagctcattttctggaaccacttgtctgttcaaatcctcaagaggtgtacacaacctcaacagatcaaatgggtgctgaacaatctcaatcaggatgtggccaaaagtacaatgatgccagagttcagacagcatcacatgaaaggcatcagtcttcaaccttgtgtgataaccagaactcttgttcggtggtgttgcaaggagttgcttcagactcaacacagaagttcgttgatactcaaaaggggccgtcaaaagctcgacaaaatggatcaaaagctaaggtacggggccgacctaaaaagaaaactgatgactgggacagtttacggaaaaaagtgctttctaatggtggggacaaacaaagaagtcatgatgcaagggatactgttgattgggaggcagttaggcaagcagaagtacgggaaatatctgaaaccatcagagagagaggaatgaataatatgctagcagaacggataaaggaattcttgaaccgattggtgacagaccatggaagcattgatcttgaatggctaagagatgttcaaccagacaaagcaaaggacttccttctaagcattagagggcttggactcaaaagtgttgagtgtgttcgcctcttgacactacatcatatggcttttccagtggacacaaatgttggtcggatatgtgtgaggcttggatgggtgccacttcaaccactgccagagtctcttcagttgcacctcttggaaatgtatcccatgctggagcacatacagaagtacctctggcctcgactatgcaaactagatcaacgtacattgttttctgcacaaaaagtaagcctaattgcaattcatgtccaatgagagctgaatgtaagcactttgctagtgcatttgcaagtgctaggcttgctcttcctgcacctgaagaaaaatgtttggttacattggaagatccaaatgttgtagagttttctcaccaaacatacataaactcagggagtgttggccaacttgagtggagtgcaaattatcctaaacatgctgtttctggtaatcatcagccaatcatcgaggaaccactgagcccagaatgtgaaactgaaaatatagaggcacatgagggtgcaattgaggatttcttttgtgaagaatctgatgaaattcctaccattaatcttaatatcgaggagttcacacaaaacttgaaggactatatgcaagcaaacaatgttgagattgaatatgctgacatgtcaaaggcattggttgccatcacgcctgatgctgcttccattccaactccaaagctcaagaatgtcaatcgtctgaggacagaacaccaagtttatgaactgccagattcacaccctcttctggaaggattcgaacagagagaaccagatgatccctgtccatatcttctttccatatggaccccaggtgaaactgcacaatcgatcgatgcccccaagacattctgtgattcaggggagacgggtagactatgtggaagttcaacatgctttagttgcaacaatatacgagaaatgcaggctcagaaagtcagaggaacacttttgataccatgccgaacagcaatgagaggaagcttcccacttaatgggacgtattttcaagttaatgaggtatttgctgaccattgctcaagtcaaaatccaattgatgtcccacgaagttggatttgggacctcccaagacgaactgtttactttggaacctcagttcctacaatattcagaggtttaacgactgaagagatacaacgatgcttttggagaggatttgtttgcgtgaggggctttgataggacagtgagggcaccaaggcccctttatgcaaggttgcattttcctgtcagcaaggttgttagaggcaaaaagcctggagcagcaagagcagaagaataatagtacattgaagaaatataggggtgctaaccagacgaggatggatagcccgaaatgagatgctgacccaataggtcgccaaatcacctccaaattctaacccaatgacttccatctgtaatgaatggcaataccttgaaaacctgtgatggagatgttttgtggcgacatgatctcttaaattagattccgtctttggtaacagcctagctgttcttgttgagtcgcatattctttattctgaagatcaatatagcaaatgggagaaaaaacatagtgcacagtcgagctgttctaattgtacctcttgtgagtggaatcagttgttgtacaacaggaagatggacctatctgtacaatggtcgtacatgttctttgatcatagtataaacaatgtaagcctcatcagccgttatttgattgtttcaaaacaaaggaaaagcattttcaattcatctgttcaaagactatttccttttccccccttctatcttgagatggaaactgactaattttttacttgtggggatctgacagtgaatatatcaaaa

SEQ ID NO: 9365 - DNA, 3644 bp, Zea Mays
tctccggtgggacacgtagggcgtgtttgtgaccctgtccctggccagctcggtccgttcaattagaccaggctgaggctagcctgtcccggctactgcaacttattttgtttgcgcacttgtaccatatgagcctggctcagacgagctggtgtttgtcatccaatatgcagccaggctagaagaccaaaactacctaaacgcggaatccttgcgccacgagcagccaggctcccaggaaacggaccttgagctcgtttctgtggagccaggctgagaggctcaatttgcacgcgcacagcctggctctcgagccagccagacgacgcaaacataggagctgcagcccgggagcgcagccacgcaaacacaggagctgcagcccgggagcgcagccaggctgctgggccatggcgacaaacacgcccgtagagtgtggtcgtggtcgtacccgggccgggactgaacagcccaactgctccagcttccagtcgttctgacagcatgcctgaaccaccaggctcctcgctgacccctccgcttccttcccgccaagcgaaagcgccacccgcgctgcccctgccccccttgacgccttcctccgatcctcaacaggatacacccctcgcaacagaaaccccctccgccgaggcccgccgaccaaacttctgccagtaccgcttgcaccttacctgccaagctgcgtactgacggaacgccttgagcgagagcgaggttgcgctccactccactccactcgccagttcagttcttgcttcctgctcctgtcgtggtgccctgagtccctgactgcgaggagctagctatgcatccccgcggtggccgacgaactgcgtagcctgatcaaacagctgaataatctggggaagcaagcgtcaaggtaacaatgactgaaatgggagaagctctgagaacctgcatggagcggctggtggttgccagagaagagcgggagcagatcatcgtcgaggcggccaacgagatatcctccaagaagaagaaagtgcgcgagctccagctgaagctggaggacgcgaacaagaagatcgcgaagctcgccgccgagaacagcaacctctgcaaggccgctgacgtcaaggacgcgctgatcggggagctgagggagtccgcagcggccactggggacaagctcgccgacgcgacggcgaggctagagtcggcgcagaaacaagccgggtcgttggagtacgaggtgcgcatgctccagaaggagctggaggtccggggccaggagcgggagtacgacctcaagtccgtcgacgccgcgcgccggcagcaggcggagcaccagaagcggatcgcgcagctggaggctgagtgccagcggctgcgcgccatggtccgcaagaggcttcccgggccggcagcgatcgccaagatgagggacgaggtcgatcagcagcaggcccagacccccacagccagcccgaggcgaccccgtcccgcgacgccctcctcgccgcggtcggccgtcgcgccgttctcgccgcggaccccgtcgccgcggcgatccgtctcgggcggcgccgacggctacgcgttcaggctccgcgccgtggaggacgagaacacggcgctgaagcaggcgctggccaagagggagagcgagctgcagttcatgcagatgaagtacgccgacgaggcctgcaagctgacggcggctcagatgcaggtcaaggagctgacggaggagaacaggcagctgagtgacgccaacactcagtctgaatcctgggcttctgctctggtttctgaactggacaagttcaggtcaggcaacgagaacggtggtgcctgtgcgtccatcatggcatcatctgagatgaacctgctccatgatttctctgaggttgagaagctggagacggcgtcaggtgatcaaaagcgcaacgtgcagcgtgcatctccgcacaaggcggatacaggactggcaacggaagaacagaatggtaatgctcctgtcctggatggtagcgtctccaacggccatcctgagaaggttaggcatatctgggaattagttgtgcagaagcatgaagcgagcggggaaagctttgaagctattattgaacagataagccaggcattggagcagacagctactcgtgccaagagagatggttcggacgtgccaagtgaccagtctgaaatagagaaggcggtgagagatatggttgagcagaccacttccatgatccaggcggcatatgcagaagaagacgacgtcgcaagatcaagagcgctgtcgcaccacaagtctgagatgtttcgccgcttcaagcgcctggttcaggtccgtcatgagctactggaagggaaatgcgaccttggaaagtttgtagacgaggtctgcctcatcctaaagtacgtagtgagccaatgcttctcggatcaagatcagatcgacactgtgagccgtgatacagaggattttgatggagctaagccatcaggtgcggttacagcagacggtacgcatgacactgaaagcgctaaaccaacagcgacttcagcttttcggacagaagcagatggagaaccagttcagtcagttgaaagccagactacggcggccaatcgtctgcagaaacctgatatagaactcatacatgccctacaacacgaggatggtagtagtatcctttcagagagaaaatcggcggcataccgtgagatgcaaagccctgcttctgaggcaagtgtggaacgtcgggcagtgcaagaggaaaatcatttagcaacaaactcagagattctcgcagcggctgataagctcgccgagtgccaggagacgatcacgatgctgagcaagcagctgcaggctctaaagacgccggcaactccaggtcctctagacgcctcctccgcctgcatccccaggacgagctcggcgaagtccgactacaagccgcagtcgctcgcgagcatcctcgccgaggcctccacgtctcccagtcccactcccaccacgcccacgccacaggtgctgtccaaggaagacgaaggcgaggttcgtgctactgctacgccgacgacgaggagcgcagcacggcaggaggagaacgacgccggcggcaataattcgatgcagattgtcgtcgtccatgccgagccgcggccggacgacggtggttccgctgacccgacgaagaggaggaagaagcgcggcacgagcctgctgggcaggatcgtgttcaggaagagagccgaaggcggctcctagaccgactgcggtgacctgcatcgatgcggtggatgcgttctgctgcctacaggtttggcatggatccggccaagtgtgctgtcacgttgtgaccagtggtttttttccccttcttcagcgtgttctgtttatgctgctcccagtgagcgagcgatctttttgggcgacatatgttccggtcttgcagagccttgtggctgatggcgacgggttctgtcgcatggtgtgagctacgtgtcttcttttgtttatggacagacttttctctgtgtatttatgaacatcttggctgtgcaaaaatgtttatttattggaaggggacaggttcttttgtccttacagtaacagtgcgtgggtacagtactgtacagtactagaa

SEQ ID NO: 9366 - DNA, 1115 bp, Zea Mays
gctggtgtgctcgacgccagtataaatttggtgtacccggcggcataagctgcagcaacgcaaacgcaagcagctgctagcataggttacaacatacaagtgcagcacgcgagtgcagacagctagagaaagtccaagatgcctgctggaagaagcgcgccggcaaggggtgcagcagtggcagcaatgctgctgctgactatgcttgcacggctaccatgcctagaagcccaaagctcgcgccgacctactgtcctcactgtagacatgacaggcaagggagattacagaaccatacaggaggcgatcgacgccattcctgccgccgcaaacaactcgaccagcgcggccatcgtcacgatcaacgtcaaccctgggatatacacggagaaggtcgttgtcaacaaggctggagtctctctagtcgggaggagcgccacctcaaccatagttacctggagtggaccctggaaccagaaccaccagtctgagtttgctctctacgtacaggcaaccgactttgtcgccaagggcttaacatttcaggtgttattaaatcataatatactagttcgacaataataaaatatagcctaattaaaatagtcttgagaggaataactaacaacagtcaacacccaagaacctgagatcgagtgaaacgtcctttctgcctatataaatagttccatgttaagagaatgcagtgtattccacatccatgactcggagtgctaatggattacgatccaaatgttttttcataatttaatagagtcttaagtttaaaaataaatagaaatagagcacaataatattctggtctgatttttaaattttataatgtaaaatttacaacatattttcacatctacatgtatgtgtgcatgcagaacacgttagggagtaaggataatggcccggcggtggctgctaaagttgacgccgacaaggcggcgttctatgactgtagattcctatcgtatcaggacaccttgctggatgcaacagggcgccactactatcgtgggtgctacatagaaggcgccactgattttatattcggcacaggaaaagccttttttgagagatgggtagttcgtgtcaaaatttag

SEQ ID NO: 9367 - DNA, 3510 bp, Zea Mays
atggatccggacgacgaggcactgaaggtggcgcgcgccccgccgcagcagcgccgcgggatctcctacagccagccgctgtcgcgggacgccgcgtccgcgcgccgcgccgcgccgcgcaatcacagcctcgacgacgagcacattctgccgacctcccactccatcaactacccgctgcaccacgatccctcgggcatggtgcccatgggctaccaccccccgctcccgccccaccagcgccaccccagcgcgtcctattcatccaacacccgacgctccgctggcggcgtcagcgaggactccatgacgctcgagcgctccatgtcagagtacggaggcggcaacggcagcctcccggagttcgtcggcgcggggggcggcaagggcatcttccgtgtgccgctccgcgccgccatgcacccgggccgtccgcccccgctcgaggtgcggccccacccgctccgcgagacgcaggcgggctccttcctccgctcgctcgctgccgagccgcatcgccgccagctctgggccgggaccgagtccgggatcagggtgtggtcgctcgacgaggtgttcgcggagtggggcgcgggcgcgcgccgcggcgacgaggagagcgcgcccttccgagaaggcatgcccgcgccgcccgcgctctgtgtcgtcgtagacagggccaaccgcctgctgtggacggggcataaggacgggaggatccgctcgtggcgcatggacctcgacgcggccgctactgcgcctgcgcccccggctgctggtgcaggcgacggcggggggagtagtcacggcgggggaagcaataatgcgccagtgttcagggaagccctgacgtggcaggcctatggcaggacgcccgtgctctccatggtcatcacttcgtatgggatgctcgtacaagggagttgctgaaagtatttgggatggatggccagtttgagtcagcaaagctagagacacctgtcatgccagagcaacctatggaggaagaggtcaaccctaatcctaaagcaaaaccttcgaagaaggacaagtcacaaggttctttgaacttcttccaaaaatctaggaatgctttaataggagcagccgatgcggtgcgcagggtggcaacaaaggggacatttgtcgaagataaccgcagaacaggagcggtggctcaagtaacggatggaacaatctggtcaggatgcacgaatggcgccattattcagtgggatggaaatgggaatagagtgcaagaattccagcatcatacttcttctgtgcagtgcataaaggcactcggagaaagggtgtgggtgggatatgccagtggcatgattcaagtcatggatgctgaaggtaacattattgcaggatggactggacatagctgtccagttataaggatggcaattggttgttcttacatttacacactagcacatcatggtggtattcgggggtggccactaacttctcctggaccccttgacgatattatacgaactgaattgtctaacaaagagctgtcatacactagaatggagaagataaacataatggtagggagttggaatgtagcacaagggaaagcatctgctgagtcattaagatcatggttgggtagtgtagcatctgatgttgggttggttgttgttggattacaagaggttgagatgggcgcagggtttcttgccatttctgctgcaaaagaaacagtagggcttgagggcagtgcgaatgggcaatggtggatagacaatattggcaaagcgcttgacgagggaacatcattccaccgagttggttctaggcagttggctgccctgcttattgctgcatgggcaagaaagagccttaaaccatatgttggagatgttgaagctgctgcagtgccgtgtggtcttggacgtgctattggcaataagggtggtgtaggattgagaataagggtatatgatcgtaaaatgtgttttgtgagtaatcactttgctgcacatctagaagctgtgagcagacgcaatgctgattttgaccacatttatcggacaatggctttcaacaaacctcatggatctacagcttctgctacatctgtccaattgcacagaacagtaaatgtcaatggaaatcaggttgaagaagtaagacctgacctagcagaagctgatatgattgtatttcttggtgatttcaactaccgcctctatggtatcacatatgatgaagcgagggacatggtttcacaaagaagctttgattggctaagagagaaggatcagcttcgagcagaaatgaaagctggaaaggtattccaaggaatgcgtgaagctgtaatcaattttcctccaacatacaaatttcaaaagcaccaaccaggtctcggaggttatgattcgggtgagaagaaacggatacctgcttggtgcgatagggtactatatcgtgatagccgttctgtatcagtagctgaatgctcattagagtgccctgtagttgcttcaatcacatcgtacgtggcatgcatggatgtcacagagagcgatcataaacctgtgaggtgtacattcagcgttgatattgcaagagttgatgaattaataagaaggcaagagtatggagaaataattgagtcgaatgagaaagtacggtctttgttacaagatggttgttttgttccggacactacagttagcataagcgagatcacactggagaagcaagaggatattgtattccaaattgcgaataaatgtgaaacaagcagagcagctttcgaaatcctgtgtgacgggcagtcaaccaaggaagacggtactaaatcagagcttcttccaagggcatcgtttggcttcccactttggctcgaggtccaaccagccgtcggtctgataaaaccaggtgaaacggtagaaattactctgcatcatgaagatttttacacacaggaggaatttgtcgacggaataccacagaactggtggtgcgaagacaccagggacaaggaagccgttctcagaataaacataacgggcaacagctcaaccaaaaccaagacgcacaccatcaacgtccaacatcgctgcccaccaccatcggcgccaccgccggcgatgaaccaacaaccggtggctgccgcgccaccaagcaatgtccttgccagcgagggacactcatcaaagcgttcctcgaagaagagccagtccaagcaccgggaacagcagcaggattacccgcagtttgggacctcagaggtacacgacctgtgccgcatgcggtgcccttgagacctgtacagactactcttacattactacaaagaagtatggatactgaagttctgtctaggttctgtacatatgcttcactcgatcagctgccactctaacgtagcccaagcaaagagtctagagtcctgggataacagtgttaacaacttgttgttttatttttgttccttattaaggagtgttcgctagatagttgaagccagggatatttgaacaa

SEQ ID NO: 9368 - DNA, 2109 bp, Zea Mays
atgaagtcgccgctgcggaggttcaggggcttcggccaccaccacaccaaggaggagcggaggggccaccaccagccgccgccggccaagctcgacgagctcgtctgcgccgcccaggaggtggaggacatgagagactgctacgatggcttgattgcagctgcggccgccacaacaaatagtgtatatgagttttccgaggctcttgaggaactgggaggctgcttcctcgcaaaaactgcactaaatggcgatgacgatgatgatagcggtagtagagtgctcatgaagctggggaaggcccaatttgaattacaaaaacttgttgatacctatcgctcaaatatcatttatactatcacaaccccatcagagtctcttctcaaggagctacagactgtcgaggaaatgaagcagcaatgcgacatgaaaagagagacatatgaagctatgagggcatcctatacacaaaaaggaaggtcaaggcattccaaaactgaaacatactctgcagaacaactgcaaagcgctctcgctgagtaccaagaagacgcagcgctgttcatatttcgcttaaagtcattgaggcaagggcaattccatagccttttaacacaggcttctcggcatcatgccgctcaggagagggttgaactgtcttgaggcactcgaacctcatgtaaaggcaatagctgagaaacagcacatcgactaccagttcagtggtcttgaggatgatgcatctgacaacgatgattacagctcctaccaggatgattgcagtgacgatggagagctcagtttcgactatgaaataaacgacaaggatcaatattttgttgcttcaagtggttcaatggatttagacaaaagagatgtgacgaattccccgcagccagtaaaagaaagcatgcaggaaggggtcaaacaaaccaagggaaatgttataactccgcgagtgaagccagagatcaacacacactcagcacccattctggcaggcaacttaccggatccgtccgagagatcttggcaaacgaagccatcttcagccaaactttcgtacaagcttccaatgccagttgatgacaaggatcccagatctgcaggtgctcagagaccacatcattcacagcagctggagagtaagcctcgtgtctcagcgaatccgtggcattcgtctccactgacgaaagacttcaggccgggtggccacgtgaaaacgccaccaagtgcggagggggcctcggcgttctcccagccggtctctgatttcaagaagatgaagaggcagttctattctggtccaatggcaagcggaccagggttaagcatgccatcttcgctgaacgatcgcagatcatccgcggcacaagcacagcatcttgtgatgccaggaaatttgcaaggcctcttctggcagccgtcatctgcgtccccaaaagttccccccaagatgttggggcggcatccaacgaaatcaccaaggatcagcgagctgcacgagctgcctaggcctcctccagccagcgtggagtccctcaggccttctggtttggtcggctactctggtcctctggtatccaagcgtcagactcagatccctgcagccacagcccgtgtgtcgccgacagcgtcacgaaccccctcgccgcttccaccgccgcctgctaccctgactcgcagctactccataccatcaaatagccagaggataccgatcgtcaccgcggacagattgttggaggctagaaatagcagggacggcagcgatatttattcgccgccacttacccctttgtcactgactgatttgtcccagcagcaaggaacgaaaactactgcaggtggcacaaggatgaagggggccttatgacataaatcaaccaaatgcagactgatcttagttgattttgtaagtagtgatgtattttaggttcatattcatgatattcttttattcatcgtctgtattacaaatgaaaaggacggaaaagtaatatatacttttcttacacagtagtgatgtattgtaggttcatattcattatatattgtttcattcaccgtatgtattacaaatgaaaagggcggaaaagtgcaagaaca

SEQ ID NO: 9369 - DNA, 1861 bp, Zea Mays
cactctgtctcaccgcacgagccccgcgtggtggtggtggtggcgctaaatggcgagcagcggggtgaggaacggcgtggggcccaggatgagcgcgaaaccggaccgtcagggcgccggcgccacgcccaagacggccgcggggaagcaccgcgtctcctcggcgggcggcgccggcgcgtaccgccggaccagctccggcccgctccccgcggcggcgggcggccgcgcggcgtcggacggagagaggctacgtcaaaaccagggtttttggctcaatggaatctacccaatagaagaattactaaaaaatgatctcattcctattaattcttctattgggttgattaaattgtttcattttgtatttattctgactgcgtgccaagtgtacaaattgtctctcattgttgatcatgtggcaactagcgttttgaggcttcaaatgaggtaagacttgatgtttatttcagtttcgttcaatttcagacttcaaaagaggtaaaacatcctctttcttcatatataaatgatatattgtctatatgaagccattatacaggcaaaacaaccactatattggcaagtcgacgactagtcgactgacttatcgactagtcaccaagtcggtaccttgtcgactcgactcgacttaccgacttgaaaaccttgatgttgataactactctgctagtgcattgtcaagggcgtcgagcccccgactagccggaccgcgtctacgcagctcgtagccgtcggccgtcctctccggtgaggttatccccctcaactgcaggcttaacagaaagagagagagagattaaggatataattcttgcctaattgattgtcaagtgcttacaagtatatatagccaatggcccaaccgacatggagaaggttctccttgattctagggatttccaaaacaactcttcttgattctagggattcccaaaacaactctccttgattctagggatttccaaaacaacttactaatctaacacttgcagcgcctgcccagcgtgctcagtcgcgctcagctgcgctgtgcgtccgcacatgacatgcatagatggttaaatttcatattgcattttttttcactccatgttgtgcgccactatttccttacatgatggttccaaaaatttgaggattgaattattggttgatattacgtgtattgttgaaattataaataacactctattcttgttgtgctttctggcaattttgatttgaccaagtatctatatttttggtcaactgaagaatctattcctccctggtcccagcagtttctagtagagtaagggttgctgtaaggcttaggcctaggaatgcagaagagttggcggcagatgcagattttggtgattgtgttgaacttcagccagagctcaaaaggttaaggcttcgtaaaaataattgggagtcggaaacatacgaattcgatgaagtgcttacagacttctcttctcaaaagcgagtgtacgaagttgttgcgaaaccagttgtggagagtgttatggagggatataatggtacagttatggcatatggccagactggtactgggaaaacttttacactggaaagacttggtgaagaagacactgctgctaggggaatcatggttcgtgcaatggaggatattctagcagacataacacctgggactgattctgtctcagtatcatatcttcagttgtacatggagatgatacaagatctccttgatcctgtaaatgataatatagccattgtagaagacccaaggactggggatgtttcattgcctggagccacagtagttgaagttagagatcaaaaaagctttgtggatcttctaagg

SEQ ID NO: 9370 - DNA, 2302 bp, Zea Mays
gacggcagcccaggccgagatccgacgtagacgtcatcccacagcattattcgcgacagctccggtttggggggatagggagcgagaggcggccgcgccacacaaaactatctccgccgcggctccgttgcatggtataccatgctgccggcggctgccaccgctgcagcgccggacccctcgtgctccaccttcccctcctcccgccgcgctccccctgtcgcttcgcgtcacagcttcgttgttgcaacaagagccaccggcagctcgggtctcttctctctccggtgtcacggtcgccttccctgccactctcgctgtcgctgccgctgccgcgcctggtggaacaatgagcgagcgcgccgggtcacatggacgagcagccggcgagggggaggtaccacccgttcgaggagatctccgaggcggtgcagctggacgacggcgagccggcccacctgaccgacgccgagtcagcccgaacaatcgtcgaggtgaacaacaaggcgacggtgatgatctccacgctcgtcggcgacggtgtgcacgagcggatcatcctgccggagttcccctacctcaccgacgagaacggagatatctacttcgaggtcgacaacgaggacgcgctgctggagagcatcatgggggaggacaagatcgcgcacgttatcatcggattggacaacacacaggtcttcgccgacttggatctcgtctcggcctccgccacagagtttgcgcaagaagacgacaacggcgatgaggacgatgacggctccgacgatgatgaggaaagcgactttgacgaggacttcaacgacgtggagggtgtgttttcggttgatgaggacgacgaagatgacagagaggaagaggaggaggaggacgacgacgacgatgacgaggacctaccaagctggtccaaccttgagaccgtgaattcctgccatccactgtactttgcaaggatgattgtagagactgcaaccaagtctagcatagactggctggaccggccacctgcaagccttgtcgtcgagggccagctgaggcctgcctttgctgaggagagcaccatggttgccaagcatatatcaagtgacgcgccaaagaaagatacaaaggagagtggtgccacctttttcaaggtcgaggtcctcagcatcgagttgatcactgcgtatggaactgagccaaaggtaaagattgaagaataccagaaggctaagccggacatcatcgcgcattctgcaccgaacgtaatatcgcgcctgagagctggtggagacaaggtcacccaggctctgaaatctctctgttggaggagcaaggccattcaagtagaggaggcagcggtgatcggagtggactgccttggttttgacctgagagtgtgctcaggaactcaagtgcagacattgagatttgctttccctacaaaggccacttcagagttctctgcagagaagcaaatacatgagcttctgtttcctaggaatacacatcaagaagggcaatcaccacaggcccgacagaagtcctgatgtaattcgatccatcgatgtggtaacttcattcagatggtaggaaattaatttagagaaataaataataaattcttggtcatgtccatgaaagttgtggtataaccttcaagcttgccattgatttcgtgtttggagacaatcacaagttccaaggttgttcttagacacgttctcaaagaaaaagggttgttcttagatcatggaccgggggatttggtttttttttttaattcagaggaagctcagtgcaactccaacagattgcctatccaagtagagatgaagtctcgacaagtgaaaaactacatcagcgcaagtcagaactcagttttacttgtccttgcatcaaatcaaacaacagaaactctcctgaaaaacgcagaaacaaaaaaaatctcaagttgcacctgtcactgcatcaattggttcttaaacaaggactagttacatacccatgcattgctacagtatttatatatcacataggtagggttttttatattatgcttgagtgtagaatataaacacaaaaatatacgtgttttattggttaaatggatgtgaatgtagagccaacgatcaaggttcaaactcacattgtgtacaattcttcatttttttatatatcacatagatagactttgttttatattatgtttgagtataaaatataaaacacaactagtacaatacatgtgccttgcgatgttacataattcgataaaatattaattcacagtggttatataaaa

SEQ ID NO: 9371 - DNA, 2111 bp, Zea Mays
tcggtaaccaccacgacgacatctagcgacgaacccggcagaaacaaagcgtcgtgccagcaggaaaaccaaggaccaagccaagccgccggccccatggccaagcacaaagcctcgcctccggccgcggtccgccgtcgcatcggcggcgccggggcgtccgccatccggtgggcgctgcgcgtcgcgaccagcatcgtagcctggacgctgctcctccacctcttcaccttcctcggcatcccccgcccgccgctgcccatcgcgcggccgtcctgcctgggcggccgcagcaactctaccgccgccgactccgtggtcgcggccggcgatgccgggcacctggcgctcccggctctgcctcccagacggctttacaagagtaatggctaccttctagtttcatgcaatggtggtctgaaccaaatgcgagcagcgatatgcgacatggtgactgtagcacgctacttgaacctcaccatggtgatacctgaacttgataagcaatccttctgggctgatcctagtgattttggggatatttttgatgtaaatcatttcatcgattcattgagaaatgaagtgaagattgtcaaagaactcccacagaagttcaaagaaaaggttcctctgtcaatgcaaccaatcagctggtctagtgagaaatactatttgaggcagatcttgcctctagtacgaaaacacaaggttgtacgttttagcaagacagattctcgccttgcaaacaatggcctgcctctgaagctccaaaaacttcgctgtcatgttaactacaacgcattgagatttgccccatctattgaggctctaggaaacaagatgatctcaactctcaggagaactggatcttttgttgtgcttcatctgagatatgagatggatatgcttgctttctctggttgtactcatggatgttctgatgaagaaacagaagagttgacaacaatgagatatgcatatccctggtggaaagaaaaggaaatagactctgagaagaaaaggcttgagggattgtgcccccttactcctgaagaaacaactttagtactcagagctcttggtttccccaaagacactcgaatatatattgcatccggtgaaatatatggtggtgaaaaaagattagccatattgaaaacagaatttcctaacattgtgcgaaaggagatactcttgtctgatgatgagttgcgaccctttcagaagcactcaactcaaatggcagcactggactatcttgtttctgtggcaagtgatatttttattcccagtaatgatggcaacatggctaaagttgtagaaggacaccgcaggtttacaggcttccacagaaccatacagttggataggaagaagctagttgaacttatagatcttttcgaagatcaggagctgtcctgggaagaattctctgttgctgtcaaggagctccacgggggccgaatgagccagcccaccgtaaggagaatcgtcccgggacaaccaaaggaagaggactacttttatgctaatcctcatgaatgccttgggcctgcaaaaaaacgaagggatagattaaaacatatggaaatttgaaagccgcgtgcttaatgcctagtaggctactacagatagaaggccaaagtgaaattgccctactctgcctggtgaagctgatctctgcctcgaattgaagatgattcttcgtgttgatgatcagcaaggagcatcaagagaagctttgccattcagaaacttgattgacagtattggttcctggattcggattttgctgattgtattttctttttatctctgctacctaggtatattgatggcatagtctgactgagctgtgagatgacatgccacattaatctgtagatgcaatgttctgttgtcgtcagttgcgtacttgcatataagagagatatggtgtatactttgtattgggtagttaaacctgatgtcgatgtcgaagacctcgttaaactttggaaaggaaagcagtgtaaatgcactgaaaagagtggcagccaagccttgctgccttgatattgcaatagtttagcctagctgttgtttgcaatagtaaaacctgatgacccgct

SEQ ID NO: 9372 - DNA, 3607 bp, Zea Mays
ccccgcccctcgtgaaggcctccagtccacaccagccttcgtcccgtcctgccccccaccccatcctcgcctccggatctcgctccgccggccgcggccggacgaggcgcctgcgacccggtccgaccctccctccctccctccccctctcccgccgaccgcgcgtctgtcgggactcgggccggcttacttataccgctcgcattgccgggtgcctgctccatttgtccaccccactcgccgcgcgcgcggactccgtgccccgggcgggccactcgcagcttcgagctagctcggagcttctgagcacgaccacgaggaggagaggtacaggctactacagttctgggagatggcggccggcggggtggggcccgcgcagcaccaggcggcgaacggcgcctctggcagcgtcagcaacggtggcgccgccacgccgctgcacggctcggccgccgacggctacgacagcgacggctacagcttcgcgccccccacgccgtcaactttgtccatgtccatacctcctgagcttgctggagctattccgttaattgatcgatttcaggtcgagggctttctcaaagcaatgcaaaagcagattcattcagctggaaaacgtgggtttttttctaaaaagtctgttggaccacaagctcgtgagaagttcactttggaagatatgttgtgctttcaaaaggatcctattccaacttcattactgaagataagcagtgaccttgtaagccgctcaattaaattgttccatgtcatattgaagtacatgggcgtcgattcaccagcaataataactttggatgagagaatagaacttgttgcgaagctctacaagcatacgttgaagcgttctgaacttcgagatgaactctttgcccagatttcaaaacaaacacgtaacaatcctgataggggttggtcaataagagcttgggagcttatgtacctgtgtgcatcatccatgccaccaagcaaagatattggggcatacttgtctgagtatgttcactttgttgcccacggagccacaactgattctgatgttcgagttctagcactgaacacactgaatgcattaaaacgatcagtcaaggcaggtcctagggttacaattcctgcacgggaggaaatagaagctcttttgacaagccgaaagcttacaacaattgtttttttcttggacgaaacttttgaagaaatcacctatgacatggcaacaactgttgctgatgctgttgaggaacttgctagcattatcaaactttcagtgtattctagtttcagcctatttgaatgtcggaaggttgttaacggatcaaagtcttcagaggttggcaatgaggaatacattggattagatgataacaaatatattggtgacttgctatctgaattcagatcagctaaggatcgcaacaaaggagaaattcttcattgcaaacttgtattcaagaaacgtctcttccgcgagtcggatgaggctgtgactgatccaatgtttgttcagctatcatatgtccaggtactgaaggattgccagtttgtgtgttattcaagtaatcttggttcaaaaatagagctaacaagtaacattgttctgcagttgcaacatgattacattttgggaaactatcctgttggcagggatgatgcttcacaactctctgctctgcaaatcttggttgagattggattcatcgacaatcctgagtcctgcgtagagatttcttcctagacaagtggcgattaccagagcaaagcgagattgggagcttgacatcatttcacgctttcagttaatggaacatttatcaaaagacgatgcacggcaacaatttctcagaatcttaaggactcttccatatgggaactctgttttctttagtgtccgtaagattgatgatccaataggattgctacctggaaaaattattctgggaatcaacaaacgaggggttcactttttccgtccagttcccaaggaatatcttcattctgcagaattaagagacatcatgcaatttggtagcagcaatactgctgttttctttaaaatgcgagttgctggtgtccttcatatctttcaatttgaaacaaagcagggcgaggaaatatgtgtagcacttcaaacacatataaatgacgtcatgctccgcagatattcaaaagcacgctctgctaatagtgtgacatcgcaaaatgatgttaaccatgcatataagccaccaaatattgaaatgtatgagaagcatgtccaagaactgacaaaaacagttgaggaatctcagaagcaagcagatcagttgcgagaagatctacagttgaagacaaaacaagaaacagagatgcaagaagagttggaagggctaaaagacaccttgcaatccgaacgacaaagttccaaagaagtaaaaaatgagcttgataagctaaaatctctatgtgatgagaaagaatctgctttgcaggctgccctgatggaaaaaagtagacttgaaaccagattgacaagtagccagggccgtgagagagatactttgacaactgtaggcagcgtcaatagtgacattgagatgcttaccaagcttaaggaggatttgaaatcataccaaaaagagctcgatgcatcaaaacaggtctcgaagaagctcatgtcagaaaagaatcttcttgaccagaaggttcaaaggcttgaaagaatgaaaaatgaagagaaaagcacaatggaaaaggtttatgcggatgaatgccgtaaactgaaatctcagattgctgaattggagcagaaattggaagatgcaacacaatccttaaatgtggctgaatcaaatcttgctgtaagaaatgctgaagttgatagcttgcaaaatagtctgaaagaccttgatgaactaagagagttcaaagcggatgttgaccgaaagaatcaacaaactgctgagattcttaaaaggcaaggggcacaattggtggaacttgagaatctttataagcaagaacaagttctgcgaaaacgttactataatacaattgaagatatgaaaggaaaaataagagttttttgtcgcttgcgccctctaagcgacaaggaactttcttttgaggagaaaaatatagtttgcagtcctgatgaatttacaattgcacatccatggaaagatgagaagtcgaagcaacatatatatgatcgtgtttttgatgcaaacacaagtcaagaagaaatatttgaggatactaagtacctggtacaatcagctgttgatggatataacgtttgcatatttgcatatggtcaaactggttctggaaagactttcactatttatggttcagataacaatcctggtcttactccaagggccacatctgaactttttagggtgataaagcgcgatgggaacaaatattcattttcattgaagacatatatggtggagctttatcaagataatcttgtggacctattgttgcccagaaatgtgaagccgctaaagttagagataaaaaaagattccaagtttccattgggaatttcagaagtgtgttttatccatgtacatcctttcatactcatagagttaattattcg

SEQ ID NO: 9373 - DNA, 4557 bp, Zea Mays
ccccgcccctcgtgaaggcctccagtccacaccagccttcgtcccgtcctgccccccaccccatcctcgcctccggatctcgctccgccggccgcggccggacgaggcgcctgcgacccggtccgaccctccctccctccctccccctctcccgccgaccgcgcgtctgtcgggactcgggccggcttacttataccgctcgcattgccgggtgcctgctccatttgtccaccccactcgccgcgcgcgcggactccgtgccccgggcgggccactcgcagcttcgagctagctcggagcttctgagcacgaccacgaggaggagaggtacaggctactacagttctgggagatggcggccggcggggtggggcccgcgcagcaccaggcggcgaacggcgcctctggcagcgtcagcaacggtggcgccgccacgccgctgcacggctcggccgccgacggctacgacagcgacggctacagcttcgcgccccccacgccgtcaactttgtccatgtccatacctcctgagcttgctggagctattccgttaattgatcgatttcaggtcgagggctttctcaaagcaatgcaaaagcagattcattcagctggaaaacgtgggtttttttctaaaaagtctgttggaccacaagctcgtgagaagttcactttggaagatatgttgtgctttcaaaaggatcctattccaacttcattactgaagataagcagtgaccttgtaagccgctcaattaaattgttccatgtcatattgaagtacatgggcgtcgattcaccagcaataataactttggatgagagaatagaacttgttgcgaagctctacaagcatacgttgaagcgttctgaacttcgagatgaactctttgcccagatttcaaaacaaacacgtaacaatcctgataggggttggtcaataagagcttgggagcttatgtacctgtgtgcatcatccatgccaccaagcaaagatattggggcatacttgtctgagtatgttcactttgttgcccacggagccacaactgattctgatgttcgagttctagcactgaacacactgaatgcattaaaacgatcagtcaaggcaggtcctagggttacaattcctgcacgggaggaaatagaagctcttttgacaagccgaaagcttacaacaattgtttttttcttggacgaaacttttgaagaaatcacctatgacatggcaacaactgttgctgatgctgttgaggaacttgctagcattatcaaactttcagtgtattctagtttcagcctatttgaatgtcggaaggttgttaacggatcaaagtcttcagaggttggcaatgaggaatacattggattagatgataacaaatatattggtgacttgctatctgaattcagatcagctaaggatcgcaacaaaggagaaattcttcattgcaaacttgtattcaagaaacgtctcttccgcgagtcggatgaggctgtgactgatccaatgtttgttcagctatcatatgtccagggatgatgcttcacaactctctgctctgcaaatcttggttgagattggattcatcgacaatcctgagtcctgcgtcgaatggatatcacttttagagagatttcttcctagacaagtggcgattaccagagcaaagcgagattgggagcttgacatcatttcacgctttcagttaatggaacatttatcaaaagacgatgcacggcaacaatttctcagaatcttaaggactcttccatatgggaactctgttttctttagtgtccgtaagattgatgatccaataggattgctacctggaaaaattattctgggaatcaacaaacgaggggttcactttttccgtccagttcccaaggaatatcttcattctgcagaattaagagacatcatgcaatttggtagcagcaatactgctgttttctttaaaatgcgagttgctggtgtccttcatatctttcaatttgaaacaaagcagggcgaggaaatatgtgtagcacttcaaacacatataaatgacgtcatgctccgcagatattcaaaagcacgctctgctaatagtgtgacatcgcaaaatgatgttaaccatgcatataagccaccaaatattgaaatgtatgagaagcatgtccaagaactgacaaaaacagttgaggaatctcagaagcaagcagatcagttgcgagaagatctacagttgaagacaaaacaagaaacagagatgcaagaagagttggaagggctaaaagacaccttgcaatccgaacgacaaagttccaaagaagtaaaaaatgagcttgataagctaaaatctctatgtgatgagaaagaatctgctttgcaggctgccctgatggaaaaaagtagacttgaaaccagattgacaagtagccagggccgtgagagagatactttgacaactgtaggcagcgtcaatagtgacattgagatgcttaccaagcttaaggaggatttgaaatcataccaaaaagagctcgatgcatcaaaacaggtctcgaagaagctcatgtcagaaaagaatcttcttgaccagaaggttcaaaggcttgaaagaatgaaaaatgaagagaaaagcacaatggaaaaggtttatgcggatgaatgccgtaaactgaaatctcagattgctgaattggagcagaaattggaagatgcaacacaatccttaaatgtggctgaatcaaatcttgctgtaagaaatgctgaagttgatagcttgcaaaatagtctgaaagaccttgatgaactaagagagttcaaagcggatgttgaccgaaagaatcaacaaactgctgagattcttaaaaggcaaggggcacaattggtggaacttgagaatctttataagcaagaacaagttctgcgaaaacgttactataatacaattgaagatatgaaaggaaaaataagagttttttgtcgcttgcgccctctaagcgacaaggaactttcttttgaggagaaaaatatagtttgcagtcctgatgaatttacaattgcacatccatggaaagatgagaagtcgaagcaacatatatatgatcgtgtttttgatgcaaacacaagtcaagaagaaatatttgaggatactaagtacctggtacaatcagctgttgatggatataacgtttgcatatttgcatatggtcaaactggttctggaaagactttcactatttatggttcagataacaatcctggtcttactccaagggccacatctgaactttttagggtgataaagcgcgatgggaacaaatattcattttcattgaagacatatatggtggagctttatcaagataatcttgtggacctattgttgcccagaaatgtgaagccgctaaagttagagataaaaaaagattccaagggtgttgttactgttgaaaatgcgacagttgtgagcatttcgagtattgaggaactgagggctataatttcaagaggctctgagaggaggcacactgccggaactaatatgaatgatgagagttcaaggtctcatttaattctttcagtcattattgaaagtacaaatcttcaaacccaatcatatgcaagaggcaagctaagttttgtggaccttgctggttctgagagggtgaaaaaatctggttccgcaggaaagcaactgaaagaagcacaaagtataaacaaatctctttctgctttggctgatgttattggtgctttatcttctgatggacaacatataccttaccggaaccataagttaacaatgcttatgagtgattctctgggagggaatgcgaagaccttgatgtttgtgaatgtttcaccagcagagtctaacttggaggagacttacaactcgctgatgtatgcttcacgcgttcgatgcattgttaatgatacgagcaagcatgttgctccaaaagaaatcatgagattgaagaagttgatcgcctactggaaggagcaagcaggcaagcggagtgatgaggacgagctagaggaggtaaaggaagagaggatctcaaaagagagagcagacaatcgcctgactggctgacaacttgacacaaccactgaatgctcctggttccgttcttccattacctggagaagaggtgattgatgctgatgagcatttgcaactgccacgagttctgcgatcgctctctaacagaatgttccgatatcatctgacctgtacatacagtagctacgtattatatactatggcagcgatgcccgtttgtacaaagaggaatgtagcacacattgatagaaagggaaaaggttgtgtgactgggaggcttgatgcgccctaagcctataacagctggatcatgtctttttccccccttggagcaggtatttaaagcataatgtgagcgtccttacccaattctttcttatcttgtgtaaaaatcgggtagccttggatgtcaattaaacacgtaaacttcaccttggactagactacttcgattttggaccaagagagtgagatgtctatgtggtgtcat

SEQ ID NO: 9374 - DNA, 729 bp, Zea Mays
atatgcatccgccgtgagcctcctccagtcctcctcttccttaccccaatctcgcctcaaatccaatcccattcccacctcacagtctagcttgcctcgcatactcctcatctcttctcctagccttaggtcgatgtttgcctaggcttccaccacggatttggcccccaaccgtgttcccttgttcgcttgctattgtctcaatcattgatacttgttcccccaaaaccctgggctccagtcaatcgttgcgtccctcacacggtgatcgaggcatcactgatgatggcaaggatgatgcggtggccacagccaatgacagcgcgcaagtcccccgtgcgactggtggtgcggcatgcgggggtgctcttgctgccttcgccttcacctagcaaccagagatgacttcgaccttccctcgttggcaagtgtctcgaaccgttgccgtgactctccgccaccaagcgcctctgcaactagcggggcaaaggacaaccgagggagaggatggtggagtagccgatggagaggaggaggaggcgcttcggatgaggactttagttttgtattggttctatgactctctgccatgtacctctgcaggtagcggggcaagagcaaccaagagagaggaggcgccgtcgctagcgatgcgtggttaaacagccgaggagagtttctgttgtttgatttgatgcaaggacaagtaaaactgagttctgacttgcg

SEQ ID NO: 9375 - DNA, 5062 bp, Zea Mays
ggacttacatttgtgatcataggagatggggtgctactcctgcaaggaaatctggtatgactgttctaggaaaagtcccaaaacctattaatttaccaagccagaggttggaaaacaatggtcttgatcccaatctagaactggttccaaagggcacccacacctggggcagcaaagcaccatccacaacaccaaatgcatggagttcctcgtcaattctgtctaccaagaacgatggaagttccagttcatctagccacttcaatggtcgaccgtcctctggcggaggctcaaggccatcaacagctggaagtgaaccacttggttcacccaatgcttggggtccaaattctcgcccatcttcagcatcaggcacatttccatcatctcatctaccaatggccacaaatcgtccccgaagtgcggaaacaagacccggaagttcacaactttctcgatttgcggataatgcttcagataatgtgaaagcgtcgataaggactattgatagaccggggtcttcatcacatgggcctgggttcacactaagtactggtgatttcccaacacttggctctgaagcaaatagtcaacgaggccatagttcgaaagggcgcccaatttctagttcgggtaaagaggtgtcgcaaggtgaacaagtgaagagcctaacaactggaaatggtgaattaatttcacaatccaataatcaacctgttgatatcatgaagacagagcagcatgcacacactggaggtgctcctgtcctcgccacaaatgtgccaaatgaaggcctgcaaccgcggccatatccaccaaattttcctatgcctcatccgcagtttgattcatggcgtgcacctcctggtcacccccctgagggaatgtggcatagaggactagtgccaggtgggccatacagaccagttggcccccctggtagttttcctgtcgaaccatttggttattatggtcagttcccacccaactctgaagttgcagcaaggcagggcccagggcatggtggatatcaggctaaaaatggagatgtgtatcatcctacgcctcctaattcctatattatgaatcagcctgttattccagtcagaccagtttatcagggtccagtgccgtatgatgggtattatggccctcgagcacatttcaataatgccaatgttagagatcctcattttgttggaggtcctggaatattaaatcaattccctaatcagaatgacaggtttcaccctggacatcctcaaaacagaccaggcagacatgaaacagttccaagggagcagctggaatatgataaaatacatgtgtttcatcgaggaaaccctgggagtttgcatgataattctgatcgtctaggaggttcccgtgaatttgaaaggaatgcgcagccagcatcgccacttcttccacatcctgatggaaaccggactgatgtgaacatgaggacagatacaagggacacctttagtgaaagtgaaagaaccagggtacttacaaaatcggtgcctaatcagagaggttcggttggtacagaacatttgtctgtttatgacaatgcacattcccatcacagagaaactggcgatggcactctgcgcaagaaattcaaggaggatggttcagctgcactgcatcctgtaattaagaagaatgcagctttaatagagaaaattgagagtttgaacaacaaagccagaaatgttgatgcacgtaatctcccagaatcagcttcgtccaaggaattcaataagcataaaaaaagcactgatgtttcatctaatgatgtcatgggtatggcatgcaaatctgacccggcagtttctgtttcctgtgtttctcctgcggtgcagagactaccaaacgtgcccatcaagggtacaattcttggtccggcacatccacagttaactgaatttagcaaagctgaaaagcttggtgattcaattagcgatcatgtacataggaaaagtgattcttcaagaaacagttaccatggtccttctaaagataggccagctaataaattcggaagtcatggacggggagaaagttccacaactgatctgaggaataatatcgatcatggccaacaacctgagattgcttcgcagctgcaacctgcgattgtacctgatgatatgccagcttcactcgattatgagtctcagcgtgcaaaaatgaaggagttggctgcagaacgtgcaaaaaagttgaaagctgaggaagaggaacggataaagaaccaaaaagcaaaagcgctcgcaaagttggaagaattgaacaggcgatcatcagtacttcagaagaaatcaaatgatataaaagtagaaacttatgatgcacatgataagcaacatgctggacttgatgtgactgctaaacttgacacttcaactgaaccacatgatgttattgcgcctgataggcttactgatcttctgcctcctaatgatcccaatcatactatggttcatatacaggcccagtctacagcacaatcacatgctttagatggtggcaaagaccctgatgctcatgcaacctcgtctttggtcaagaacactcacagcaacatggagcctgttgtgcagaagagtatctcgcagttgcatgacatcactgtggtaaaggccaagcaagggtacaggaaaagacatgtgtcagaagagaaaatttctgatgagaaggcaagtgcttcaataaccactagaaatattacgaaaaatgttgatgttctcatcgacacagtgacggctgttgttgcaccacatgatgatccacctactcagaacaagaagggaacccgacatttgagaagtaagaaaaagttagatgatgctccagttacttctaaacatccacctgtggtgttgaatgagccgaatacagtgaaagtctctaccgagccaaagacacatactggtggtgttatcatcagcagctctattgttcccactgaaggtactattgtaactgttggaagtataactgttggtggaatttcacttaaacctatgaatcaggagcgggttaaatcaccagatggaacaaataatactgaaagtagccaaccaagacctcagcaaacgagaaaatctggaaagcatcagcatgttcttcggcctgttgagaagccacatgggaatgatggtatcttgtgtgcaccagttaagccaccagtgccgaatgagcactctgatggagccatgccgactgcagcagtagctgacctcactaaaccagtagggaaagccataaatgatggggagaatgtgacaagaacaaagagggctgaaatggaaagatacgttcctaagcctatgtccaaagaactgcaacaacaaaatccaagtgatgataaggaagcagttgataagcccagtggtgctaaatcacatcctgcagccgaacccaagaaaactagcaaagcacatgggggtaaatctaatccttcttggcgcaagaggaatccagatgaatcagctttggtggcaccaaattctgttgagcaagcagacgtctcttatgaatcaaaggaggttcagaacttcacctatcagaagcagcctgttgaacttggcaagcaagatacacagttaaaattcagtgtagatgctgctgctgaaaatagctcagctccagttcaaacagttccgctatctgtcggtggcgcaaaacaacatagtgcagctaacagacaaaggcgacagcatgttaaggctcaaagaaatgaagcaagtggctactcaaatgagagcaaaggtagcgagggcaagaatgatgttgtctatcaatcagcaacacccgtcatggattcgaactcatccaatcacaggaatgtgccaagatctgatgtgaaaaacagcggcgtagtttcacactctagagcctggaagccgaaaaccaattcccatcctcaggacagctcagacggcaagattgctgttgacgggcaagtggattcccatggtggtaggcttgagatgaatacgtccaaaggatctgatacaattacccatctagtgaccagtagtgaaccgacgaaaaggagtgatggcaaagaggtctcacacagcaaacatgagaacctggcacgggaagatggtaaccagaagggtgagactgaacaggagcaggctaatcctacactacgtcgccaaggccagcccaatgcaaggtaccacaggggaggtgggtcacacaggggaagggggggttatgacactgggaggccaaaccatgtcacaaatgtggagaggcggaagggtggcagccatcttgaataccagccagtcggaccccaaaacaaagctgcagacttccaacagagcctgggcatggaagaacgaaccgaggggcctcctgcttctggacaagcgttcaggcagcgtggacacaacagggggctacgcccagcaggccgctttgtccagcgaaaccctgcttctacgcctaccactaattctcaccaaaatgaataatcttccgcggctgccacatccactgagcttcaggaactcgcgcttgtggtggtgtttcacaacagataggtttggatgcgcggcaggtgtccttctacgactaaactctactggtggtgagcattaggatcctgtaatgataatagtctttgtcccaagggcacctggaccctgtgattgtgggaatttgcctttgttgggatgcaatgttggaacgtgtactaacagagttgttgtgtttgagaacttggtttaaatgttagcctgtgatgctaatgagaacagaaagtgttggtttttgcccaacttcctggcctcagtggataatatgctggcatcaccatagcacgctggcgttttatattgttgtcgatggtgttcatggcaatttgctttggatcgactggattggatcgccgaaataatcaaatcgtatgtggttattttgataaacggggtggtgatcatcttggccctgtttactgtttagcaagctgtttaaatccatagcaaggtcaatgctaaaagctgttatgtttcaaatttattccttccattcc

SEQ ID NO: 9376 - DNA, 5617 bp, Zea Mays
tttcgctctcacgaacccctctggcctctggccctctccaaccttctctcttccccgttcccccgtcgcctcggcattccgccgccgactccgacgagggggccccacctgtcatcctcctcccccgccgccgttcgccggacggcagcgcgacgaggagccgtttaccccttcctgccccgcggcatccgcgttcgcgttgtgcgccgctgatccgagcggaccgcttcccgcgctgatcgctttctccgttcgacccctagggtttcggcgttcccctgtctccccgcgcccccttggaggcagcaccagagatctcgatcttccgcggcctcggtcgcgctacgcagttgaccccgctcgatttatcaccggggaattagagaggcgttttccgggggagtttcttcgcggggaagaggggccatggcctcgagtctgctcaccacggacaggagatggggtgctactcctgcaaggaaatctggtatgactgttctaggaaaagtcccaaaacctattaatttaccaagccagaggttggaaaacaatggtcttgatcccaatctagaactggttccaaagggcacccacacctggggcagcaaagcaccatccacaacaccaaatgcatggagttcctcgtcaattctgtctaccaagaacgatggaagttccagttcatctagccacttcaatggtcgaccgtcctctggcggaggctcaaggccatcaacagctggaagtgaaccacttggttcacccaatgcttggggtccaaattctcgcccatcttcagcatcaggcacatttccatcatctcatctaccaatggccacaaatcgtccccgaagtgcggaaacaagacccggaagttcacaactttctcgatttgcggataatgcttcagataatgtgaaagcgtcgataaggactattgatagaccggggtcttcatcacatgggcctgggttcacactaagtactggtgatttcccaacacttggctctgaagcaaatagtcaacgaggccatagttcgaaagggcgcccaatttctagttcgggtaaagaggtgtcgcaaggtgaacaagtgaagagcctaacaactggaaatggtgaattaatttcacaatccaataatcaacctgttgatatcatgaagacagagcagcatgcacacactggaggtgctcctgtcctcgccacaaatgtgccaaatgaaggcctgcaaccgcggccatatccaccaaattttcctatgcctcatccgcagtttgattcatggcgtgcacctcctggtcacccccctgagggaatgtggcatagaggactagtgccaggtgggccatacagaccagttggcccccctggtagttttcctgtcgaaccatttggttattatggtcagttcccacccaactctgaagttgcagcaaggcagggcccagggcatggtggatatcaggctaaaaatggagatgtgtatcatcctacgcctcctaattcctatattatgaatcagcctgttattccagtcagaccagtttatcagggtccagtgccgtatgatgggtattatggccctcgagcacatttcaataatgccaatgttagagatcctcattttgttggaggtcctggaatattaaatcaattccctaatcagaatgacaggtttcaccctggacatcctcaaaacagaccaggcagacatgaaacagttccaagggagcagctggaatatgataaaatacatgtgtttcatcgaggaaaccctgggagtttgcatgataattctgatcgtctaggaggttcccgtgaatttgaaaggaatgcgcagccagcatcgccacttcttccacatcctgatggaaaccggactgatgtgaacatgaggacagatacaagggacacctttagtgaaagtgaaagaaccagggtacttacaaaatcggtgcctaatcagagaggttcggttggtacagaacatttgtctgtttatgacaatgcacattcccatcacagagaaactggcgatggcactctgcgcaagaaattcaaggaggatggttcagctgcactgcatcctgtaattaagaagaatgcagctttaatagagaaaattgagagtttgaacaacaaagccagaaatgttgatgcacgtaatctcccagaatcagcttcgtccaaggaattcaataagcataaaaaaagcactgatgtttcatctaatgatgtcatgggtatggcatgcaaatctgacccggcagtttctgtttcctgtgtttctcctgcggtgcagagactaccaaacgtgcccatcaagggtacaattcttggtccggcacatccacagttaactgaatttagcaaagctgaaaagcttggtgattcaattagcgatcatgtacataggaaaagtgattcttcaagaaacagttaccatggtccttctaaagataggccagctaataaattcggaagtcatggacggggagaaagttccacaactgatctgaggaataatatcgatcatggccaacaacctgagattgcttcgcagctgcaacctgcgattgtacctgatgatatgccagcttcactcgattatgagtctcagaacaaaaaacaaagcaggatgcagcatcaaatggtcaaaacagtcaggcagttgaacatggtttttaggaatttgaatgctgattgctcactagcgtcatatctattgtttttcctattcagcgtgcaaaaatgaaggagttggctgcagaacgtgcaaaaaagttgaaagctgaggaagaggaacggataaagaaccaaaaagcaaaagcgctcgcaaagttggaagaattgaacaggcgatcatcagtacttcagaagaaatcaaatgatataaaagtagaaacttatgatgcacatgataagcaacatgctggacttgatgtgactgctaaacttgacacttcaactgaaccacatgatgttattgcgcctgataggcttactgatcttctgcctcctaatgatcccaatcatactatggttcatatacaggcccagtctacagcacaatcacatgctttagatggtggcaaagaccctgatgctcatgcaacctcgtctttggtcaagaacactcacagcaacatggagcctgttgtgcagaagagtatctcgcagttgcatgacatcactgtggtaaaggccaagcaagggtacaggaaaagacatgtgtcagaagagaaaatttctgatgagaaggcaagtgcttcaataaccactagaaatattacgaaaaatgttgatgttctcatcgacacagtgacggctgttgttgcaccacatgatgatccacctactcagaacaagaagggaacccgacatttgagaagtaagaaaaagttagatgatgctccagttacttctaaacatccacctgtggtgttgaatgagccgaatacagtgaaagtctctaccgagccaaagacacatactggtggtgttatcatcagcagctctattgttcccactgaaggtactattgtaactgttggaagtataactgttggtggaatttcacttaaacctatgaatcaggagcgggttaaatcaccagatggaacaaataatactgaaagtagccaaccaagacctcagcaaacgagaaaatctggaaagcatcagcatgttcttcggcctgttgagaagccacatgggaatgatggtatcttgtgtgcaccagttaagccaccagtgccgaatgagcactctgatggagccatgccgactgcagcagtagctgacctcactaaaccagtagggaaagccataaatgatggggagaatgtgacaagaacaaagagggctgaaatggaaagatacgttcctaagcctatgtccaaagaactgcaacaacaaaatccaagtgatgataaggaagcagttgataagcccagtggtgctaaatcacatcctgcagccgaacccaagaaaactagcaaagcacatgggggtaaatctaatccttcttggcgcaagaggaatccagatgaatcagctttggtggcaccaaattctgttgagcaagcagacgtctcttatgaatcaaaggaggttcagaacttcacctatcagaagcagcctgttgaacttggcaagcaagatacacagttaaaattcagtgtagatgctgctgctgaaaatagctcagctccagttcaaacagttccgctatctgtcggtggcgcaaaacaacatagtgcagctaacagacaaaggcgacagcatgttaaggctcaaagaaatgaagcaagtggctactcaaatgagagcaaaggtagcgagggcaagaatgatgttgtctatcaatcagcaacacccgtcatggattcgaactcatccaatcacaggaatgtgccaagatctgatgtgaaaaacagcggcgtagtttcacactctagagcctggaagccgaaaaccaattcccatcctcaggacagctcagacggcaagattgctgttgacgggcaagtggattcccatggtggtaggcttgagatgaatacgtccaaaggatctgatacaattacccatctagtgaccagtagtgaaccgacgaaaaggagtgatggcaaagaggtctcacacagcaaacatgagaacctggcacgggaagatggtaaccagaagggtgagactgaacaggagcaggctaatcctacactacgtcgccaaggccagcccaatgcaaggtaccacaggggaggtgggtcacacaggggaagggggggttatgacactgggaggccaaaccatgtcacaaatgtggagaggcggaagggtggcagccatcttgaataccagccagtcggaccccaaaacaaagctgcagacttccaacagagcctgggcatggaagaacgaaccgaggggcctcctgcttctggacaagcgttcaggcagcgtggacacaacagggggctacgcccagcaggccgctttgtccagcgaaaccctgcttctacgcctaccactaattctcaccaaaatgaataatcttccgcggctgccacatccactgagcttcaggaactcgcgcttgtggtggtgtttcacaacagataggtttggatgcgcggcaggtgtccttctacgactaaactctactggtggtgagcattaggatcctgtaatgataatagtctttgtcccaagggcacctggaccctgtgattgtgggaatttgcctttgttgggatgcaatgttggaacgtgtactaacagagttgttgtgtttgagaacttggtttaaatgttagcctgtgatgctaatgagaacagaaagtgttggtttttgcccaacttcctggcctcagtggataatatgctggcatcaccatagcacgctggcgttttatattgttgtcgatggtgttcatggcaatttgctttggatcgactggattggatcgccgaaataatcaaatcgtatgtggttattttgataaacggggtggtgatcatcttggccctgtttactgtttagcaagctgtttaaatccatagcaaggtcaatgctaaaagctgttatgtttcaaatttattccttccattcc

SEQ ID NO: 9377 - DNA, 1754 bp, Zea Mays
attttcaacttgcttctcaagtttgctcggtgtcgctcgcgactggctctagttgtactcagccagctatccttggtgtgggggtttgatcgacggagccgtcacaacggcgcctatggcgaagccttccgtacagactcatttcgtcttggacgcgatggccgcggagagggtgaaagtcgcggagaactgggagcgggcgttggattcgttggagaacatgaatcagcgcctgggaaagttcgccaaggtccagcgccagttggtggagcagtcggaggtcgcggcgcaggcggccaagcaggcggcgaaggagcgttctgttctgtcgcgtcaagtggaggaatctgggcagctgctggcgcgggtacagctggaatccatggcggcggagacggagaagtccaggaggagcggatccaccagcccgtcatctaggtcttcaccccctgttcagtgtttggattacttccatattttcaaggtttctgaagctatgtgggtacaagtggcgtctctgcacttggaagggattgctgctcgctggtttcacgtgcatagactgaaacagaggacggggtggaatcattttactcgggatgtgttgaacaagtttggcgcagacgagtatccaaaggcgatgaggagattgatgggtctcaggcagacggggtcactggacgagtttgtgcgggcgttcgaggaagcacggtacatggtatcgctgcataacccaaagttgggatgaactgaatgatcaatacaaaggaaggtcgacaaggtcagtgttccagtcgaggtcctcgtccacagcagtcaaggccaaggcgatcagtggtactactggtaaagggtgcatgaaggtgcggggtcttttgaagaacaaagttacgttgctgttgtcaattcattccgggagtcctacttgctttatcaacaagaatctggtggctcgggctcgtttgtctgctgtttcttgtcctccagccaggttcacattggcaaatggcgagtccctaacgtcggatttgttggttcctcagcttgcctggtgcgcaaatggccacacgttccacactgatatgagagtgttggatctgggaccgtatgacgccatcttgggttatgactggctgaaatcacatagccctatggaatgtgattgggcaaacaaggtcttggtctttcatgatgcaggggtggaggttactttgaaaggggatgatgataatatcaagaaggaggtgcaggaggtttcagccatttgccacaagtgttgatcagatggtccaatctatcggtggactcgtcgactcgggaagattactatatggttaagcggtatcctaatgccgctgtttcggtacaaacagtatctgaaggtctgtgtgtgtctgggtggggggcatgttcagagctgagcgctggacaagtgaagctgatgaggagtgatggcgtagtgtcatagggcgttttctattttacgttttccagttgggttggcgtctttaggcgcatactgtcccgaacaacccgtgcgtgcagcaagtcgctgatgggaggttacctcagctcatagtttatggaacagactacaacacgaagaatggaactagggtgcgtgattacatgtagtcagtcgaccatctaatcaggggatgctgcgatgggcctcgtttcttcgacgttatgaggagggagtaggggtcccatctcatccatccatcttgttgttctttttcttcaaatcattc

SEQ ID NO: 9378 - DNA, 1923 bp, Zea Mays
agcgagcaccgtcgtcgtccaaggtgatcccaatggcccatgtgcggctgcttctcccctccactagctccgatcacctagctagcctctcgctgtactacagatcggacaggggccgcgcaggcacaggcgcagcgtcccaaccaatcgtatttactccgatccgccccgccactgcacagccgccttctgccctccttccatcgcgctcgctcgctcgctctcctatataaacgccctgcagtcctgcagcacctaccagtccagtctcgcagagcagatagcatcagtgcctactgcggtactgcatagctagcttagcttggtcttcgatctcgaccagagccagagagtgtggtgtgaccgtgtgagcgacgatggggaagcacgtctgggcggcagcgctcatggcgctggccgtgattgtcgggctcggtgtgccccccggccgcatcgccgaggcgcgcaccttagagaaggacgacctgctgggcggcggcggtgactttggtgctggagagggaggaggcttcggtggtggtgctggtggaggtcttggaggtgggtttggtggaggaggaggccttgggggaggcggcggtgctggtggtggttttggtggcggggctggtcatggtggtggccttggaggtggcttcggaggtggaaaaggtggtggtgcaggtggaggtggtggtcttggagggggtgtaggaggtggctttggaggtgggaaaggtggtggtcttggtggaggtggtggcctcggtggtggaggtggtgcaggcgaaggcggtggtcttggagtaggtgccggtggaggaggtggactaggcggtggtgccggtggcgggtttggtggtggcgcaggaggaggtgttggtggaggtggtggccttggtgacggtgctggcggtggtgctggagctggcagtggtcttggaggaggtgcgggaggcggtgctggcggtggtgctggagctggcggtggtctcggtggtggtgcaggcagtggtgtcggtggtgggtttggaggaggcaaaggcggaggctttggtggtgggattggcgggggcgggggcgcaggtggtggtgccggtggtgggttcggaggaggcaaaggtggcggttttggtggcgccggtggtgggttcggaggaggcaaaggtggtggttttggcggtggcaagggaggtggtttcggcggaggtgcgggtggtggctttggaggaggcaagggtggtggttttggcggaggtgcaggtggtggcttcggaggtggcggaggttcgggtggtggcatcggtggtggactctagaggtggcgggagctcggcgcgcgcacgttgagtgcgtgcatgccatgaaattaaaaagcgatacatggagtgtgtggtacggtatggacattgctagagttacattacatcatcactagtatatataaggttgactcttatttgtaagcctaatgaaagtgaataattggatgcgttatgtaagcctactctactatatatatgtttgttttggaaaatcgagggagtgtgttacttgactatccccaatcacactcataaaaacttgacttgtgtgttgtttgtactcgaccaattatatactacaatacatatttggtcatgcctgtgtgatcgctgtgctttgtgcttttaggaaggaatgcacgtgcgcgcaatgggtgttaatgagaaaatagaacacaagagagagtgcagcttcaaaattgataagttatcctgatatcgtcttggtattgtattgaatggtacacattagcagagagtgaaatatgtgataattcacaaaactggcgtacttgttagttccacgagtcttgtttttttttttgaaagggtaaatgatttagttaaaacacctctatttttttttaaaaaaaaaaaa

SEQ ID NO: 9379 - DNA, 1398 bp, Zea Mays
cctcgcggtagtggcgcggcactcgttctgcggtcagagtcagagtggcctaggcgctagccgataagccccgcccaccgcgcgcgcgccgcggcaccataccgggatgggcgccatgggcatcgtcgtcagagcatgcgcgcctcccgctcccgccgccgcggccgcgccggcaccctccggctccagggacgccggtcaggcccagcggaggagcaagccctcgaggaccggccgtgtgcgcgtgctcggcggcactggccgtgtcggaggatccacggccaccgcactctccaaactctgccccaagctcggcatcctcgtcggtggcaggaaccgggagaaaggcgagtccattgcagccaagcttgggggccagcctgagttcgtccaggtcgacacccgcaacgcaggcatgttggaggaagcgctgcagggtcagtatcatactagcagtcatgtggtagctgttcgcggagttgccaaaccggaggcagctgcgacgccggcgaggcgctcgcgccccatccctctggcttccgtggccgtgtggagtctggttgccactggcgccgcaaatgctgccgagctatgggaccccttggccctgcacggatcatcaggactcgtcttggctgaccttggtattggagattggtttgggggtttgctgttttcagctgggcagcaggctaatgaggctgtccaagatcagttgtctgctcttagtttctctagcctagcagttatttttggtgctggacttgtaactagtttatctccttgtacactaagtgttctaccactaactctaggatatataggtgcatttggctcagggaaaggccgatccgaggttgttgggaattcaattgcattttcactaggactagcaacaaccttagccattcttggtgttgctgcttcttttgctggaaaggcttatggtcaggtaggacaagggctcccagtggctgcttccggtttggccattatcatgggattgaaccttctggaggtacttgaattgcaacttccctcatttttcagcgattttgaccctcgagctgctgcagctaacctcccttcaggtgtacaagcataccttgctggtcttacatttgcattggcagcatcaccttgcagcacacctgttcttgctacccttctgggatatgtcgccacttcaagagacccaattattggaggaagtttattgttgacatacacaacgggctatgttgcgcctcttcttattgcagcttcatttgctggagcactgcagagtttgttgtcattcagaagatattcggcatggataaacccaatcaggtcttggactttaggtacattgttatggattgtgatgggattggggaattggagagggggttgtag

SEQ ID NO: 9380 - DNA, 1447 bp, Zea Mays
gacacatcggacacgtcctcgcggtagtggcgcggcactcgttctgcggtcagagtcagagtggcctaggcgctagccgataagccccgcccaccgcgcgcgcgccgcggcaccataccgggatgggcgccatgggcatcgtcgtcagagcatgcgcgcctcccgctcccgccgccgcggccgcgccggcaccctccggctccagggacgccggtcaggcccagcggaggagcaagccctcgaggaccggccgtgtgcgcgtgctcggcggcactggccgtgtcggaggatccacggccaccgcactctccaaactctgccccaagctcggcatcctcgtcggtggcaggaaccgggagaaaggcgagtccattgcagccaagcttgggggccagcctgagttcgtccaggtcgacacccgcaacgcaggcatgttggaggaagcgctgcagggtcagtatcatactagcagtcatgtggtagctgttcgcggagttgccaaaccggaggcagctgcgacgccggcgaggcgctcgcgccccatccctctggcttccgtggccgtgtggagtctggttgccactggcgccgcaaatgctgccgagctatgggaccccttggccctgcacggatcatcaggactcgtcttggctgaccttggtattggagattggtttgggggtttgctgttttcagctgggcagcaggctaatgaggctgtccaagatcagttgtctgctcttagtttctctagcctagcagttatttttggtgctggacttgtaactagtttatctccttgtacactaagtgttctaccactaactctaggatatataggtgcatttggctcagggaaaggccgatccgaggttgttgggaattcaattgcattttcactaggactagcaacaaccttagccattcttggtgttgctgcttcttttgctggaaaggcttatggtcaggtaggacaagggctcccagtggctgcttccggtttggccattatcatgggattgaaccttctggaggtacttgaattgcaacttccctcatttttcagcgattttgaccctcgagctgctgcagctaacctcccttcaggtgtacaagcataccttgctggtcttacatttgcattggcagcatcaccttgcagcacacctgttcttgctacccttctgggatatgtcgccacttcaagagacccaattattggaggaagtttattgttgacatacacaacgggctatgttgcgcctcttcttattgcagcttcatttgctggagcactgcagagtttgttgtcattcagaagatattcggcatggataaacccaatcaggaggcgtggattcgagtggtcgctctacactattttttatataattactctttatttataaacactaagttacgtgtggtttaggggacgtgggttctg

SEQ ID NO: 9381 - DNA, 1681 bp, Zea Mays
cggacacgtcctcgcggtagtggcgcggcactcgttctgcggtcagagtcagagtggcctaggcgctagccgataagccccgcccaccgcgcgcgcgccgcggcaccataccgggatgggcgccatgggcatcgtcgtcagagcatgcgcgcctcccgctcccgccgccgcggccgcgccggcaccctccggctccagggacgccggtcaggcccagcggaggagcaagccctcgaggaccggccgtgtgcgcgtgctcggcggcactggccgtgtcggaggatccacggccaccgcactctccaaactctgccccaagctcggcatcctcgtcggtggcaggaaccgggagaaaggcgagtccattgcagccaagcttgggggccagcctgagttcgtccaggtcgacacccgcaacgcaggcatgttggaggaagcgctgcaggtggtagctgttcgcggagttgccaaaccggaggcagctgcgacgccggcgaggcgctcgcgccccatccctctggcttccgtggccgtgtggagtctggttgccactggcgccgcaaatgctgccgagctatgggaccccttggccctgcacggatcatcaggactcgtcttggctgaccttggtattggagattggtttgggggtttgctgttttcagctgggcagcaggctaatgaggctgtccaagatcagttgtctgctcttagtttctctagcctagcagttatttttggtgctggacttgtaactagtttatctccttgtacactaagtgttctaccactaactctaggatatataggtgcatttggctcagggaaaggccgatccgaggttgttgggaattcaattgcattttcactaggactagcaacaaccttagccattcttggtgttgctgcttcttttgctggaaaggcttatggtcaggtaggacaagggctcccagtggctgcttccggtttggccattatcatgggattgaaccttctggaggtacttgaattgcaacttccctcatttttcagcgattttgaccctcgagctgctgcagctaacctcccttcaggtgtacaagcataccttgctggtcttacatttgcattggcagcatcaccttgcagcacacctgttcttgctacccttctgggatatgtcgccacttcaagagacccaattattggaggaagtttattgttgacatacacaacgggctatgttgcgcctcttcttattgcagcttcatttgctggagcactgcagagtttgttgtcattcagaagatattcggcatggataaacccaatcagtggtgcatttttacttggtggaggtgtttataccctactggacagggtgtttccagcaacatcaatggtcatgtagaccatggttggacaagaattgctaggcaccagtctgtttggcgtgcgaatgatatttggatgtgaagtagtgaaatgatggcaacaaagtttagccagatctctcagcgttgtataggcacgcaggacattttgatcgggacaagcaaagcaccttgacctaagtacagtagtctgcatcactgtatctgtatgggcctcgatacttggggccggtctaccctactaaaatgtatttctgggacagattgaaagagtatgaaatttatataagaccttgttcggttaa

SEQ ID NO: 9382 - DNA, 5499 bp, Zea Mays
cgcgcgctttgcttgtcgtccttccgcagcctccccagtccccaccggccaccggcatcaaggcatcaccaccaatctttcggaagttcccacgctgctctgagtgctctctcgtctcccctccccaaacccccaccccgacgcccagatctaccctccccatttacagcttcctctccggccccgcgccctagggcacggcgtcgcctgaacctgtcggcgccggcgcgatgcgagtaccatgctgctcgttatgcaacgtcagatatgacgaggaggagcggacgccgctgctcctccactgcggacatggattctgccgcgcgtgcctctcccgcatgctagcggcagcccccggagccacgctgccgtgcccgcgatgccgccatctgaccgccgtaggcaactcggtctctgcgctgcggaagaacttccccattctctctctcctctccacatccccctcatccccgtctttcctccactccgactcggggtcatcctctgacggctccgaagacgaggacgacttcttcgcgcgccccagtcgccgccccgcgcccgcgcccgctgccgcaccgcccggatgcagcttcttcgacctcgcctcgcacccggacctcaagctcgcccgtcgcatcgggagcggcccgcccgggcccgccgggcaggaggtgtgggccggcacgctgtctcgtggcggtggggtcaagcggtgcaagcaccaggtggcagtgaagagggtgcccctggccgcaggggacgggctcgaggttgttcaagaggaggtggagcggctgaggcgcgcctccacatggtgtcggaacgtgtgcacattccatggtgctgtgagggtgggcggccacctctgtttcgtgatggatcgctatgtggggtctgtgcaggcggagatgcggcagaatggtggacgccttacgctggagcagattctcaggtatggagcagatattgctcgtggaatagcagaactccatgcagcgggtattgtttgtatgagcataaagccgtcaaacattcttttggatgcacatggacatgcattcgtttcggattacggtctttcagcaattctgaagaaccttactagtaggagagtacctgatgactccagtgctggcattgatgctacactgcttagccccaattatacagctcctgaggcatggggaccactgaagaagtcactgaatatgttttgggatagtgcaaacggtatatcaccagagtcagatgcatggagttttggttgcacgcttgtggaaatgtgtactggtgctgttccatgggctggactgagtgcagaggaaatatgtaagtctgttgtaaaagaaaagaagccaccgcctcaatattcaagagtagtaggtgtaggacttcctggggagctgtggaagatgattggtgaatgcttgcaattccgagcttcaagaagaccatccttccaggacatgctgaaaacttttcttcggcatcttctggacataccacggagcccacctgctagtcccgaaattgattttgcaaatgaaaacttgcccaatggcatgcaacctccaacaacctccatcttagagatggttcatgataatccaaatgccttgcatcatcttgtatgcgaaggagatgctgctggtgttagggatctacttgcaaaagctgcatcagagagaaacgatagtttaatccgttctctcttagaagcacaaaatacagatgggctcactgccctacatttagcatgccgccgaggctcggcagagcttgtggaagctattgttgcttaccaagagaatgtagatatattagataaggatgaagaccctcctatagtatttgctttggctgctggctctccacgatgtgttcgtgcacttgtaggcaggtctgctagtataaattctaggcttagagaaggcctgggtcctactcttgcccatgtctgtgctcatcatggtcagccggagtgcatgcaggagctgctgatggctggagctgatcctaacgcagtagacggggaaggtgaatctgtgctgcatattgccgtggccaggagatataccgattgtgctattgttatactggaaaatggaggctgcagatcgatgggcatatcaaattctcaacataaaacgccattgcatttatgtattgagacatggaacacagctgtggtaagaagatgggttgaagttgcatctttagaggatatagcagaaacgattgatgtacccagccctgttggtacagctttatgcatggcagcagctcttaaaaaggagcatgagaaagagttccataaggtccaggattactggacaatcatgttcttccatctattccagaccctgttcgttctaatagtaaaattacttctacttgcagagggtcgagagttagtaagaatattgcttgctgctggtgctgattctacggcacaagatgatccacactgtagaactgcattacatactgcagcaatgatcgatgatgtggagctggttaagattatactggaagcaggagttgatgttaatataagaaatgctcaaaatacaaccccactgcatgttgcacttaatagaggtgcaaactcatgtgttggcttgcttttagcagctggtgcaaactgcaacatacaggatgatgatggtgacaatgcttttcacatagctgctgatgcagcaaaaatgatacgtgaaaacctggcttggattgctcaaatgctactacagccgtcacctgctgttgatgtgagaaaccaccgaggttggacactacgagactttcttgagaggcttccacgagaatggatttatgaagaattgatggaaacacttgaagataaaggagtccatctctcaccaaccatatatgaggttgcagattgggtgaaatttagaagaactgttacttcacctgcttttggctggcaaggtgcaggacctagaagcattggttttgtccagtctgttgttgacaatgaccaccttgctgtgtcattttgtactggagaagcccatgttttgacaagtgaagttatcaaagttattccattaaataggggccaacatgtgcaactcaagcctggtgtttcggaacctagatttggatggcgcggtcaatcacgggatagcattgggacagttctctgtgttgatgacgatggaatcttgagggttggtttcccaggagcttctaggggatggagagctgatcctgctgaaattgaaagggttgaagaatataaggttggtaactgggttcggattcgtccctcactgacggttgctgtacatggcatggagtcgattactcctggaagtgttgggattgtatactccatcagaccagatagcagtcttctattgggcctttgctatttgtccaatccatggctgtgtgaaccagaggaggttgaacacgtcgacccattcaagatatgcatggggtggtgagactcatcacagtgttgggaaaataattgacatcgagagtgatggtctgctcatcattgatattcctaatcgggctgcgccatggcaagcagatccatcggacatggaaaagattgagaactttaaggttggcgattggattagagtcaaagcaacagttccttcacccaaatatggttgggaggatgtgactcgtaatagtattgggattgttcatagtctacaagatgatggggatgttggtgttgctttctgcttcagaagcaggctttttctttgctcggttgcagatgtcgagaaggcacagccatttgaagtaggggagaaggttcatgtgtcaccttccatatctgagccacgcctcgggtggttaagtgaaactgcagctactattggagccatatcaaggattgacatggatgggactttaaatatcaaggtttctggccgaaaaggcttgtggaaggttgctcctggtgacgctgagaggctttcagcatttgaagttggagattgggtccgcctgaaaccaagtattgggagcaggcctacctatgactggaatagtgttgggagaataagcattgcagtagtccatagcattcaggactctggttacttggagttagcaggttgtttcaggaatgggaaatggttaacccataatacagacattgagaaagtgcagaccttaaaaattggtcagcatgttcgattccgtgctggaatttcagagcctagatggggatggagagatgcgaaccctgattctagaggcgtcatcgctggtgtacatgctgatggagaggtaagggttgccttctttggtgtgcctggattgtggagaggcgaccctgcagatcttgaaattgagaatatctttgaggttggagagtgggttaggctgacgaacgatgtggaacaatggagatcgctcaaacctggtagcattggtgtggtgcatggggtgggatatcaaggtgatgcttgggatggaaccattcatgttgctttttgtggtgagcaggaaaggtggattgggccttctagccagcttgaaggagttagcaagtttgttgttgggcagcgtgttcgaatcagaggctgtatccgccagccaagatttggttggtccaaccataatcattcaagtatagggacaatctcatctattgacgcagatgggaagctgaggattcatacaccagctggtgccagggcttggttgatagacccagcagaggtggaagaagtggaggaggaggaagtctgtgttggggattgggtaaaggttaaggactccgttggaaccccagtttatcaatggggtgatgtgaaccacagcagcataggggtggtccaccgggctgatgatggagagctctggattgctttctgcttctgcgagaggctatggttatgcaaagcatgggaggtggaaaaagtgaggcccttcagacaaggtgacaaagtaaggatacgacctggtcttgtatcccccagatggggttgggggatggagacctacgcgagcaaaggcgaggttgtaggtgtggatgcaaatggaaagctgaggataaagtttcggtggagggatagactttggattggggaccctgctgatattgttcttgatgatgtccacttattgacggaggcttctaatggcttggctttttgttcataggcttgtggtattctttcgataccatatctgatatattgcacccatccattttgcagcatttcaaatttagcaaaatcttaacctgcagtggacttgcaagttgcacataactatcatcgcatcggcatgccagggtgtatttcatgttgataaccggggaatgagaagacaacgatagtgtagagctggtaaccatcacctagttttttcttctttggtttacatgtataattatgcctcctgacacctttttgggtttcagtgtatcatataccagtgtacaggttcggacctgaacattaatttaattgatagtggtcttgtatgtttacttga

SEQ ID NO: 9383 - DNA, 3902 bp, Zea Mays
cttcgcgtgtaacctcaacggctcaacctcaccgtgctcccattctagtctcctctccacttcattacacatccccgcgaaatcccggacccgacgcgaccaaccaccttgttcagtgaccccctcccccgcgcgatccaccgccggcgcgcgtgtaccctaaccaccgtgcggatctgggagcagctggcggcgctccctcaaatggtccccggcggcgaggggccccccggaaggcagaacagctgagatgcgacgcgacgcggtgccgccacccaccgccccctcagcctcctcctcgtcatccctcttcagcggcggcggcggcgagcggctgttcgagtctgggcccagcccgctcgtcttccttcccctgctcctgatccagggcggtggcatggacctctctcgcgtcggcgagaaactcctcagctctgttcgctcggcccgctccctcggcctcccaccgatccccacggcgccccctccccgccctgaggttccagaacgagctgcggcggcagcagctgctgcacgtgcgatcgccgggttgccacctcacgagaggatcaacctgccatccaattcggaggacttggtctccatctatgggagcaacccccagggccaaccggtggaggagctcgaggaggtgttctatgaggaggagtttgatccaataaagtatattctgcaaagtattccggaggaaggaggtggcgatgccacctatttcgataagcagtctacattgagattagagcagcttgacaagattgcagaaagattagcacaccatgttatgggtcatcatgaagaaatggtgaaggggatgcagttagtgatggaattagaacatgacttaaaggttgcaaatgtaatctgcatgaatggacgaaggcatataacctcttcgaagaatgaggtgtcgagggatctggttgtcaatgtaaaatcaaaaaagaaacaagctttgctggatgttcttcctatccttacagagcttcgtcatgctctagacatgcagatggaacttgaaacttttgttgagaaagaaaattactttcaggcattccaattattgcctgaatatttgcaaattttggagaattattcaggcctttctgctgtacaagaaatgggacgtggtatagaggcatggttagttcggacaatccaaaaattggacacccatttacttggtgtttgtcatatctttgatgcagaaaactatctaactgttgttgatgcatatgcactaatgggtgatgtcagtggcatggctgaaaagatgcagagtttcttcttgcaggaagtgctgtctcgaacacactatgtcctgaaagaaatgttggaagaggaggttggaaataatacacagaaaaataggtttacatatagtgatctttgtgttcaaattcctgaacccaaacttcgcctctgcttgttgagaaccctagagtttttattttcattgatgtgctcatactatactattatgagcttttcttcaggagataagaatattgactccaagggccaagatgaagcatataaggatggcacatctcagaatagcagcgaaactttagttaatttaggaagaggtcattcaagtgcagcagtcactcaggatggttctgcagctgaaaaaattgacagagcatcatcatctgaggtcagcaaccctgatactagtacatcagaaacaggttctccattctatcagcttagaacagatgctacgaaacttgttgcacaaacatttcaaagagggcgaagaaatctttggcagctggcaacaagtcgcttatctgttctattatctagttcggctgtttgttcaactagcacataccaattcctgaagaattatgaagatcttgccatcttcattttggctggcgaagcattttgtggatttgaagctagtgagttccgccagaagttgaagactgtctgtttgaactacatggtgtcctttcaccggcaaaatgtatatgcacttaagatggtactggaaaaggagtcttggacaataatgtccgctgaagcttcacaaataattagtttagcaggtctaactggtgatggtgctgcactgtgctctcctaccagtagaagtcctaagttgccaataaattgttaccatgggacaactacagccaactcaggaaaggaaaagctcggatttgcttcttggcttgtgattgaaaatccattttcttttaagctagaaaatggctctgccgaatccccaaagtccaatatgcttgttgactcatcagctagcaataatcatggcaatggaaacaattcatctttagatgaagagaatgaagaccttttagcggatttcattgatgaagatagtcagttgcctagtaggacaccaaaagcgaaaatggtaaaaggcaattctttacattggaaagatggagacatttcatcacagacaggctcatcactttctctattaaggatgatggacaaatacgccaggctgatgcaaaagctggaaattgtcaatgttgagctttttaagggtatctcccaactatttggcatcttttaccactacatatatgagacatttgggaaccaagacaagagtcaaagcagcaagcctttgcctgatcatcaatcatctcggcttaaagccgctttatcaaaaataacacaagactctgatcagtggacaaagccaaatactgtttcatattcaccttcatcccctttgtcaaaaaattcaacttttggtcaaatggatgtgatgcctactgcacctcccagttcaatgttcacctcctatgggttaaaggagagatgtgcagctgctgaaacattatcattggttgctcgaattttgaaccgatctagagcccatctacactcagtattgtctaaaaataacagttctgttgttgaggagttctttaggacactgatttgacagagcacattcacagaacgagtgcgcgtatgcttttgcatattgatgggtatccagataagattgcgaatgctaaatgggaggtaaaggagcttggaatagagcacaatggatatgttgatttgttactgggcgagttcaaacactacaaaacaagattggaccatggaggaatttctagggagctccaacaccttctgctagagtacggcgtagagagcatatcggaagttctagtcgaaggtctctctagagtgaagaggtgcaccgatgaagggcgtgctctgatgtcactcgacctccaggtactaattaatgggctgcagcacatcgtggcatcaaatgtgaggccgaagctgcagaccgtggacactttcataaaggcttactatctaccggagaccgagtacgtccactgggcgcggtctcatccagaattcagtacaagtcaggtagtcgggttggttaacctggtggccaccatgaaagggtggagacggaagacgagactagaaaccgtggagaagatcgaggcggggccatagactcggtgacaggtttttttttttttttttttgctgtgttgtttgcttcagctgcacatagagctgtaatttcccccctcattttcttttggtttgatgacccaggaataggagggaatccataggagaggaaaccccttcctattcaattttgaatagcaaggtgttttctcccccatagatctactccatttccctgatcatcaaatcagccattagaaccatttttttgttgaacccgtcgcccgctcacccatattgtatatttttaagcgttgaccctgtattatatcaagcgagttgacactcccaagaaggaaaagaactgtgcaccaccctacatggaacattggctcaataaatatggctcgttcaaaaaaataataataatatagcagcattag

SEQ ID NO: 9384 - DNA, 1853 bp, Zea Mays
cacgctctttggttgatgcttgcttgttcgtcctctaaaccacaccgcccggtgaaggcactaggcgcccaattctctcccgctctcccctctgctgcaagtctgcaaccgcagcagcacgtccatttcacgtgccctttcctccctccctttcccctgcccccacgccacctccgttcgccgccgcccgccgcgccggcgatggcgatgaccgaagggcttgtgcctattacgcggacctacctcgcgcgctactacgacaagtacccgctgcccccgctgcccgacgccactacggacctcgccgcccggctccgtgctctctccgccgacctcgctgccgttgctcccatcgccccagatgaggagctcttggaacaagaagcagctggcatacctgcccacaaaattgatgagaatttgtggaagaaccgagaacaaatggaagaaattcttttcttgattaacacatcccatcgtcctgtggctcttcaacagaagtccaccccagaagatgctgagatagtttgtacacttgatgatatagaagctaaattgaaggatatgttgaagaacttagaacaatttcagttgaaaaatgctgacaatgttttcaatacagttatgacatacatgccccaagattttcggggtactctaatcaggcaacagcgagaacgctcagagagaaataagcaagcagaggttttattggattttattcgacaaataaatgacgataatgggcctatggaagaacaaagagaacgttatggtccagccctttacacccttacaaaactggtgcttgcaattcggttgtatttgcatgtctctttggcacgatatggacaaaggaaaatagagaaggatgacgctgctgtgttgcagcaagctgtggttatctacaccaaggagtttttgaagttcactgaattcattggtgaggtctttgtgaatgcaccattctttatatctgctgaggatgcaggtgccgtggatgcaaggaaaagtgatgagtacaaagaaactattattccagctggaaagacacatgaggtcattttgagtgttgaagctgtaaactcatacatcgcatgggacttttccttgcaacaaggggccctcaacatggtattggacattggctttcatgtggagtacattagcccttcaggggagaaaactttaattcttccataccgacgatatgaagctgaccaaggtaatttttgcactgtttcatcgggatcatacaaacttgtgtgggacaattcatattcttcattcttcaaaaaggtccttcggtacaaggtggatgctgtgccaccggttgttgagccggccttgtcagccacggaactctgaagaggtctgtcttaatataatgatgtaacgagggccgatgcatgcccgagtatagctgtacaaatgtttctgaaggccccacacggtgctgttactgattattccatcgaatgctttgcggtgttctgatcgcagcattccctgatagctcgctgtcagagcgcatggatatgtactttgtgtgcacatggctgcggccacttgtcaccgacgaatgcctgaatataacagaaatgtattatatcgaccaataagagcatgtctgattggaagctgtcgtggtttgtttttattttttttctcgaatacggagagctgtgtgtcattgcaccaggaagaggaagagctgtggacgtgctccctggaaagagcatcccctttggctaccaattgttgaatttgccagtccatattttagcgcttcggatctgctcagatcccgattctgtttggatgaattgagctttgctttccccaacgaaaat

SEQ ID NO: 9385 - DNA, 1580 bp, Zea Mays
aaaagcagtactgcagtagaaaaaaaactccctagaggtcgaccgagacccctgcggacctgcgcttcggccgttgcggaccgcaggagtgacgattccatggcggaggagatggcgcaggcgcaaccgagactcacggcgccacgttcggtccgctgtattgtcaagctaggtggagcggcgattaccaacaagggcgagctggagagcatcaacgaggagaacctacggtcggcatgtgcgcagctgcggcatgccatgtccgaatctgacggcgatggcgccatggagaaggttctgggaatggactggagtaggaagcccggagatcctgtcgacccggccgttgacgcggagtggatcgcggggatagctaggctggggctcgacactaacttcgtcgtcgtgcacggggccgggtcttttggccactttcaagcaagtagatctggagttcataaaggagggttacattcgacactggtcaaggctggctttgttgctacaagaatttcagtgacatctctcaaccaggaaattgttagagccctagcaagagaaggaataccatctgttgggatgtcaccatttgcttgtgggtggtctacccaacaaagaaaagttttgcacggtgatgcagttcttgatgaattattggactgtaccatattgagtggggatgtcattatacgacatcttgcacagcttctgagtccgaaatatgtagtatttctggtactgttaccttccctcctttacagctttaaaagttttatgttatcgatggaagatggttttgtacactatatggttttctaaaaattgtgatgtagacagatgtccatggagtgtatgatcgccctccaactgactcaaatgcagtacttctgagagaaataggttagtattcacctggttgatttttatctgcccataatatctagcctgtactttttgatgtgtattagtcattatgcgaggaaacaggacaacaaaggtaatgcaattgtcatcattcaattcttgggtaaaacatggaaatatgcttcttcaacaaattctagctgacttgtgttagttaacagaggtggatgacattggaggctggtcgattgtaaaacctgcattgctgcaaggcaacactaaaggagtggagatatcagttgcagcacatgacaccaccggtgggatggagaccaaaatactggaggctgcagtgatagctaggcttggaatagacgtgtatattaccaaggctggaacagaacactcgctgagggccttgaagggagatgtgagcaccgactcggaagattggcttggaactattatacgctcttccaaatagatttcttgttgcaaaaacattcggactggtttactggcgattttcccgatgttatatgagcagtgatgagccttgggctttcgatgatgatccagcacgggtctattccctactgtggtcgtagtttggtttacaagcgtcagcctgatgttacaaatgccgttcagtaaatttgttttgttttctgaaaagataagatgcattggtcgcaagagaggaaaaaattgatttt

SEQ ID NO: 9386 - DNA, 2759 bp, Zea Mays
agctctactgtagcaaatttttgggcttctttgaagtgcggcccaaaaactgaggaggttccttcctatcaaagggaacaatattatagtttgggccgttgtttatcacacagggtccctcggcccgcaccatttcgcgcttgccctaaagaaacccgacacgagccccactcgctcggacgcacaggcgcacaccgacaagcgcagcgatggcggccgcggcgggggacggacagacgccgcaggagccggagccagtggcgggagcggcggctggaggcggcgtgatcgcgaagctggaagaggagtggcggaaggcgaaggagcacgcgcagacctacccgtacgtgtggggctcctacatcctcgtctacggcggcctcggcgcctacctcgcctggcgctggcgtaagctccgccgcaccgaggaccgcgtccgcgttcttcaggaacgcctccgcaagctctccgcggccgaggagtcgcaggctgcctctgccaccggctccgtttccactccctcgacccctcccctgccgcaggagtcggcctctggggccgcaaagccggcttctagaccgtgaaggaaagtagaggtggaggactataatacaagtgctgagaggttggtgattctctcattgtcatctaatcgtttgggggaagctcaaaatcatgtacatcgtgtgtggtcattcccacgaaggatctggatttactgttgatgtcaccggaacccgtcttagtgacatcgtaacttttggctccatgatgctggtttgcagttttctccatccacttcacttctctattgttactaatgtattgcgccttatactgatcttgccaaatcttcttgaattatctcctggagcatatttttgcggtgttatgtactaaggacaaatggattatggatagagaaagcttaaccaacatcctggcagtctaattttgacgtttggcagggctttcggttgcagatccctctggataagttgacagagctgaactgacgaaccaaacgttcctgctaaattccatagtctgcaacctaacttcgtcgattgtgaactatcagtttttggtggccactgcgtaaaagacagatcggtctcagggggagtcgtcgggcgttccacgctgaaatctggaatgaaaagactaagctcatatattgggagggccgcagcagaaaatgggctctgtcggccgggagtctctccagatcggctggccactcctgtctgcccccaccgttatcttggacttgccagcctcgctgtgctttgcctcccccccatcgtcctcatgggaattttaaagggaagcgcctgctagcagccacctctccctgccgcagctagtcagcatcttcagtcttgcactcccccctctgcaaggaagcgagctgcgcgcgcgatgccccaggtggacctggagagcctggtgtgcggcgtgtcgggcgccggcgccggcgctggtgacaggaaggtgtcgtgcgagacggtcatcgcggggggcagcggggacgcctcgccgccgccggacccggacttgccgcccgagtcgataaccatccccatcggcgacgacgcggcgttctcggagctgaacccgatatacgagcgggacgactccaccaagggcagcaccaaccccaagttcgcggccgccgccgccgtggccaaccccgtcgcggccaagacgcggtccaactccacgcgcgtcgcgggcgccccgccgccccccgcggccggcaccacgttcttcggcctcccggcgaggatccgcccgaccttcacccggcgccgcccgtcgcagggccggatcttgcacggcaagcgcgcgggcggcggcggcggcggcggcggcgaggtggagccgcggtcgcccaaggtgtcctgcattggcaaggtcctgtccgaccgggagcggcacggacggcgccggcgcgggtggtggtacggcgtggccgccatgttccggtgcgacggctgcgcccgtgtgcccggcggcgcgtccaggaagaaggtggcgctggaggacgatgccgggcggcggcggcagcagcagcagcagccgggcggcattgcgggaatgcggaggttcaagtccgggagaagagccgcatcgtggggagacgaggcgctggccgcggcggcgacgggggccgacccggacgagggggaggaggaggaggaacccgacagcaaggacgctgtgcagtggtcccggcggccggtaacttaggttgcggtgagggcgggaaacgattgggcgccgctggggtgggcccgctgtaagtgactgccgtggtcgccgataggtgagcccgaggcgtctcgagcagcacggtcggctttggctggctggctggtcgccgctcgatggcgatcgtagactggcctggcctcctagaactgcgagttttggagttcggtggattgtttctgcgtggaattacgcaacccatttggaagagcttgtttgttgaaacttgagctcctcggcagcggcggcctaccgctgtgtacatagcagtgttctactgcctcaagcaataacaggagcgcataatgtgcagtccgccattcgcctgtcttcctcttcgtcatcgcaactgttcttcaggcttttgcatgcggttgtgcttgtgcccatcttacttgaccgtgtgacccactcgtctcgtctgcccatctcgtaccgcacgaaatcgtggctctaccagggggctagctagctgctagtgtcaa

SEQ ID NO: 9387 - DNA, 2101 bp, Zea Mays
tgacacgctagatctggggggagagagaagagaaccgacgtgtagggggaccgcatgcaaggggagggggagaggcagcggtaaccgctgcgcacagccttaccccatgttttcccgcttattttgctgcccgccgatgctagagctgtgtcttgttccgatcccgaatcgtttgtgacgaagagttcttcgcgctgacgtcaatatatagagagagctaaatacagtttccagctacaggaacacttggttgcagcgccatcaaacaattctaacagcgactcaaacaacaacgccagcagcatcaacaatatgtccaaaattcagtaccaccacatggtttctcatctgacggtgagctgaacctgatcgcatctccagaccagtttattcagcagatgaacatgaacctcgacgaaggccctgttccaatgtcgcgagataaactttagcagctattttttagctacttttagccatttataggccccatttcaatctcacgggataaagtttagcaggaagctaaagtttagctcatgagattgaaacggggccgaactcacgcactcgatctcgaaccaaccagaccacaccagcgtatcaccatcagagcctgaggtccaagtcgatcttactcggctgaatcggctcacacgcttgctcatactccgagtgcggcgctctcagcctgaagctcccaggccaggccgagctcggcgcctcctcgcacgggaccgttgcccaggccgccgccgccacgccgccctcgaggaacctcgccgccgtcctgaccgccggcgccggcgccgggttggctcggagggagcgcatgagggcggcgtgcgcgtgcagcggcaggccgcccacgaccacccgctgcgcgtggtacgaggatcgcttggcggcgctgcgctcccgcttgtgcgcgttctggtgcccgcccagcgcctgcgagctgaagaacttgcgcaggcagaagttgcaggagaacaccttgtgcgggggcggcttggcggcggacccggacccggacccggactcggagtccgcggagcagctcgcggcgtccggggacggagacggcgacggcgattcgctcgcgcccagcgtcaggttcagccacgccgcgccgtcgccgtgctgctccctggcttgcagcccctggatggctggatggtgcatcagaagcagcttgcagtttgttgctttataaaggaggacgagatgcgctgtggccacatgctgttctttctgctaacttccgcatcaggtggtctttctttctttctttcatggcgagatgggacgggagccgagttcttgctcgcctttgcttgtgcaagccgtgacggcgatgacgtcggaacccgaatgtgctgctttggggctggtgggatggatagggataccgagtcaacttgatcaagatagaaaaggagagacgcctaggggttcctcctccttccaggctcccacgtatactttacaatatctgcagacatgtgtcattttcggtcagatatgcagatctaggtgcatattttcaagcacaaattcagttgaacacatattgacactcaaaagtgttgttgcctagaactttagcttgcactgttggtaaagtaacgaggaggagtatgttggggccttcgtctttcgaaggtgctcaaaaacacacttaattattggttgtcagcatgttcacaagtgttgtaggaacttcggtattgaataccttcggaataggatgaagataaagacgaagttgttaagctttgtcacaacaacacatagagacgaaggagaacattgccgggagaaggcgtccacggttccgtgtccaagctgttagaggcagaagtcaatattgccctcgcatcgttttgtaaattatatgtacaagtcttgtgggcatatttgttattccatacaaagttgtacgatcccctataaataggtgaacattgacctgcataaagtaccttttggagggctaaagagtgattcgtgtagtcccttcctaatgcaccttcgctctaattcattctattgagccgaaggtacgattgtaaatttatgatacaaaagaggagaaatg

SEQ ID NO: 9388 - DNA, 2959 bp, Zea Mays
gcgctacctcgagcaagcttgcgttgccgccctccctccccgtcgtgctcacgtgggttggtcaaccccctccccgcgccgcgagcaccttcacctccctcccgcctacatccacatggcagcgccgtggccgtcgcgcgcggcctgctaacagcaggcaaacagcaacacctcgcggtccctcggctgctgcgcaccgcgccgctcgccatggcgccaccgctgccgctgccgctgctgcggtggctgctcctggcggcagcggtcgccgcgaccgtggcgcagccgcagccgcagccgctggcgtcgcggacggacctggcggcgctgtacagcctgcgcgcctcgctggggctgcgcgcgcgggactggccgctcagggccgacccgtgcgcgcgctgggcgggcgtggactgcgcggcgggccgcgtcgtgggcgtcaccgtcgcggggctccgccgcacgcgcctgggcgccgcccggcccccgcttctcgcgctcgacggcctgcgccgcctcaccgcgctcgcccgcttcaacgcctccggcttcccgctcccgggggagatcccgccgtggctcgccgccggcctgccgccgccgctcgccgtgctcgacctcacctccgccgccgtcaacggcacgctgccgcccgacctcggcgcctccgggaacctcacggccctgctcctgtccgggaacacgctcacgggccctgtcccgcccgcgctgctctccgccgcgggcctccgcgtcctcgacctctcccgcaacaatctctccggaccgctgcccaacgtctccgtctccctcggcgccgccggcgcctccgtgtttaacgtctccgggaattctctgtatggcgtcgccgccgacgccattggggcgctcaggagacggtttcaggtcgtcgacgtgtccagcaactacctggacggagcgtggaacgggtccgacacaacagtgcttgccacgacgaattgcttctacggtgtaccggcccagcgtagccgtgcggactgtgaggagttttacaggaagcaaggcgtcaagcttgttgatcctccagcgccctcgcctgtgccttcgtcagagccaccgccttcaccctcaccagagaagaagaagaagaagaagcacgggatctccaaaaaactactcattggagtccttgtagccgccggaacactggttgctgtgttttttatcgcactgctgttctgtttagtgaagaggagaagcagaggaaggaggggagggagagggaggggagtggcgccaaacgaggaaggcacgcgctctgtctccgtgcggaggagggacagcagcgtcaatccggtggtgttatcgccatcggcggtgtctccaagtgccaacgatggacctaaggatgcgtctgccgttatcggtgagatcacctacgagcagctggtccttgccaccggcggttttggcgacgaccagctcatcaaacacgggcattcgggggacatgtaccatggtgtgttggagaatggctcccatgtcattgttaagaaggttggcgcaaagggcgccaacagacatgcgagtgaattggatttctacgtgaggtactcgcacgaaaggatcgttccgctgctcgcgcatttgagcaatgacgatgacgaattcatggcttacaagtatatgccgaagggggatttaacccatgcgttgcacaagaaacctgtagacaccgcagatggcttgccctccctggattggataactagactgaagattgcaactggcgtggctgaggctatgtgcttccttcatgaggaatgtagcccgccattagttcacagagatatccaatcaagcagtgtccttctcgatgataaatacgaagtgcgacttgggagtatgagtgacatatgcatccagcaaagtgggggaagccagaatgtcttcactcggatattgagatcatcaaaattgaattccggaggcatctgagcatgcatctgtatccccagttaaagacacagttagtgatattgcggcgagttttagtttctgtagctgtggtttgctgattacagttggtgactgacgttggtatctgacgctttcttgtggcaggtctctcgacaagcacacatcaggtccaccggccacttgttcctacgacgtgctctgcttcggcaaggtgctgctagagctggtgaccggcaacttgggcatcagcggaccaaacgacgcggcgtcggaagaatggctgtcgaacacgctgaaccacatcaacggcggcgacagggcgagcatcgccggcatcatggacccgctgctcctggtggacgaggaccacctggaggaggtgtgggcggtggccgtcatcgccaagacgtgcctaagcgccaagccgtcccgccgtccctcggcgcgctacgtgctgcgcgccctggagaacccgctgcgcgtggtgcgccagggctcctcccggtccaactcggcgcggcagcagctgcggagctcgtcgtcccggagctcgtggcagtccgtgttccaggggaaccaccgggtgcagagcctggacgccgcagcgacggcggcgttggcgctggaccggcggcactcgctgaggtcgcacggtagcggaggcgaggcgtcgttctcgttcaagagagccttgcccgtgcccacggacaccgcgccggagccggctgcggcgctcgacgaggacgccgttattgtctagtgtaggaggcggacattccccggttcttagcttctttacagggcggtgttcttgattcttttcccctgcgtgatatcacgtcgtcgcatgtgtgtgtataatttgttcctgtctgatgcgttcatccgtgttccaacatgaccaaaaaaaactgtgcataaagagtacgttttcaatactttcaaggaaaatttgaactttatcttcagcatgtcttccttgattttcaaagctgag

SEQ ID NO: 9389 - DNA, 1351 bp, Zea Mays
cagattccatccttgttaagcatggcgcttcatctacaaagcatctcgccgaccctgttccaaggcaaatcccccccacacacaaaaaaattccgtctttgttcatgttaacagtaatgttgcccctcctcatagccgcggcggcggctgccggagcgctggcgctcattgtcgcgacacgcctcctcagggaggacgccgtggcatccctccgccgggagatccgagaggtgctcacggcactcgtcgccgacgacgaggacggcgacggcgagagcgcctccccgccgccgccatccgtgctgatcacggggttccgtgcccacggcaagagctcgctggtcaacacggcgtgccgggcgctggcggccgaggacggcccgctgctgctgcgcgcggaggcatcgccgcccggcggcgggaccgacgggctgaggaggctcctcagggtcaatgccgtggtggctggggccgacggcgacagcgcgggagcgggggagagcgatgcggtggagctgctggatgcgccgccgctccccgaggcgtttaggctgaagagggaggacgtcgacgcggccatcagcgtcggggaccctgagtgcgttgtgttcgttctgcgctgcgacgcgcccaccaaggagcggagcgccgccatcaagtgtctaccggagatttctgccgccgtcagaaacaaagggcttaatttgatcgtcgtgttgacttttaagaaggccacgagatccattaggcaggctgaagagcttctacgggaggtatcgttcagggctagaactgactgtgtctacttcatcgagaactacacctggagcaagaatggccccaacctccgccacccccctgtcatcaagaacgagtttgagacccatttcacggtgctgacaatcattcgacagtgtcttgagttcatcaagctaaacaggagccagtccaaggacaagaaaaggaacggcaagcaggaaaaagcacccgagcctaaacctaagaatccacgcacagaaactaagcagtaccggaaaatcaaggagcccagtgtaagacttttcttcaacggttcagaaacttgaatcgcccggttatacttatgatgtaatgatttactgaagaggctaatacttgtatagaactgacatagcctgcctgacaagctgcacaaaatgctgcaatcatccgttcgttttgtggagatacacgtcctctttatgtatcataattcataaatcaagatatgctgctgccttttctcattattggaattcataaaaacgcaagcaggaaaatcctctttccacatgcatcataaatcatgatattgcttcttatacagatctaa

SEQ ID NO: 9390 - DNA, 1192 bp, Zea Mays
acccttctttcacacacccgtcgcgctttcgggcctcggaagcttccggagacaggagacaaccagccgctccccccccccccctcccccgtgccctagacaaagaggaaaggtacgcctccggttccagagcggagaggattgcgccgcctgattggcgattgctgatagtctgccgccagtgccctcgcccgatttgctccgccgagaacaacatggggagaagctataatcacagtccatcgccaccaagaggctacaggagaagaactcgcagcccaagtcctcgtggtcggtatggaggccgtgatactgatagggacctcccaactagtcttttggtgaggaatcttcgtcgggattgtaggcctgatgaccttcgtagaccatttggaaaatttggccccgttaaagacatatatctgccaaaggattactacactcgggaacctagaggatttgggttcatccaatactttgatcctgaggatgcttctgatgcaaagtactatatggatgggaagatgctgcttggaagggaaattgctgttgtttttgcagaggaaaacaggaagaagccttctgacatgagggccagggaaaaaataagaggccgttcttatgatgggaggttgcgctcaaggtcacctgggttgaacggttctcctaggggtagatcacggtcccaaagccgaagctactcgccagcacctaagcgaaagcactattcaaggtccccggctcctcgacctcgggagagatctttgtcgcgttccccagctgtcaacagatcaaggagtgcaagccccattgttagcaggtctcctcataggcaggggtctctttctgttagcgagtgaggtatctcagggctctgtatgactatcttgtcgctgttatgctgaaccatatatgtttcagattatttttgttagcaccctcgtgtgtactctaggatatctgaacgtctactatgtattgggtatttccaaaatctctgatgagtgaagtgagttgtgaaccaatgaaccttgaatccttgatgttcgacgtgctgaccagtgcgcaggtgcttatgtggtatgaactatgaagttttttttcttcctctgcagctgatatggcagcgttcaggcattcatgggccatccaatcgcctgtctcattggagcaggtgagcttctccaataat

SEQ ID NO: 9391 - DNA, 4698 bp, Zea Mays
cggatttctatcgtgcttaaacagttaactgcgtacatacatatggaaaagagtgatagactataaaaacgatttgtatatttcagcttgttttgaaataagttcgtaaaaacccccaacgaaaataccaaataaacccagaaaaaaaagaaattacacaggaacaaaaaaagaaacgaaccaaacaagcgcaggcgcaaacgcctcccttcttccgttcccttcctcctccggccctccggggcgccctccctcggtctctcccgcgtctcgagctgtcgacgtcgccgtcctcgcaccgctcccttctccggcacccgagccgtagccctgccctccgcatccacaatttgatgcggtgggcgcggccgccatgtcgtggggcctggcctggaagcgcagctccgagatcttccacctcacgctcaactacggtgactacgacgacaacgacgaccgccaaccctcgtcaccgccccctccggcgtcctcttcccctcccgcctctgcatcgtcgacccctgtatactcctcctcgcccattgccacccgcaacggcgaccttggcttccgcatcgagcttgactggtcggcgggggacgacgaggatcaggtcgcgctccgcctccagtcccagctcatggtcgcgctgcccccgccccacgacgccgtctccgtcgatctgaccccgagggaccacggggaggaggaaggggtgcggatcgaaatgcgtgtggtcaggaggcgggaggcgctccggtccgtgcgcgtgtcgcgggcccctgggtctgcgctgggcagcggcgatggcgcgggggtgctcgcacgcctcatcagatccaacctcgcgcccgcgcctgccgtggatggccccacagccgcctcgggcgtgcccgtgcttgcggatcactggcgccccatcaccatggtcagcctatgcaactgcggaatgtcgatgcttccagttgagttaactcgccttcaatttcttgagaagttatatcttgacaacaataaattgtcagttttgccccctgaagttggtgctttgaagaatatgaaagtgctgtcatttaacaacaacatgctagtttctgtccctgcagtagaactgcggcaatgtgttatgctggaggaattatcattagaacataacaagcttgtccggcctctattggatttcaggtcaatgcccaagctccgaattttgcgcttgtttggaaatcctctagagttccttccagaaattttgccattgcataacctcaggcatgtcacacttgcaaatattagaattgaagcagtggaaagtcttaaatctgtcactgtacagatagagactgagaatagttcctacttcattgcggccaggcacaaacttagtgcctttttctctctagttttccgtttctcttcctgtcaccatcctttgctagcttctgctttggtcaaaataatggaagatcgtagcaaccacattgcaattagcaaagaagagaatgctgtcaggcagcttataagcatgataagcagtgataatcgtcatgtggttgagcaagcatgtcttgctatctcatcactggcatctgatatttcttcagcaatgcagctgattaagtgtgacattatgaagcctattgaagctgtactaaaatcatctgatgaagaagaactagtatcagtattgcaagttgtagtcaccttaactttcgtttctgatcatgttgctcaaaaggtgttgacaaaggatgtgttgaagtcattgaaagcactttgcgcacacaagaactctgaggtgcaacgtctatctctgtttgcaattggcaatttggctttctgtttggagactcgtcgcatcctcatgcattctgaaagcatgtgtgacctgttaatccgattaactatttcacaagagtgtcgtgtcagcaaggcagctgcgcgcgctttggcaatcctaggggagaatgagaacttacgtcgagcaataagaggaaggccagttgcaaagaagggtctacgcatcctatcaatggatggtggtggcatgaaaggccttgcaactgttcaaatgcttaaacagatagagcaaggaactgggaaacgcatacatgaaatgtttgacctcatatgtggtacatccactggtggcatgcttgcaatggctcttgggatcaagcagatgactttggatcagtgtgaagaaatatacacaaaacttggtgattcccttttgccttttgaagtttccttgccaatgccaatgttgccaactgaacttttaattttcctaggaaaacttgtatttactgaacctatcccaaaggatgaagctgctacgtggaaggagaagattgatcaacttttcaaaagttcctcacaaagttttagagtggttgtacatgggtccaaggtattaatgaagtgataaatttggtatcctgtcatcatgtgtcatgtttcatgttgtgcacaatggactactggctaaggacttaattacagcacagtgcagatcaatttgagaggttactaaaggaaatgtgcgagaatgaagatggtgaccttctaattgaatctgctgtaaaaggcattccgaaggtctttgctgtatccactttagtcagtgtcattcctgctcaaccgtatatattccgaaactatcagtatcctcctggcactctggaggtatcaccaggaatggcagaaagtccatcaattggtgcaattggcacggctgtttctggtgcaccagttggtattaaacgtggtgccttcatggggagctgcaagcatcgcgtgtgggaagccataagagcatcgtctgcagcaccatattatctggatgatttctctatgcaaatcgttggcaagatggagctattgtagccaacaatcctacaatctttgccattagagaagcacaacttttgtggccagatgcacgaatagattgtctagtctcgataggatgtggctcagttccaactaagagtcgccgaggtggatggcgctacttggacacagggcaagtgttaatagaaagtgcatgctcagtggagagagttgaagaaactttggatacactgataccgatgcttcctgaaatgcaatatttccgctttaatccagtggatgaacggtgtggtatggagttagatgaaactgatcctactatctggctgaagttggaagctgcaactgatgagtacattcagaagaactttctgtctgtcaagaatctttgtgagcttctggtcccaaggtaccaagaggaagaaaagccatcagatatttacaaatctctttcattttcaagactgacatcgttaaatcaagaggcttcatttagtcctgattttggaaagaaaataaatcatgcacgttcccttgaatccttctgctcccagaatggtattaggttagctctaatgaatagcacttctgggtttgggaagccagccactgcacttcctaccccaataacttctcccttgtttactggaagtttcccatctagtccacttctatatagtccagagggcactcaacggatcagtcgaattgacctagttcctccacttagtttggatggccacccaactacaaagtcctcacctccaacatcaccattgaagtcaagacagccatctgcacatgttcggtcattgtatgataaactgcagaatatgcctcaagttggtgtgatacacttggctcttcaaaatgattcaactggttcagtattgagaatgatgtatttgtggtcgctgaacccggggaacttgcagacaggtttctgcaatctgtcaaaactatcttgtcaaccttgttgcgtgggtgtaatagaaagggtgcatattccctgtccaagatttcatgtttatctgagttggttgctgaatggccatcttttgaaatcggtgggatacaccaccgctatataggtcgacaaacacaagtaatggaagataaccaagaaattggcgcatatatgtttaggaggacagtgcctgctgttcacatggcacctgaagatgttcgatggatggttggagcatggagggagaggattatcatatgcagtggtaagtatggccttgctcatggcctggtcaaggcattcatggattgtggtgccaaagcagtcatctcgtcgtccatcgagcctccggattccaagacaatagtctaccatgggatggatgtcaatagaagcctagagaatggcaagtttgtcatccgtgatgaagaagcggacgaatcagagcctgaacctgtcagccctataagcgactgggaggacagtgatgtggagaaaggcggcaaccatgacgtggatgatgaggagtacctggctcagttcatgtgcctgatgtatgacaaattgttccgtgagggtgtgactgtggatacggctctgcagcaagcactccgctcacatcccaagttgaagtacagctgccacttacccaacgttttgtagttagggacattattgacaaaccatacataagtatagcaaaatggacatggataacagggaatgaataaggattgggtggattttttagttgggttatagaggtctatactttgttcgttgtgcaggcatggtgacagaataaaagcatgaaggcattgcactgcatgtgcatttttgctgtagttgtgagaacgggcattttgtttcgcaaatac

SEQ ID NO: 9392 - DNA, 1592 bp, Zea Mays
ccccactccaactccaagcatgcagccccgctcggcttccgttgccaggctgccacgccgtcgccgtctcgccgcctaaaacctccctcccccccctcgcaccactccgctcacctctcttcacgccgccgtagccggcgagtagcagcgggtacgtgcctttgcggtgtaccttattggctgagccttccctttgccgaggaagagcacagaagcagggaggtcggcatggcggaggtgcatctaggtctgccaggtccctgggcggcggattacagggagatggccgaccactacaccactaagatcggtggagtccctgattggccaactggtgatatgggcttcaagcccgagactcttcagtgcagcttatgtgggaccaagctttgtcttgttgctcagatccgtgatggcacaaaacgcttttggaaggttctaagagttcaaaaatgccataatgttatgcaaacagaaggtggtggtgatgaattaggtcaaccgaatggaccttcttctacaagtcttccagaagaacagaatgataaaaataaaattcctgagacaaatgatgacgattttgatctagatgccttagccgaagcacttgaacaagctgcaactttggcatcaaactcaaagaagaagaacaaatcgaagcatgctaatgctcctgtaaaacgtcctgtattgaaggagcaagcatgtgatctgagcatacctgtccttccttgtttttacatacattataataaggaactatatgggggcaaaggcgctgtgggttcaagtagcagtgagttggttttggacaaagaaatcatggatgccgcaaatgacgaagaagaaaaatgggaaggagaaaagtatgagtacgatagagctattggtgctgacagaacttttttaaaattcaagaaacggctggatgcatatccccagcaatgctttaggtattcttatggtggcaagccactgttggctacaacaaaattacaagatcctggcacctgtaggctgtgtggttcaccacgccagtatgaactgcaattgatgtctcctttatcatactttctccatgaagctggagacggttcctcaaattatgcacccagcagctggacttggctgactgttataatatacacctgccccaagagctgctgcccgtcctcatgcggtggaaagccccagagctgttgttggggagcagcggaggaggagatcctgattcaggaggatgaagtcctttaggatctaaccagtgctggttgagaaactattcccgatttgaacatgtaatatgcagtttttttttgttctccaatggttagagttgtaaagctatctgaaattttgaagtgtgttttgttattgtgccctggtatactgcagaactgtcatacttcacacagtatcatatcagactagtaagatttttttttctttgtggctgttgttttccgctgcaaaatcatttttttctaggtgcctggattgtcaactccaatcaagggtggccatgttacgcttgagcatcaagggatatgatccgctgaacctggtttaatgttgggcctttcaagatgcag

SEQ ID NO: 9393 - DNA, 5783 bp, Zea Mays
ccccactccaactccaagcatgcagccccgctcggcttccgttgccaggctgccacgccgtcgccgtctcgccgcctaaaacctccctcccccccctcgcaccactccgctcacctctcttcacgccgccgtagccggcgagtagcagcgggtacgtgcctttgcggtgtaccttattggctgagccttccctttgccgaggaagagcacagaagcagggaggtcggcatggcggaggtgcatctaggtctgccaggtccctgggcggcggattacagggagatggccgaccactacaccactaagatcggtggagtccctgattggccaactggtgatatgggcttcaagcccgagactcttcagtgcagcttatgtgggaccaagctttgtcttgttgctcaggtacatgcgcctgtggcaaagctaaacattgaggagaggataatctatgtgcttgtttgcccgacaccagaatgtggacctaaacctcaaagttggaaggttctaagagttcaaaaatgccataatgttatgcaaacagaaggtggtggtgatgaattaggtcaaccgaatggaccttcttctacaagtcttccagaagaacagaatgataaaaataaaattcctgagacaaatgatgacgattttgatctagatgccttagccgaagcacttgaacaagctgcaactttggcatcaaactcaaagaagaagaacaaatcgaagcatgctaatgctcctgtaaaacgtcctgtattgaaggagcaagcatgtgatctgagcatacctggtgaggacaactttgaaacaactcgttaccatgaactatatgggggcaaaggcgctgtgggttcaagtagcagtgagttggttttggacaaagaaatcatggatgccgcaaatgacgaagaagaaaaatgggaaggagaaaagtatgagtacgatagagctattggtgctgacagaacttttttaaaattcaagaaacggctggatgcatatccccagcaatgctttaggtattcttatggtggcaagccactgttggctacaacaaaattacaagatcctggcacctgtaggctgtgtggttcaccacgccagtatgaactgcaattgatgtctcctttatcatactttctccatgaagctggagacggttcctcaaattatgcacccagcagctggacttggctgactgttataatatacacctgccccaagcaacaaggaaacaaggtgctgccacttctgttcgtgccaagatcaggagacttttgttttaatagaacatctccagacactgatggccaacagcatgagggaactggatgtgtgagcagaggagtcattagcgtcatccaaagaaatgcaggtttaacgggtgttggaaaggtgcaaggggtgcatcaggagtttgcatttctcatggcggtgggcagaggttgcaacaaaggtgctgagagtcggacaacattctgcaaggctcatggaggagggagacgatgccaagagttaggctgcaccaaaagcgtggcagggaagacagagttctgtatcgctcatggtggtgggcgctggtgtgggatcaaggaatgctcgagtgcggcaagggggaaatccggattctgcctaaaacacggtgaagggaaaaggtggaggatcgagggttgcactcgcggtgctgaaggtcattctgggctgtgcatctcacacggaggtggccgccggtgccagcacccgaactgcgagctacagaaagacagtgcgctaccatcaaatagctctgattctgagccagaagctatggaattggatgacaatggagcaggaaaatcccatagcatcgagggaaacagggattctcctatagacactgatgaaggccagccatctatggatgttgatattaagggaaaatcatctctcaacgatgatgttaatggaaagtcttcttctgagccattttccaatcctccaatcaacatgagtgtggaaagcctagagaagttttgcaaagaagcgtcgaggtccttctttgatgaagttggtctgattagccatcagataaattcctacaatgagtttgtctcgcatgggctccaggagctttttgattcgctgggtgaagtgattgttgaacctggctatgatccttcaaagaaaggatcaggtagctggaagcatgcaatcatcaagtttgggagagtgaagcttgaaaagcctgtgttttggactggcaaagatgaggtttctgttgattttaaaccttggcatgctcgtctccagaatatgacatatgcttcaagacttagagtagaagtgactattcaggtttattctttggagaaaagtgacaaatctaaaacagggaatgatggttttgttcaaaaaaggaacttcatgaatgaaactcactggatatttattggcctccttccagttatggtgaaatcaaacttatgtttgttgcatagtcttaaggaaagtgagtgcctgtttgatgcaggtggatactttttggtcaagggaatggagaaggtatttattgctcaagagctaagatgtctaaggaggctttggattagtgaccgtccttgctggactatctcttttatgtctgaaatgaagcgtagacgtatatatattaaactagttgaatctacaaggagtgaagatttcagtgggagcaaaatcatttccatttcctttttgtatgcgacaatgccagtttggttgttgttctttgcacttggaatatcgtcagataaggaagcctttgatgtgatagatatgcaagattgcgatgcttctgttatcaacacgatatctgcaactatcaaagaatctgatgagctgtgtggaggctttcgtaaatcagataaagctcgtcaatatgttgatgagttggtaaaaagttcgaaatttcctccagtggagtcctttgatgactatatcgctaagtttctgtttcctggtattagtggaaataggaacaaagcacttttcttagggtacatggtgaaatgtctgctaatggcttttactgggaagcgtaaatgtgataataaggatgatttcaggaacaagaggctggacctacctggtgaattgcttggaagggaacttagggcacatcttaggcaagcagagagacgcatggttaaggccattcaaagagatttaaacagtgaccgtgagttacaagatcttgaacgttatatagatgcatcgattgttactaatggtctaaatcgtgccttttccactggttcttggtgccatccctacaaaagagctgaacggtgctcaggaattgttgcaactctaaggagaactaatcctcttcaaatgatgtctgacttgaggaaaacccggcagcgggttgcttatgctgggaaagctggtgatgcaagatatccgaatccatcctattggggaaaactgtgttttatgtccactccggatggtgaaaactgtggacttgtaaaaaatctagctgttacttcaattgttagctcaaaggtggtgcagcccttgattgagagcttcatttcttgtggaatgaataagctgaatgacattcctactgagcacattcaaagaatggacaagatctttttgaatggcaattggctaggatcttgttctgattcagcttcatttgtatttcgattaaggtgcatgagacgcagcagtctgattgatcctcaggttgaaattaaaagggacaagcattacaaggaggttcgtctgttttcagatgcagggcgaatcctcagaccacttcttgtggttgagaaccttaataaaatcagaaagcccaagggacgctcattctctttccaggaattaatgcaacaagaaataattgaattcattggtgtcgaagaggaggaagatatacaatgtgcctggggaatcagacatttgtttgagagtgaaggagctatatctagttatactcactgtgagctggatccttcctttattctgggattaagctgtggtatcattccttttgcaaaccataattttgctcggagggtattgtaccaatctgaaaaacactcgcaacaagctattgggtactcaacctcaaatccacgcatcagagttgacactctttctcatcaactatattatcctcagaggcctcttttcaaaacagttatagccgactgtcttggcaggtcagactgcactacttttggaagaaaagatgacttcacgagaccagaatatttcaatggacaaaatgcaattgtagcagtcaatgttcatcaggggtttaatcaagaggattccctggttatgaatagagcttctcttgaacgaggtatgtttaggactgaacacctcaggagctataaggcagatgtagaaaacaaggatggaaccaagcgactgaaattgaaggaaaagatagactttgggaaaacggaaagcaaaagaggacgtgttgacaatcttgatgatgatggcttaccctacattggtgcaagtcttcagaccaatgacattgttattggaaaagtctcagaatctggagaagaccacagtattaagttgaagcatacagaaaagggaatggttcagaaagtattgctttcagcaaatgatgaagggaagaattttgctgtggttactctaagacaggtgaggacaccttgccttggagataagttttccagcatgcatggccaaaaaggtgttgttggttttctagaatctcaagagaacttcccatttactcacgacggtatagtcccagacatcgtgataaatccacatgccttcccaacacgtcaaactcccggacagctgcttgaagctgctcttgggaagggaatagcctgcaaaggtacaatgagatacgcaacaccattcaccacagcatcagttgatgttattgcagaacagttgcacaaggctggatattcacgatggggagccgagaacgttctaaatggtcgaactggtgaaagaatgaaatccttggttttcatgggccctaccttttaccagaggctgattcatatgtccgaagataaggtgaaataccgtaatactgggccggtccaccccctcacgaggcagcctgtcgctgacaggaaaaggttcggtggagtcaagtttggggaaatggagcgtgattgcctcctcgcccatgggtcagctgccaacctgcatgagcgcctcttcatgctgagtgacttctcccagatgcacatctgccagacgtgcgagcgcgtggctaatgttgtcatgaggtctgtccccggaggcaaaaagatccgtggcccctactgtgggttctgcaagtcttcggagaacattgtgagaatcaacgtgccctacggcgcgaagctgctctaccaggaactattcagcatggggatctgcctcaagtttgagaccgaagtctgctagagcttgtaggcttgcttgtatccagacatccagttattatgtacatagagttagcctatgacgatctcatgctggcagctatgtgaaatcgtgtgccgatgtgtgataccggcggcacagcaaggatgggcgagttcgatggagtgaaacggcagtgtcaggtgggtgtctcaaagctggtggggcaatctacctctgcttagagaataaactctgttgaaactagaaaccttgcagcgttttatatgctgttttcgtcctgcccatctgataaactatgttcatgtgaacgaacactcgtttcctgtttcctgcttggattgcgctggtgcatgcctttttgtttt

SEQ ID NO: 9394 - DNA, 968 bp, Zea Mays
gaacagcctactccagcctccagcgcctgctacgccgtcgcccacctccctcctctcctccagcgtcgcccgctcccgatcgtccaccgccacgcacctccctcctctgtcctctcctccaccccctcctccatctctagggcccgcctccctcttccagcgcccgagcaccccctcccctctcccacgtccagagtcggtctgacgttggcccatcgcccgataggtcctctagcagccaacgttgcctgcagctgcattccagagttccagagtttcagctacaaccacgaagttccaacgtctcctgcagctgctctatttgtcctttgtattttgaatttgaatacctattttcaagatcctgggcgtgcctgccaatgagcaagaagaggaagcatctggatccagcgaactcgttgaaagacagcgaacaagtagtcgcctcagatttcataagaggagacgatcttgatgacctattatcgaagcttatcaggagtgtggagattgccaaggcttcaaggggacgcttaccagaaaagatatggatgaagcaacaatttgctatcggcgtcaatgatgtcacaagggttcttgagcgaatgccgcattctgtcactgctcatcctgctcaaatgtctagtgaagcaccaactgtctcaggccaacgtcaagctcctttggtaccattgcaggctgtccttgtagctgccgactgcaatcccaaatggttaacaaaacacataccaacactagcgtttacaaggcaggtaccggtattgtgcatgaaggacaacaagggaggctcagtaaggttaggccatgtggtgaatgtcagaacagcgcttgccattggtgtaaagattgttatagctgatgaatcacattttatgaagaatggccaagcaaagagaacagttgcttcacttcctgttttgcagaaccaactaattgtgacttacaat

SEQ ID NO: 9395 - DNA, 1310 bp, Zea Mays
gaacagcctactccagcctccagcgcctgctacgccgtcgcccacctccctcctctcctccagcgtcgcccgctcccgatcgtccaccgccacgcacctccctcctctgtcctctcctccaccccctcctccatctctagggcccgcctccctcttccagcgcccgagcaccccctcccctctcccacgtccagagtcggtctgacgttggcccatcgcccgataggtcctctagcagccaacgttgcctgcagctgcattccagagttccagagtttcagctacaaccacgaagttccaacgtctcctgcagctgctctatttgtcctttgtattttgaatttgaatacctattttcaagatcctgggcgtgcctgccaatgagcaagaagaggaagcatctggatccagcgaactcgttgaaagacagcgaacaagtagtcgcctcagatttcataagaggagacgatcttgatgacctattatcgaagcttatcaggagtgtggagattgccaaggcttcaaggggacgcttaccagaaaagatatggatgaagcaacaatttgctatcggcgtcaatgatgtcacaagggttcttgagcgaatgccgcattctgtcactgctcatcctgctcaaatgtctagtgaagcaccaactgtctcaggccaacgtcaagctcctttggtaccattgcaggctgtccttgtagctgccgactgcaatcccaaatggttaacaaaacacataccaacactagcgtttacaaggcaggtaccggtattgtgcatgaaggacaacaagggaggctcagtaaggttaggccatgtggtgaatgtcagaacagcgcttgccattggtgtaaaggccaaagatagcgttgtcaacaagactattgatgagttcctgaaagacagtaaactggttgccaatgaaccataaagtaacccaagtctagtgacacgtttgtactaaaaagcctgtacttctgggcatgcaacatcccaggatcatctcataaatgggtttaagtttgagaaggggatcaagtatcttgagcagattgtggcaatatcaatttggtgggacttcttcagagaacggtcatgggaaataggacagactatttgtttggtccgtgcaatattgtttgactggtgaactagttatccattgtgatctagaacttgtatcaaactccaatgtaacgagatgttagaatccttgtttattggggggtattgccacatactggaggatcacataaagcaggattcagagtggcttactcaaactcgaaaggagattttc

SEQ ID NO: 9396 - DNA, 2108 bp, Zea Mays
ggaacttgttcctgctgtagtaagatggggagataaattggatcagatatcaagagtactattggctcatatcctggcatctgctcaggtaagcttgctcatgaatattgtgaactccttattttcttatagccatgtgtcctaaacctgttgtgttttcagcgatgtccacctatttcaggtgttgaaggtacaatagactctcatcttcgtgttttaggagaacaagagcgctggaatattggtgtccttcttcggatgttgactgagttgcttccatttattcatcagaaagctatacaaacttgcccctttgcatcagctgatccaacaagctctacaccagagaacttctcagcatcctgcctaaaatcatatgcaacaggtgactctgagtggtcagcatttgagtggatgcacactgattgcctgccagatttgatcaagcttgcctgcttgttgcctgtgaaagaagataacttaagaaccatcatcacaaagtacctcttggaagtatctggactctacggtaaagattatctggagcacattatgctacctgtatttcttgtagctgctggtgacattgatagtggcgattttacctattttcctctatcaatccagccaaaagtccgtggcttgcgtccgaaaacttcaactgctgaaaaacttgccatcatgtgtgtcttcccattattgttatctggtattttgggttctccttccagtcgtcaacagttggaagagtatctgagaaaagtacttatccaaaacaccaaggatggttcattttctatgcatcatactactgagatcattaacgcagttcggtttctttggtgagtaattaactatctgaaaatatgtttctgcacattctttgtttttctggatctgacttcttatggttgaagcttatttgtggagcaccatagtgtcatctttaacattttgtgggagatggttgcgagctcggataccagcctgaaaataaatgctgcggctctactgagagcacttgtaccctacacggatgtgaaaatagcatcaactcatattttgccagcacttgttacccttggctctgatcaaaacttgaaagtaaaatatgccagtatagatgcatttggagctgttgctcagcatttcaaaaatgacatggttgttgacaaaatacgcattcaaatggatgcttttcttgaagatggatcacatgaagcttctgtttctgttattcgtgcacttgcagtagctgtacctcattcaacagataggctacgtgaatatcttttaaccaagatatttaagatgacatgcatcacacctgtcggcaatgatattgaacggcgtcgtgaaagagcaaatgtactctgtgaagcgctccgggctctggatgctacagatcttcctgctatgggtatacgtgatttgcttctgccatcaatacaaaatctgttaaaagatctggatgctctagaccctgcgcacaaggaggctttagaaatcataagccgggaaaggtcagggggtacgctggaaagcattagcaaggtaatgggggcgcatcttgggattgcatcatctgtcagcagtttctttggtgagaacagtctcctcacaaagaaagaaggtggcgaggaacatgatcctgctggccccaccgctcctgagcaaaacctgcaggctcagccagagagcacgaggtttggtcgcataatgaggagcggctttggagacatattgcgaggtcaaagcaaaggacagtgatgcacttagattgaaatgatcaattacatacatagctgccgataccacattctttgtttgtaagttgacagaatatacctcaagggttgtatgttatttgccgagataaaaaaaaaggatttgacgttgcaaatctagcatcaaacttcctgtatgtaagttgcctgtagttagctgctcatttataagatgctaataattgtgtctttgtttcatttgtttttataaataaaatatataactagatatgagacactttgcccatcttttctgaaatttggatgttatagttggctgacatcatgtaattgatctgctttggttgaaggaacggtggg

SEQ ID NO: 9397 - DNA, 3015 bp, Zea Mays
caaacgggagaaaggcgagaccgcaagaataaaaggagaagagggggctttatttccatcgctgcgtcgagcccagcagtccgcctctccctcgctctcagatctaatcattatttaatccattttttcccagtctcacatgagcacgcctcactcgtcctccacctcctccgtcccccaccgcgcctccgctccccagatcccccaatccctaaccctagcgccacccacggcgtgctccgcctcgccttcctcctccttctcctcctcctccgcgtccggcatgcgggacgcgggggaggacgacgactccgactccccgccgtcgcagatgtcggaggacgaccccggcgccggcgccggcgacaggtgggagccggatctgaggggcgggggcggcaggcgggcgccgccggaccaggtgctggggaacgtgctcgagaccgtgctccagttcctcaccgccgcgcgcgaccgcaacgccgcctcgctcgtctgccgctcctggtaccaggccgaggcgcagacgcgccgcgagctcttcatcggcaactgctacgccgtctcgccgcgccgcgccgtcgagcgcttcggcggcctgcgcgccgtcgtgctcaagggcaagccccgcttcgccgacttcagcctcgtgccctacggctggggcgcctacgtctccccctgggtggccgcgctcggccccgcctacccttgcctcgagcgcatctgcctcaagcggatgaccgtctccgacgacgacctcgcgctcgtcgccacctccttcccctgcttcagggacctctccctcgtgtgctgcgacggcttcagcacgctcgggctcgccgtcgtcgccgagcgctgccggcatcttcgtgtgctggatctgattgaagactacgtcgaggatgatgaggacgagctggtggattggatctccaagttcccagagtgcaacacctctctggagtcgcttgtcttcgactgtgtcagcgtcccgttcaactttgaggccctggaggcacttgtcgcacgctcaccggctctgcgccagttgcgtgtgaaccaccatgtgtcagtagagcagctgcgccgtctcatggcaagagcaccccagctcacgcactttggaaccggtgcattccgatctgagggcgcccctggtgggggtttggctgtgactgagcttgctacatcttttgctgcatccaggtctctcatttgtctatcaggtttccgggaggtcgatccagaatacctcccagcgatctaccctgtctgtgccaagctcacgtcactaaacttcagctttgcaagcctaaccgctgcggaactcaagccagttattcgcaactgcaccaatcttcgcactttttgggtccttgatactgttggcgatgaaggcctacgtgctgtggctgatgcatgctctgatctccgtgagctgagagtttttcctttggatgcctctgaggattctgagggttcggtctcagatgtcggtcttgaggcaatctcaaaaggctgccggaagctagaatcaatcctctacttttgccagcggatgacaaatgcagcagtaattgatatgtcgaagaactgtcccgagcttgtagtgttccgcctctgcattatgggccgccaccgccctgaccgggtcaccggggagcccatggacgaaggttttggcgcaattgtgatgaactgcaagaaactcaccaggctttcggtctctggcctgcttaccgataaagcctttgcgcacattggaaaacatgggaagctaataaagaccctctccgtcgccttcgccgggaacagtgacatgtccctccagtatgtattcgaggggtgcaccaagttgcagaagcttgaggtcagagacagccctttcagtgacagggggctgctctccggactggactacttctacaacatgaggttcctatggatgaactcatgcaggctgacgatgaggggctgtagagatgtagctcggcagatgcaaaatctggtggtcgaagtaattaaggaccactccgaagatgaaggggagggggagaccgttgacaagctgtacttgtatcggtcgctggcaggaccgagggatgatgctccgccatttgttaccctcttgtagcactggtatttgaaggacagccccgcaccgtactgacggacatgtttgttaggtcattccttaccatcaagttgccatggccagcgagggaaagcgtagcgtcccgtgggtgatattcacaagttgctgcaggagcgctcgtgtaaaatcaagtaaagaacctgccgattattccttggaacttgatctggcatgggggcggcatccagagttggggcagttgaggagcacatccagacctagtatagcagtgatgggtagtaactgattgcacaggaactgactgcacactgactccagtcagcaggctccggatggttctttggcagtggcacccaagtctccagttatttactttgccatcttccgttccattttttcagctcagaccaaggaatggcggcggcgctgggtcctggaggggtcgtcatggctgatgctgaggaaggtacacactgatagtggtggtcggagttccatcgcatcgctgcatgctgacatgctgttgtacgccctgttgagagcgccaccatcttccgtccgcgtgctgaccactgacgtcgcgctccgaaagcaaaccccaaccagtcgccgcgactagttaaacaaggatgtgttgtctcttttaccacggaggaatggcgagcatgtggtctgtttcctcggggccactgcgcctcgcagttttctgcagagatcctgttcgatctgcccggtttctttataccatcaggccttgttcggttacatctacccggaatcgttccggctaatcaaagtttatataaattagagaaacaatccggctcggaatcgttccgacccaccaatccgacacaaacgaacaagttctcagcggcatctggggcgttccgtcc

SEQ ID NO: 9398 - DNA, 1138 bp, Zea Mays
caagtttcgtttcaccgggtaacagaaggacaagcctccacgtcgatagaagcaaatcaatccatttcgtttgacaagtagaagattatctgtgttcaaccaaatggacataattagtgctgttttgcaaaagcattttggattttccagtctcaaagcattccaaaaggaagtcttggatgcttggtttgctcatgaggattgtgttctcctaacagccataggatcaggaggtaccaaaggaaatgagcaaaacatagcatacagtctcagatgctgcaggatcacatgaaaattattgaagacgacggtccaggtgcagccttctatgccagtgctaaggccatgactaatggaaatcacactttctatgtgagcaaactgatacagaggttggctagattaagtaaatatgatacaatgtatcacatgcacagggacctctcaagcaacaacctcaatggataaggcatattaaatagtaatgctccttccatttcataatgtgtaaggcatattaaatttcttttaagaacgaaactttataaacattgaccatcaaatagtaaataaaatacatgtagattcatatttcacgtggttttgtagtaattgagaatgatttcaagatgaattaatggtgaaagcattccttgaaagacttcttaaatcctaatatgccttgtaaaatgacaatggatggaatagtttacaacatgacaaactgtccacctgaaattaaaaggataaatattattaatttctaaaggttgttttatgccgtcattgcttatcttgtgtagcattacttcttcagcatcatgggagaaaatcttactgtcagggttcagaggatgttgtacggaatgaagttggttgatttgacgaagaagaaaacatttttagtcttgtggctgtgcgtctagctgttgatgcagctgatgagaagtcggctatagccgagagaatttcagtcatcctgcagaaatatgtcttcccatatgacttctttcgttgttggatttatcatcgagtggagagtggcaatacttagtctggccactacttgtgcttgccaactttgcttaggtaatttcttggcctacttttaagcggtgtcatctgtagacaaaatgag

SEQ ID NO: 9399 - DNA, 3505 bp, Zea Mays
atttaatatgccttacacattatgaaatggaaggagcattactatttaatatgccttatccattgaggttgttgcttgagaggtccctacaaaataagaggaagtaaacataaaaagaggggttttgagcaatattaaagtatgtaggtcgatcaacaagaaagcttatatagaaatgtaagtgatggcatttgacatagaaatctggtattggtccatttagattgttgtgagacagatcccttgggaatcacaaaaacaaaatgaaacactaaaaaacaagttttgaagtatatataggtggaaaaggtatggtatatccagcatgcagaaaatagaagtcggctctcccagattttggatttcaccattacctgtgcatgtgatacattgtatcatatttacttaatctagccaacctctgtatcagtttgctcacatagaaagtgtgatttccattagtcatggccttagcactggcatagaaggctgcacctggaccgtcgtcttcaataattttcatgtgatcctgtatgaatagcatttcttcaattaaatcataaattggacaagaaattatccagaaagggtatgaaattatcagtcgaccaccacatatccataccttcacagtggatggttttgtgttgcgagaccccacatatatatgcctaatcgtatatgaagtctatgattcatgttgcaagttccatgtaattaattgtgtttgtgtgttaatgtgcagtctatgattgaactaagtcatgcacgggatgaagaagtcagtgacaccactacatctatcattgttctaggtatagatatttttctgtgacatttgttttggggaagttggctatgacgaacaccattgcaatttatttgcatcaaactaaagcagtgttgtctgctatgtttggctctgacgaacaccattgcaatttatttgcatcaaactaaacagttacagaatgaaagaagttagaaccaattggcaaatggcattacttgaatgattaaaaaaatggacatgatgtgcacctgcagcatctgagactgtatgctatgttttgctcatttcctttggtacctcctaccccaatcaaaatgttgcatgttcagacataaggcaagaaggttcagcgaaaaaaaggatacaaaatataagtattcaataatgatagaaattatgaaaaaagattactgacacttacagcccatataaaaagcaaagtcacatcagcggtagtaataaattacagaagataaagaggagcattacagaaaacgcacctgatcctatggctgttaggagaacacaatcctcatgagcaaaccaagcatccaagacttccttttggaatgctttgagactggaaaatccaaaatgcttttgcaaaacagcactaattatgtccatttggttgaacacagataatcttctactgtaagaatataaagcatagaatatagttgttaataagtactaaagaatgaacgatcatgcttacaacaacctttggagtgacacattgattcttagatgatttcaaccagaaaagtcactctaatgcaataatagaccacactctatgatgacaagaacattgatccataaaacaaataaaaattataaaatgcagatatcaaggagagacaatcggtatggacctatttgggctatctgggagagaccaacatccaatgaaaaatagacctatttgggctatctgggagagaccaacacaaccagttgacagtataaacaaaggtagaaaaatagactttggctgaacttgcagaagaaaaggaccggtatgaatctatctttgtttatgatcacaaaatgattaacagatgaccatctctctcttataacgacaccaaagaggactatctctttgatgaatcaagggcaagcaacaaatacatacatcctagatcaacaaatacactactctggttccaccatgatgccaaaggtagcttacagtgagacacagcgaaaggaattatttagtccagataaattaatgtacatatatacatagcaaggaatataaacaaccattgttttacatttgtcgatcgggtgttagtattaatttggtacaagaatcatataatacaaggaactttaaaaggaatcaaatagctgtagccattaatatgctatctagtcctaaaaaatacacaagacgctaactgggtagttaaaaaaaggcatgtatgtaccttgtcaaacgaaatggattgatttgcttctatcgacgtggaggcttgtccttctgttacccggtgaaacgaactataatatcagtgcagttaaagtataatcttgaaaatacaagatgatacaagactcatcacaggaatgaaaaagggctatgctgacttattaaacagcagtcaacacttattccaggttgtaatgttcgttgtcacatagtcatattacctcttctaaattgttcctagacattggagctcgttgcaagtggcaaatcccttatacttgaaggttgtaatgtagtggccccgttgcaacgcacgggcactgacctataacactgaagtctgggaatgaaacacttttggacaagagattgcatggaatattactaacttaaatgtcttctagatgacataattagttttcaaagatatgtattttaatacatttccttcttttcactatttgatagcttatttgtgtaaatagtttctcatttctgtctataactgtgcatacagtgatattgatacttttgtattttttattaggtaactgtattcaaggtgcaagccagtaggttgtaggttgcttgctcttaacaagcggctgtttgggattaaagttggaaatttctggagggacttgttcttggtcagctcacaggaaatcgatttacaattactctgaggggtgttactgcagaatctgaagacatgataaaaattgcagtagatggtctaggaaagaatggatttatcaactactatggtttgcaggtattatatcctcaagtttaaaactattgccctgttatttctgaagctcatcgattttatcttttcatctggttagcagtttggaagtggttcaataccaacacatcttgttggggctgctttgcttagaggagagtggaaggttgctgtaaacttgattcttgatccaagggaaggagagcgtgatgacatcaatgaattgcgcaaacattacaaagaacatggtgacattgatatggcactgagaaacttccctcgacacctcgtagctgagagggccatacttcaatgtctgaagaaatgccctggtaaccatctacaagcactcaagggtataccaagaacactgagaatgatctctaccactgtgtctagctctgcattcatattatgcatttatttgttaatgccatcaactgttaagttattcagtcacagcaaaggagatttctcgcattggcagcaggaggggcctggaagtggccgattgtaa

SEQ ID NO: 9400 - DNA, 1387 bp, Zea Mays
gaatgaccttttgtgttcgtcgtctccccaaaaggacctcccaagacctggcatctccagcgaatgcgacgccgggaaccaccgaccgtgcgtcctctctcctcgtgcgcttcgcccgtctccacagttggtgcagcttgcgacgcaacttggattctctcctctcctctcctctcgttgcaacaaggcagtccagtgaatgagacggatggccccagctgtgcctgtagctgatgcatgatggagctgagcctgtgggatgtgttgggcacacatggaagtaaggcaaaatgatgcatcgacatgtgatacgtgagcacgtatttcagaacccgataggttggttggagtgggcttcttaaaattattactccgaagcgtgcaattgagattgtagtattataatacccacgtatttgtaaatttgttatcgtcgttgctttaaacacccatctatagctcactcactgctgctgttactggcatttctcccctcatcccgttcctgaaaacggatctgaggccgtcgtcttccactgggtcgcgctcctgttcgctccgtcgtcagaaatgcaggcagcgccagcaggtcttgcttcacgctcctcgcggatggtggcccctccggcccgcgccgatgcagttgaagctccttccgaagtgagtgaaaagtgttccttgctccttccaaagtttagagatcacagcagcgaggcacaaagattaaatagagtttggaatggtcttttagacgccattagacacatgcaagtctcagccgatgagttgaggaggttgaccagacgcaaccatgtgcctgagtatgtagagtacctacgcaaaaatagattatgaagcccatgtgagtgctgttactgaaattgcacaaggtctagaccacgtgagcacagatttggcggaagttcttattggtccgcaacctcttcttgaagattatgaagcccttggtttgtacgatgatttccaatgcgatggtgaagatagctctgtggactcggatgagatcaatgatcgtcgtctatcgcatatgaacgagcgtatatgagatatttgtttgcgagagagttcagtttgccattgatgtctgtagcttatgaagcccttagttagttgccactgttgttcctggtacttgtatgaattgggttatgaaaatgaagagttgtgttatgagttgtattttgtgatcatataatggcttcatgtgataattctgcacctgttgtcactgttgttatgagttgtatcttatgaagcccttagttagttgccactgttgttcctggtacctgttgatcatacaattgttagttgtcactgttgttcctggtgctcatgatttcaagatcattttgataattctaca

SEQ ID NO: 9401 - DNA, 1683 bp, Zea Mays
gaaaagactgtatctacttctagaacagaaacagtgcaacagtgtttacggggtgaactgctggagttggcgttagatagtcgatggtctactgccgccgtgctctctcactgccagtgtcccaccaccgccatgcatgttttgcggcaattgccggctactatactcctccgtctccaatcatcaggcaccagcttgcgacgcaacttggattctctcctctcctctcctctcgttgcaacaaggcagtccagtgaatgagacggatggccccagctgtgcctgtagctgatgcatgatggagctgagcctgtgggtgggaatctcttctctgctggtggccactcgcctagctccaaaaacacacacacacacactctctctctctctctctctctctctctctctctctctatctagtgggaagtttcacatcactagctccatcgcaattggtatgggtggtgcttctgcacaaaagaaaaaagatgtgcctgtctcactccccaaccaacttgtgaattgtcatgcatcgatcctagctagagcatctccgagagcaaaaacccttgttacagttttccaactcacattctactatatattaggatgtgttgggcacacatggaagtaaggcaaaatgatgcatcgacatgtgatacgtgagcacgtatttcagaacccgataggttggttggagtgggcttcttaaaattattactccgaagcgtgcaattgagattgtagtattataatacccacgtatttgtaaatttgttatcgtcgttgctttaaacacccatctatagctcactcactgctgctgttactggcatttctcccctcatcccgttcctgaaaacggatctgaggccgtcgtcttccactgggtcgcgctcctgttcgctccgtcgtcagaaatgcaggcagcgccagcaggtcttgcttcacgctcctcgcggatggtggcccctccggcccgcgccgatgcagttgaagctccttccgaagcacaaagattaaatagagtttggaatggtcttttagacgccattagacacatgcaagtctcagccgatgagttgaggaggttgaccagacgcaaccatgtgcctgagtatgtagagtacctacgcaaaaatagattatgaagcccatgtgagtgctgttactgaaattgcacaaggtctagaccacgtgagcacagatttggcggaagttcttattggtccgcaacctcttcttgaagattatgaagcccttggtttgtacgatgatttccaatgcgatggtgaagatagctctgtggactcggatgagatcaatgatcgtcgtctatcgcatatgaacgagcgtatatgagatatttgtttgcgagagagttcagtttgccattgatgtctgtagcttatgaagcccttagttagttgccactgttgttcctggtacttgtatgaattgggttatgaaaatgaagagttgtgttatgagttgtattttgtgatcatataatggcttcatgtgataattctgcacctgttgtcactgttgttatgagttgtatcttatgaagcccttagttagttgccactgttgttcctggtacctgttgatcatacaattgttagttgtcactgttgttcctggtgctcatgatttcaagatcattttgataattctaca

SEQ ID NO: 9402 - DNA, 2403 bp, Zea Mays
gaatgaccttttgtgttcgtcgtctccccaaaaggacctcccaagacctggcatctccagcgaatgcgacgccgggaaccaccgaccgtgcgtcctctctcctcgtgcgcttcgcccgtctccacagttggtgcagaaacagtgcaacagtgtttacggggtgaactgctggagttggcgttagatagtcgatggtctactgccgccgtgctctctcactgccagtgtcccaccaccgccatgcatgttttgcggcaattgccggctactatactcctccgtctccaatcatcaggcaccagcttgcgacgcaacttggattctctcctctcctctcctctcgttgcaacaaggcagtccagtgaatgagacggatggccccagctgtgcctgtagctgatgcatgatggagctgagcctgtgggtgggaatctcttctctgctggtggccactcgcctagctccaaaaacacacacacacacactctctctctctctctctctctctctctctctctctctatctagtgggaagtttcacatcactagctccatcgcaattggtatgggtggtgcttctgcacaaaagaaaaaagatgtgcctgtctcactccccaaccaacttgtgaattgtcatgcatcgatcctagctagagcatctccgagagcaaaaacccttgttacagttttccaactcacattctactatatattaggatgtgttgggcacacatggaagtaaggcaaaatgatgcatcgacatgtgatacgtgagcacgtatttcagaacccgataggttggttggagtgggcttcttaaaattattactccgaagcgtgcaattgagattgtagtattataatacccacgtatttgtaaatttgttatcgtcgttgctttaaacacccatctatagctcactcactgctgctgttactggcatttctcccctcatcccgttcctgaaaacggatctgaggccgtcgtcttccactgggtcgcgctcctgttcgctccgtcgtcagaaatgcaggcagcgccagcaggtcttgcttcacgctcctcgcggatggtggcccctccggcccgcgccgatgcagttgaagctccttccgaagtgagtgaaaagtgttccttgctccttccaaagtttagagatcacagcagcgaggtataatcggagatttgcactatgctattgttgaagtgacgcatttttaaggtttagggcagtttacggcaatgcagttcaagctcctcctttttattgttcaagtgacataactataatttaagtatttgtttgcgccagtttacataactatacattaagtattgtttatggcagaactataatatttgtgcagtgactatattttaagtatacttcacataaatatagtttaagtatttgttttgcgacaatttacataactatacattttaagtattgttcagtgactatttgagtttacataactatactttatagaatctatcacaaaacacaggcaaaagacattgttgggagtagtaggggcacaaaaaccgtgggcgcctcgctcaacacgagcaacattgtttacggcactagcagaaatgcagaatacgtccgcgccatctattatccagcacacatgatccgatatgttttagcgttaggagcattatatatttggattgcaatactgatgtgtgagagaatctcattcttctatttgtattgtaggcacaaagattaaatagagtttggaatggtcttttagacgccattagacacatgcaagtctcagccgatgagttgaggaggttgaccagacgcaaccatgtgcctgagtatgtagagtacctacgcaaaaatagattatgaagcccatgtgagtgctgttactgaaattgcacaaggtctagaccacgtgagcacagatttggcggaagttcttattggtccgcaacctcttcttgaagattatgaagcccttggtttgtacgatgatttccaatgcgatggtgaagatagctctgtggactcggatgagatcaatgatcgtcgtctatcgcatatgaacgagcgtatatgagatatttgtttgcgagagagttcagtttgccattgatgtctgtagcttatgaagcccttagttagttgccactgttgttcctggtacttgtatgaattgggttatgaaaatgaagagttgtgttatgagttgtattttgtgatcatataatggcttcatgtgataattctgcacctgttgtcactgttgttatgagttgtatcttatgaagcccttagttagttgccactgttgttcctggtacctgttgatcatacaattgttagttgtcactgttgttcctggtgctcatgatttcaagatcattttgataattctaca

SEQ ID NO: 9403 - DNA, 4732 bp, Zea Mays
atgcgtcatgcctcatgcgactctgtctcccaaggccccgacgcccgtccgcccgtcgcgttgcttcgatgccccccctcgcagtcgcgactcgcctcctccgcgccgttccccattcatcctaaaggcctaaaccctagcctccttgctcctgcgctccggtcgccggtgcgtcccctcctccgctggccgccggcgccggtgcaatcacccgccgccgccagtgcatccgtccagggctgcacggccacctgtgcccactgggttgtgcggtcctaacgcaagttcggcgccgaccaccgccgaactgaagccgtctgcccacacccactcgcggcagcaccgccggacggctcccggcactgcgccagtgcgtgctgcctccggtatagcggctgccggatcccgccgcggcacctgcagatttctgcaggcactaatcactaacagttactgcactgttggtatgcgagtcctagtttgctgctcatgctctaagatatgaggtagttctgtgtgagggatttgaaagatggcgtcaaaaggtccccggtcaaggctagaccatgacacaagagctaggcgtcagaaggctcttgaagctccaagggagcctcgacggccaaaagttcactgggaccatgtccttgctgagatgttgtggctggcaaaggagtttgattctgagagaaaatggaagttgtccatggccaaaaagattgctcaaagagcaaataagagcatagttgatcaagcagcaaagggcgagagaaaacagaagggaaagcaggttgtctataagcatcaactggagcttgaggagagaaagaagaaggcacttgataagcaacttgatttccttttaggtcagactgaaaggtattcaacaatgttggcggaaaaccttgtagatatgccctattctcaaaacctagaaaccgagacttcgcagataaaccaaccatcccatcaagaggtagtagcagaagagaacttaaacgcaaccattccggatgatcttgataatatggaagtcgatgatgattatgggagctccttggatgaagagccagaagatgatgagcacactatcgatgaggatgaagctcagattaccgaagctgagcgcaatgaagaactagctgctttagaggcagaagctgacctaccactggatgttattctcaagatgtatacaaaaaccaaagttactccgaaccaggctaatgggtgtgatcatgaacttgctcactcttcaagtgacgaaggcaattcttctgaggaagtggatgatggtcattcttatgctgagtttgtgaagaagaatcatggtaaaagtaatggaaatatttcttctatcaatgatcaggaggacgaagattacattgctgctgaagaagtaaaggatgacgaagcaactttgtccgaagaggaacaattggcaaagaaagaagatcctgatcatctggaagagattaagttactgcagaaggagagcgagataccactagaagaacttcttgcgaggtaccgagaggatggctgtgcagatcatgaaacagctgagttggagaattcaccccattttgttgaagagggatgtgctggaaactgagcacacgactctacaatcagaaattgcatcagagccttgtgctcaacaaaattttgtggaagagaataatctcactgatgttaagacagtcaatgaagataagagtgatgatgtaattgctgatgctgcagctgctgcaagatcagcacaaccaactggcaacaccttcttgactacaaaagtgcgcacaaaattcccattccttcttaagcattctcttcgtgaataccagcatatagggctggattggttagttgctatgtatgagaagaggcttaatggaattctagcagatgaaatgggtttaggcaagacaatcatgactatctccttgcttgcgcaccttgcgtgtgagaaggggatatggggtcctcatcttattgtcgtgccgactagtgttatgctaaattgggagactgaatttcttaagtggtgtcctgcttttaaaatactgacttatttcggaagtgcaaaggaaagaaagcagaagcgtcagggctggatgaaaccaaattacttccatgtttgcatcacaacatataggcttgtcattcaggattctaaagtgtttaagcgaaaaaagtggaagtatcttattcttgatgaggctcatctgataaagaactggaaatcacagcgttggcagacattgctcaacttcaattcaaagagacgtattcttctgactggaactccactgcaaaatgaccttatggaactttggtccctcatgcattttttgatgcctcatgtatttcagtctcatcaagagttcaaggattggttctgcaatccaatttccgggatggtggaaggtcaagataaagtaaacaaagaagttatagatcgattgcacaatgtccttcggccatttatactgcgtcgactgaaaagagatgttgagaaacagttaccaaagaagcatgagcatgtcatatattgccgactttctagaaggcaaaggaacttgtatgaagaatttgtcgctagctcagagacacaagcaaccctggcgagtgggaattattttggcatgataagcatcatcatgcaacttagaaaggtctgtaaccatccagatctttttgaaggtcggccaataataagctcatttgacatggctggtattaacatgcagctcagctattcagtctgcatgctccttgataagagtccattttctcaggtggacctgtctgatatgaattttgtgtttactcaaaatgaatttagcatgagttcctgggaagctgacgaggtcatctccgcctttccttcaagtatcacctccagggactgtgacctggatattttttgctctaataaggatcatcagggaagtaatttgacaaacatttttgaagatattcagaaagccctacaggaggagagaataaaggaatccagagaaagggcagcttctgttgcatggtggaatagagttagatgccaaaagagacctgtctatggcacaaacatgagacatgttttgactgtaaagcatcctgtatcaaatattcttaataagaggaacaatccattgtgccacatggactattcatcacgccttgcagatcttgttcttccatctgtggaacgctttcagaaaatgctttattttgttgaatcatttacattcgcaattccagctgctcgagctcctccccctgtttgctggtgcagcaaaggaaagtctcctgtttttattgatccagcatatagagaaaaatgcatgtacaagttttctcccattctgtctcctataaggtctgctatcgttcgtcgtcaagtctactttcctgataggcgtttgatccagtttgactgtgggaagttgcaggaacttgctattctgttaaggcgtttgaaatcagaaggccacagggccttgatatttactcagatgactaagatgcttgacgtcttggaagagttcataaatttatatgggtatacatatttgcgattagatggttctactcccccagaagagaggcagactctaatgcagaggttcaacacaaatccaaagtttttccttttcattttgtccacacgtagtggtggtgtgggaatcaaccttgtaggtgcagacactgttatcttctatgacagtgactggaaccctgcaatggaccaacaagcacaggacagatgccacaggattggtcagactcgtgaagttcacatatatagactcatcagtgaaagcactatagaggagaacattctcaagaaagcaaatcagaaacgagctcttgatgatttagtgatacaacgtggtagctacaatacggaattcttcaagaaacttgatcctatggagttcttttccgggcacacatctcttcgtgtggaaggtcaggagaagaattgctctacatccgtgggagcttcaaatgatgtggatctggctctgtcaattgcagatgttgaagcagctattagacaggcagaagatgaagctgactatatggctctcaagaagttggaggaggaagaagctgtggacaatcaagaattcagtgaggaggttgcgggcagaccagaggaggatgaattggttaatgaggaggatggaaaacctgatgagcacattaatgaagatcacaaatactactcttctgatgtagagaaggagaagcacattactttgtctaccaatcgattaaacaatgaaaaggctcttacattggctgttggtgatgaagatactgacatgcttgctgatgtgaaacagatggcagcagcagctgctgcagcagggcaagcatgttcatcttttgagaaccagctccggccaattgatagatatgcaatgcgctttatggaactctgggatccagtaattgacaaagctgctgtcaatcatcaagtaaatgttgaggaggaagaatgggagcttgatcgcattgaaaaactcaaagaggatttagaagcggaaattgatgaagaccaagaaccactatcgtatcaatcatgggatgttgattttgctacgacagcctatcggcaacatgttgaggctttaactcaaaagcagttgttggaagaacaggaaagacaggctcaggaagcagcaaaagagttggaagagaataatgataatatgagcag

SEQ ID NO: 9404 - DNA, 8631 bp, Zea Mays
cgcccgtcgcgttgcttcgatgccccccctcgcagtcgcgactcgcctcctccgcgccgttccccattcatcctaaaggcctaaaccctagcctccttgctcctgcgctccggtcgccggtgcgtcccctcctccgctggccgccggcgccggtgcaatcacccgccgccgccagtgcatccgtccagggctgcacggccacctgtgcccactgggttgtgcggtcctaacgcaagttcggcgccgaccaccgccgaactgaagccgtctgcccacacccactcgcggcagcaccgccggacggctcccggcactgcgccagtgcgtgctgcctccggtatagcggctgccggatcccgccgcggcacctgcagatttctgcaggcactaatcactaacagttactgcactgttggtatgcgagtcctagtttgctgctcatgctctaagatatgaggtagttctgtgtgagggatttgaaagatggcgtcaaaaggtccccggtcaaggctagaccatgacacaagagctaggcgtcagaaggctcttgaagctccaagggagcctcgacggccaaaagttcactgggaccatgtccttgctgagatgttgtggctggcaaaggagtttgattctgagagaaaatggaagttgtccatggccaaaaagattgctcaaagagcaaataagagcatagttgatcaagcagcaaagggcgagagaaaacagaaggaggaagaacatagaatgcgaaaagttgccgttaatatttcaaaggatgtgaagaagttctggatcaaaatagaaaagctggcaagttcatttttatcttctaatgtcattgttaactgtgacactactttggatatttcttttttgaagaaaactgagctatattttgcaacttcatttttatcttctaatgtcatgggaaagcaggttgtctataagcatcaactggagcttgaggagagaaagaagaaggcacttgataagcaacttgatttccttttaggtcagactgaaaggtattcaacaatgttggcggaaaaccttgtagatatgccctattctcaaaacctagaaaccgagacttcgcagataaaccaaccatcccatcaagaggtagtagcagaagagaacttaaacgcaaccattccggatgatcttgataatatggaagtcgatgatgattatgggagctccttggatgaagagccagaagatgatgagcacactatcgatgaggatgaagctcagattaccgaagctgagcgcaatgaagaactagctgctttagaggcagaagctgacctaccactggatgttattctcaagatgtatacaaaaaccaaagttactccgaaccaggctaatgggtgtgatcatgaacttgctcactcttcaagtgacgaaggcaattcttctgaggaagtggatgatggtcattcttatgctgagtttgtgaagaagaatcatggtaaaagtaatggaaatatttcttctatcaatgatcaggaggacgaagattacattgctgctgaagaagtaaaggatgacgaagcaactttgtccgaagaggaacaattggcaaagaaagaagatcctgatcatctggaagagattaagttactgcagaaggagagcgagataccactagaagaacttcttgcgaggtaccgagaggtacagttagattttccatttatttcttcgaacaacttactgtggtccatttgtaatacctttttttatatttaggatggctgtgcagatcatgaaacagctgagttggagaattcaccccattttgttgaagaggtcaataccgacaagtctttgaatgatcaatctgtgaacattttggaagcgaaaagtgatatttttgtggatcaccaatccagggatgtgctggaaactgagcacacgactctacaatcagaaattgcatcagagccttgtgctcaacaaaattttgtggaagagaataatctcactgatgttaagacagtcaatgaagataagagtgatgatgtaattgctgatgctgcagctgctgcaagatcagcacaaccaactggcaacaccttcttgactacaaaagtgcgcacaaaattcccattccttcttaagcattctcttcgtgaataccagcatatagggctggattggttagttgctatgtatgagaagaggcttaatggaattctagcagatgaaatgggtttaggcaagacaatcatgactatctccttgcttgcgcaccttgcgtgtgagaaggggatatggggtcctcatcttattgtcgtgccgactagtgttatgctaaattgggagactgaatttcttaagtggtgtcctgcttttaaaatactgacttatttcggaagtgcaaaggaaagaaagcagaagcgtcagggctggatgaaaccaaattacttccatgtttgcatcacaacatataggcttgtcattcaggattctaaagtgtttaagcgaaaaaagtggaagtatcttattcttgatgaggctcatctgataaagaactggaaatcacagcgttggcagacattgctcaacttcaattcaaagagacgtattcttctgactggaactccactgcaaaatgaccttatggaactttggtccctcatgcattttttgatgcctcatgtatttcagtctcatcaagagttcaaggattggttctgcaatccaatttccgggatggtggaaggtcaagataaagtaaacaaagaagttatagatcgattgcacaatgtccttcggccatttatactgcgtcgactgaaaagagatgttgagaaacagttaccaaagaagcatgagcatgtcatatattgccgactttctagaaggcaaaggaacttgtatgaagaatttgtcgctagctcagagacacaagcaaccctggcgagtgggaattattttggcatgataagcatcatcatgcaacttagaaaggtctgtaaccatccagatctttttgaaggtcggccaataataagctcatttgacatggctggtattaacatgcagctcagctattcagtctgcatgctccttgataagagtccattttctcaggtggacctgtctgatatgaattttgtgtttactcaaaatgaatttagcatgagttcctgggaagctgacgaggtcatctccgcctttccttcaagtatcacctccagggactgtgacctggatattttttgctctaataaggatcatcagggaagtaatttgacaaacatttttgaagatattcagaaagccctacaggaggagagaataaaggaatccagagaaagggcagcttctgttgcatggtggaatagagttagatgccaaaagagacctgtctatggcacaaacatgagacatgttttgactgtaaagcatcctgtatcaaatattcttaataagaggaacaatccattgtgccacatggactattcatcacgccttgcagatcttgttcttccatctgtggaacgctttcagaaaatgctttattttgttgaatcatttacattcgcaattccagctgctcgagctcctccccctgtttgctggtgcagcaaaggaaagtctcctgtttttattgatccagcatatagagaaaaatgcatgtacaagttttctcccattctgtctcctataaggtctgctatcgttcgtcgtcaagtctactttcctgataggcgtttgatccagtttgactgtgggaagttgcaggaacttgctattctgttaaggcgtttgaaatcagaaggccacagggccttgatatttactcagatgactaagatgcttgacgtcttggaagagttcataaatttatatgggtatacatatttgcgattagatggttctactcccccagaagagaggcagactctaatgcagaggttcaacacaaatccaaagtttttccttttcattttgtccacacgtagtggtggtgtgggaatcaaccttgtaggtgcagacactgttatcttctatgacagtgactggaaccctgcaatggaccaacaagcacaggacagatgccacaggattggtcagactcgtgaagttcacatatatagactcatcagtgaaagcactatagaggagaacattctcaagaaagcaaatcagaaacgagctcttgatgatttagtgatacaacgtggtagctacaatacggaattcttcaagaaacttgatcctatggagttcttttccgggcacacatctcttcgtgtggaaggtcaggagaagaattgctctacatccgtgggagcttcaaatgatgtggatctggctctgtcaattgcagatgttgaagcagctattagacaggcagaagatgaagctgactatatggctctcaagaagttggaggaggaagaagctgtggacaatcaagaattcagtgaggaggttgcgggcagaccagaggaggatgaattggttaatgaggaggatggaaaacctgatgagcacattaatgaagatcacaaatactactcttctgatgtagagaaggagaagcacattactttgtctaccaatcgattaaacaatgaaaaggctcttacattggctgttggtgatgaagatactgacatgcttgctgatgtgaaacagatggcagcagcagctgctgcagcagggcaagcatgttcatcttttgagaaccagctccggccaattgatagatatgcaatgcgctttatggaactctgggatccagtaattgacaaagctgctgtcaatcatcaagtaaatgttgaggaggaagaatgggagcttgatcgcattgaaaaactcaaagaggatttagaagcggaaattgatgaagaccaagaaccactatcgtatcaatcatgggatgttgattttgctacgacagcctatcggcaacatgttgaggctttaactcaaaagcagttgttggaagaacaggaaagacaggctcaggaagcagcaaaagagttggaagagaataatgataatatgagtcaccgcagaaagtcaaacaagaataaaaagaagactggcaaattcaagtcccagaaaagaccgcgtttgtcttctgaatcagaagtcattctggaggaaacctctgtagatacaatgagcattgatgacaatgcaccctcacctgagcttataagtgatgaatcgccacaccattattctaacaagcgtaagaagattatgtctgctactgaggaagatagtaacagcagaagtttaaaaaagtttaagaaaactaaatcaagttttatttctgagttgtcacctaggccgaaggaggaccttaatgattcagatccaaaatcagtggctagaactaaaagtgatggcagactttccatcccttgcatgccagtaaagcgtgttattgtgataaagcctgagagattgaaaaagaagggaatatggtctcgagattgtgcttcagactcatggacatctgaggaagatgcagttctttgtggaactgtgcatgagtatggtcctctttgggaactggcaagtgattttcttcactccttgccaggcgggtcctcctataggggaagatatcatcatcctttgcattgctgtgagagatacagagaacttttctgcaaatatgcaatatcagcaacagataattctaacagtgaaaaggctccttctgggactggaaaggctgtacttagagtatctgaggatcaagctcagatgttggtgaatgtgaccagtgaacttcccaacaatgaattgcttctccagaaacacttcatggctgtaatttcatctgtatggagatcaaaatgttgccgtcatccctgctgttttaggaataagcctggtggatcaagtgagaactggcccatggtaaactttagaccaagcgtcaatctagttagggaagcccttgcagctggtcaggctaagtttacgctaactgtgattccaccaccgtcaagaaaccaggaatactcacggaattatttagaattagagttagatttcttgaaagatcaacatgcctatgaggaagacttcccgtctgtactaaatgtatccatactggaaccagaatcatccaaacaggctccagagccagtggaacaatcattgttatctgaactttcatgtagacaggctgagaaccgactcaggatagcgtcagaagcttgttatgatggtgaaagttttcattgggcatcatcatctttccacataaatgatgctgcccgccacaaatctggtttgaagtctatagggaagcacaaagcagcatcggaatctggtagacctcccaaatccaaagtccagaagattactgaattgcatcaggaagggccaattgccatgagtaattttctctgtatgcctgctcaactattgccaagtacagctgacttccacattagtgactccctatctgactttggtatcaacgattatgaattcaactactctgaggatctcttgcaagagtttgacgccctcgagttcttcccagatcagggtgactctggtctccttggtattgaagagttagaacctctttcggatttcacagatatcggatgaacatagatgagcaaattatggttgatgggatgctgtcctataccaagaggagacaagatcgcctctggcaggagcccaaggatataggttgagttgctcaaccatgcacagatgtgctgcaagctttatcatggctggctggagcaaagctgctggcttggtgaggtcacattgatctgacaagcttgaggatgggtttgcactaatggcggcattgggtaatttccatacatgtatgtatattggtagtctagaattgtaggatgtagaaatgcttccctcatttgtgtttgagggtagaccttgtaactcgaccacattgaaattttgttgagcaggtaccaacagagaaggtaaaagaggaggccctcagcaccacccatttgttgctgtatatcgtgttcattctctgtttaatccaatgttgtttggctattttgccactgaaaacatctcacatgtcaagttggtggatgccatctctatcagaaatttaggatgtggcgccaatgtccaaagaatgatcagtcaagtgcagcttatcggcgcattatatttggtcaggaatcaatgcatgacatcaatatgatcagaactgctgttccagtttcatttgaggaatgcaatttctggtgattcgggatgcaagtttttcataggaggtaaagagcgtgggcatagttgtacatgtaataaaatgaataaggttctgtgaactctcggtctcggttatgccaattaatagccataatttgttgttagaggccagggggctttttgatcagcgggctgctgctgtgagccggtaacaatgtagctgattgtgcgcctccatattgttttcttgtgttttatctcaacgaacagctagttgaaaacgctgctactggagaaatctctgctgccgcgcagcgtctggaattctggataagacggtctgaaacccccttcctctccccgtcccgttcgcccacatcccccacctcccccatccccaacgctgccatggcctcgctccaccccacgacagcaatgctggcccagcgccattcccctgccccctctctcagcgcatcgtcgctctcatggtccgcctccatcgccgtctcccgcatcccgccagcccctggcctcgcgctccacccactagtgaatcctcccgcctccggcaaccgccagcggcccaaccgcaagtcgtggaagcagcgcacggacatgtacatgcgccccttcctgctcaatgtttttttctccaagcgcttcgtgcacgcaaaggtcatgcacaggggcaccagcaaggtcattgccgtcgccaccaccaactccaaggacctccggctcaccctcccatctcttgtcgacgacaacgcctgccggaccatagggaggctcatcgccgagaggtccatggacgccgacgtctttgctatggcctatgagcccaagaagaacgagaggatcgagggcaagctcgggatcgtgattgacaccattaaggagcacggcatcatcttcgtataggcaggtttcagggtaggagtagggctgttatgttttagtttcgactcctgtagcctggaaactgttaccttattgagataaaaacaaatacaaaaagtatcaatctagaggtcttagaccaatgttgctgacaattggtcttgtcagtttgaagtttgatgaaattgcaaaagtttgacaccacgctagtctaaagtaataagaaacaaaaactgtcaaatcaactgtagaaattgccagttgtgatgccaatgctaacaaaaacttaaaaacatgtcagttcaatgaggttcaccgagcctcaaatttgatatcctaaataactactgatcaaaatgttaagaaaatataccttgagacaaatcatcgtccttgattacattagtgagataactgtaagtttttatttcgctatatttgttactgataggtttcaaacttagagagtacaataaaataataaatacatgtagttggtgttgctaggaagttggaactagg

SEQ ID NO: 9405 - DNA, 5087 bp, Zea Mays
cttcttcctcctcgtcagattcatcgtcagttcaggcttcagctcgtcaggcgagagagagagagagagatgcccagctgcttgctgtcgtgtgatttggagctcgattaatattaccatgattctgctgcacacaagctgcattatagggacgacgatgccaagcaggatgaggttcgcatgatggccaccgctgaatcggacgacgacgccatctgggtaccgcctgatgaggcagcagcagcagcagacagcatgatgcaagatgatgatgatgatgatgatgattaccatgccggaaccggagaggaggatgacgaatccgaggacgacgatgatgctaccagcagtatctgcaggtggcgccatgactctgatcatcagtccgccgcccacagggaggagcggcagaaagccatgctgagagccatgaacgggcagctcagaatgctcgccgctcgctttctagagtcggctggcattgataccagcagctggcttgatatcgtcatctccctgtcctgggaagctgcccttgccatcaagcctgatgttggcactgctgtaggcaaccaaatggacccttcctcatacatcaaggttaagtgcctagcatctgggacaccccgccaatgtgaggtcgtcaagggcctagtcttcaggaagaacgtcgctcataagcacatgcccaccaagtgtcacaatcccaggctgctgcttcttagtggactcctcggccattcccatgttggcttctcatcgttcagttccatagagcaggagaaagaccatctggacaagtctgtctgcgaaatgatggagatctgccgcccagatgtcgtcttggtcgagagaacggtttcacgcgacatacaggagcttcttctcaaggaaggtgtcactctagtgcttgacatgaagctcaaccggctgcagagggttgctcgctgctccggcgcccccatagtctcgttttcagaggttctcagcaagccaaagctgaagcagtgcgactacttccacattgaaaaggtgacggaggagcacagcctgattacctgcagcgctggagttggaagcaggccatctaaaacattaatgttcctggaaggctttcacaagccactgggatgcacgatattgctaaggggagcaaatactcaagaactgaagaaaatcaagcaggtcatgaactacacagtgtttgcagcgtaccgcctcgttcttgagacatccttcttcgaagatcagagactaatcttgaacaataaggattcttccaaagaagaagtttctgtcgctaggaaggccggaccatcgtcactaggatcagtacaggaaactactgattccaatgctctaaatccactcgacaagggcttccctaatcaagcactactcccttctgaaggactagtagtatcagcagtcccagaatcacccagaagattcattgatatactccgttatcataatatttatttgccggtcacttcttctcaagaggcaactgatcatcagatacaagacagtatccatatcagcccaaacgttggagtaccaattggttctgttgagagtgtggatcatttaagcgatccccaggaacaagcatcctctgaaaccaatcagcaaatggcattggacggcccttcggttagtgaaaaacatgagcagtcattggaaaatattaaaacatctgatacagatgaggtggacgatgtgttggagtctcagagcatacttattttgctgtctagccagtgtatcacaaagcaggttatctgcgagcagagccgtctatcccgtataagatactacgggaattttgatgtttccttaggacgctatttgcaagacattttgcagaagcagaatctcagctgttcctcatgtggagagcctccagaggctcacatgtattcctacactcaccgcaatgggaatctgactgttcttgtgaggcacttgctgcctaaatatcgtttacctggtgaatcagaaggaaagatttggatgtggactagatgcttaaggtgtgaacgtgaaagtgggatctccagatcatcacgaagggtgataatgtcagctgaagcacactacctttcatttgggaagttccttgaactcagtttttcaaaccactcaaccgctagaaggctgtcaatatgcgggcattcactcaataccgattgtctgcgcttttttgggttgggctccaaagttgcaatgttccagtattcctcagtcgaaatttacaatgcctgcaaaccacagcctactcttgagtttcacaatcccgatatgcacgagtggtacgggcaagaggtacgaaatgttcttgccacaggagttacacttttctcggaagtcacaagcgcactacagaagctcaaggatcagtttcctgttaaagacctttcccaacttgaagagatgttgattaaagagaaggctgagttcatggattctctagcaaagactgttgatcgaaatagggaatcaagctctgtggatgatatccttaatgtaaattggctctatcaggatcttctactggaactttatgtgtgggactgccggctgcaccaacttgtagattgtacacttgctgaaaacgcaatagtggcaaatggccaaactgcagcagccgctgaagcagacggaatcggtgagcgcatgagcagcatagcaccttttgagaatagatgtatcaaggaaccagagaagttcattgaagcagggactgcatcagccttgcttgatgatgcatggaatgataagcattgcaatgatcagcacaacacaaactgtgagtgtgacgggggggaagaaaaatggatttggaacccagtgaatgagtccagattggctttcaggcaggaagtggaagttggatgtttggaaaggtttgaggtcgttaaccactactgtccaagtcatttatcccccttgcacaaacacagagaatctggcgaggagatggggggatctccacagttcacagtaggtccaggtggcagtatcttgtgtgtatcagaggatgagatatccagtataatatcacgagctcttgctgtatccgaggaacgtcggcacttactgatggatgctgtcgctgagactgaaccagcagataccaccaggagtaaaacaatggacaagtcttacagctctttatctgaaagttcatctgcttctctgtggtcttcggattctgaggcaagcatttcgtctgacgacctctccagctatgatacctcgcttcttctatcgtcctctctccatccagaaatagctgtcaacgggataacagctctcaaagggaggtactcggtcatctgtgtacactctaaccagttctacaacctccgaaggaaatgctgcccatcggagcttgcatacgttgcctcattgagccgttgcaagaggtgggatgctcagggcgggaagagcaaggcattctttgcaagaacaatggatggcaggctcatcataaagcaaataaagaagacagagtttgagtccttcataaaatttgcgcctgattacttcaggcatgtcaaccattctctggacacggggagccagacttgccttgccaaaatcttagggatctatcaggtgaagcagacaagacatggcaaggagatcaagatggatctgatggtgatggagaacatcttgtttggacacaatgtgtcgcggacatatgatctgaaaggcgccatcttttcacgttatgtctccgacccaaatgaccatgctggcactgtctacttggaccagaactttgtggatgacatgcgtgtttctccaatctatattggtggaagagcaaagcatctcttggagcgggcaatctggaacgacacgtcttttctcacgtccatcaatgtcatggactactctttgctggttggagtggacaggcagaagcgtgagctggtattcggcatcatcgactacctgaggcagtatacatgggacaagcagctggagacgatggtgaaagcgtctctggtggtgcccaagaatgaatcgccaacggtgatttccccaagggattacaagaagaggttcaggaagttcatgagcaagcacttcctcacagttcccgacgagtggagcacggagagtcggccgccggtggcctgggagtcctgtgcccacgccggcgagttgccgggagtgaagccccagcatccaagcccaatcctcctggcgtgcgcttaattcaatttcacattctgatgctggcgaatagtgtcacaaatggaaggaggaaacgatgcttgtacgaagttccagtttactaccctcaccacacacgcacgcacgagtacatatataattctctcttcaacaagtgaagagaaggcctagcaccattgctaaaccttttcttgcttctcgtccacaacaaggggaatcatctccgtctgattccttgcttgcgctgttcctagactccctggggctgcagcctgccgctgcgagatcagatgcctcacgtagccatagaaagtgcaaccaaccagggtgattccacacccgattgcattcattgcagagattggattccggaagatcgaccacgacactaacactgccaccgcgactttaaggttgcctgcaacgttgaacgtcactgctgttgttgaatggatgacgtagaagatggagaagttaaggcagaacgcaagcacccccgaacctaggatgatagtcagcgcaggaacgatggaatcatgtgtgtagaaccagttcattacacctcctccttcaagcaccatcgctggtagagccagtatcatggtggcaaagggtgccatgtagtacaccgtgttaatgctgtcaaacttgtatccatggagtagggactctgccaagatggtctttgtagacgtagccaggcagccaaccatggcagcacagaaaccgaaaatgttgaagctaagctctgtcaccgaagtcaggagtattccgccaactatagggaccagcgaagcccatatgcgccactcgaaatgcttgctccagactagccactgcagaataactgaaccaagcaggagatgatgatg

SEQ ID NO: 9406 - DNA, 1133 bp, Zea Mays
atgtcatttccttctgttttcccccaatcatgctttgttgctttccctcgtatattatgtagtaaacaacaacaacaacaaaaaagattgattttgcaagagacagaggctggtgaagacgacgggaagccaagcaggatgaggcagatgatgagcatgctgatgtggacggcggaggtgttgaggatggcgccggccaagaaaaacatgccacctatcagcatagagttcctccggcccatcgtcctcatcaagtggccgaataccagattggagaggatggccgcgagatataacgaggaaacgaacaagtgctgtccatcttggtgtactctgggatcgtgctgtttccggtcctcctcccagtccgagttgctgcaaccggcggtgccctatctaccatccctatccataccaacaaaacagcccaatcggctcagaacttctcgtcaatagaaaggctcggaatgggcaatgttcatgtcattaaatggatgttcaacaaaggtcaggggaagacaatgggaagctattacaccctgttgaatgctttgatcgagttatttggaatgatttttgctgatatggaggaactaggcgtaagaccagatggttctattatcaggatgctaggtgatgtatttcaaaagttagagatgatggacaaatacgaaaagttaaaaaagaaatacccaccaccgaaatgggaatatcgatacatcaaaggcaagcgcattagaattagagtttaccttgatagtaaaagtgaagaggcggcaagaggagaccctgacaatgatgaactcggagaggtagaaagtatacatcttgataatgaattggaagaagaagcaagcttaggcctcgacaggagtgtattggacgatgcagctctggagaccttgaatatatataattcaaagcttccatttggtattttttttaatgcctgcttaatcaaagcggcctggagcaaattgaacgggcgaaggccatatcctggacatcggacatggcagagtagccgttacatcatccatatgatcctccattgttcggcatggaaagacaccgtttctgacactggagttgtctgcgctacccatatccagtgtgggggcaaaaatccataa

SEQ ID NO: 9407 - DNA, 3207 bp, Zea Mays
aataatccaataattggcctactctgcacaatataatccaataagcggtaataatacaatactcctcctgccctccacaccccgcggctggactggacttggaggtctggactctggagagggcgccagacgcaagtggccaggccagtcgacccacaatcccactccccatttgattagaagctcctgtgcagctgcagcaccctgcataatctattttgttcttgccctagcccccacctagcgctcgcacgccatggcgtggccgtggtcaccgccgccgcggcaaaccgcgcgcttcgtcgtcgtcgtcgtcgtcgccgtcgttcttctcttcgctgctgccccgtggccccgtgcggccgcccaggccgggtaccacgtcgtgtcggtgtcagggacggggggccaactgtcggcgcggctggagctcaccggcgccggccagaaggcagagctcgggcccgacgttcgcaggctcagcctcaccgcgagccttgagacggacagccggttgcacgttcgcatcaccgacgcggatcaccggagatgggaggtccctcagagcgtcatcccccgcgaggcgccgcgggacgacgtgcccctggaagcgagcacgggagcctcgccgccgcacagccgcgtcctctccgcggcgacctccgacctggccttcaccctccacgcctccccgttccgcttcaccgtgtcccgccgctccagcggcgacgccctcttcgacacctccgcggcgctggtcttcaaggacaggtacctggagctgaccacggcgctgccgccggagggcggggcgtcgctgtacgggctaggcgagcacaccaagcgcacgttccggctgcagcgcaacgacacgttcacgatgtggaacgccgacatcccggccgccaacgcggacgtcaacctgtacggctcccacccgttctacctcgacgtgtacttcttcgccggcccctccccgctcgacgtcgtcgaccagtacacccagctcatcggccgtccggcccccatgccgtactggtctttcgggttccaccagtgcaggtacgggtacaagaacctggctgacctggagggcgtggtggccgggtacgccaaggccaggatcccgctagaggtgatgtggacggacatcgactacatggacgcgttcaaggacttcacgctggatccggtgaacttcccggccggcccgatgcggcagttcgtcgaccgcctccaccggaacggccagaaatacgtcgtcattatagacccagggatcagcgtgaacgagacatacgggacgtacgtgcgagggatgcagcaggacgtgttcctgaagcggaacggcaccaactacctcggcaaggtgtggcccgggtacgtctacttcccggacttcctcaacccgcgcgccgccgagttctgggcgcgcgagatcgccctgttccggcggacgctccccgtcgacggcctctggatcgacatgaacgaggtctccaacttcgtcgacccggcgcccctcaacgcgctggacgacccgccgtaccgcatcaacaactccggcgtgcaccgccccatcaacaacaagaccacgccggcgtccgcggtgcactacggcggcgtgcgcgactacgacgcacacaacctctacggcttcctggaggcgcgagccacgcacggcgcgctgctcgccgacaccggccgccggcccttcgtgctcagccggtccacgttcgtggggtccggccggtacaccgcgcactggaccggagacaacgccgccacgtgggacgacctccgctactccatcaacaccatgctcagcttcggcctcttcggcatccccatggtcggcgctgacatctgcggcttcggcggcaacacaaccgaggagctctgcagccgctggatccaggtacaagctttccatgcactccaagaccagcatgccatgtccactgacatgtatgagctgagctttcgttgtttgctcgtgaagcttggcgcgttctacccgttcgcaagggaccattcggcgatcggcacggtccggcgcgagctgtacctgtgggagctggtggcgcggtcggcgaggaaggcgctcgggctgcgctaccggctgcttccgtacatgtacacgctgatgtacgaggcgcacaccacgggagcgcccatcgcgcggccgctcttcttctcctaccccaaggacgaggccacgtatggcgtggaccggcagttcctgctggggcgcggcgtgctcgtgtcgccggtgctcgagcccggtgccaccaccgtcgaagcctacttcccggccgggcggtggttcagcctctttgaccacgaggtcgtcgtcgcctcggcgacgggcaagcacgtcaccctcccggggcccgcggacacggtcaacgtacacgtggccggcggcaacatcctgccgctacagctgccggagctgacgacgtcgcgcgcgcgccagaccgcgttccacctcctggtcgcgctcgccgaggacggatccgcatccggggagctgttcctcgacggcggcgacttgccggagatggccgggccgcggggcgagtggagtctggtgcggttcagctgcacgcaggggcgcgacggggttaagctcatgtcgcacgtggtgcacgacgcgtacgggccgagccggaagctggtcatcggcaaggtgatgttcctgggactgccctcgctggcgccaccgggagagttcgccgtgtatgtcaacggcgttaagatggccaactcgactggcgcgacgctagggtatcaaaggcgcggagcactcggcgccgctcaagtggaggggttgtcgctggtcgtcgtcgaggagttcgagctcaaggtggtcacgtcgtcataacgtgacactcaagctcgttctgaataaaatctgatcaaaagtctaaatttaaattggaaataaaggaattgtgagtgcaatatagcaaaaaatgtgcaatgagattcgtgtcctctacccggattgagccctaacgcgcataatgaacatccggcccaaatatggaggcctaaatcaatgattgcaaattgggcttgcaaaaggctttatggcttggcacgtcatcggaaggaaacagtttagtccacgatggagactttttaatgtgttaacccttcttctatactaggagtacacttaaagcatcagtttcaacggtc

SEQ ID NO: 9408 - DNA, 3293 bp, Zea Mays
gaacaaccatatattggcacgccgtacgtccctagcatttggtcagagtactccaagcgttaccatacagtttgcccgttagtgctcatcatcccaaaagcgcatcgccttttgctcttctgacgttggatcgcgcatggcatcccgtcccgtccccttttgagtgccgtgaggatccaggtgcacgcgccgacgccgtgcatgtgggtggaccgtggacgtcgtcgatgtgccttctccgcttcccgtgcccgcaaaaccacccagccgtggaggacacgctgtctgtggccctgcagactgcagtgcacagacccgatccttccagctcgcgactccactccatttcatttccgatttctgtttaaaagagcccccgcagtgtcctgcactgtcttgttctaggcctagctagctagccctccagctcgcacacatgccatggcgctgtcgtggtcgcccgccgtcgtcgtcttcctcctcctcctgttgctcctccctgccccatggccccgcgcggccgcccaggccggccggtaccacgccgtgtcggtgtccagggcaggaggccagctgtccgcgcggctggagctcgccggcgccggcgccggcggccaaaagccggagctcgggcccgatgtccagaggctcagcctgaccgcgagccttgagacggacagccggttgcacgttcgcatcaccgacgcggatcaccggagatgggaggtccctcagagcgtcatcccccgcgaggcgccgcgggacgacgtgcccctggaagcgagcacgggagcctcgccgccgcacagccgcgtcctctccgcggcgacctccgacctggccttcaccctccacgcctccccgttccgcttcaccgtgtcccgccgctccagcggcgacgccctcttcgacacctccgcggcgctggtcttcaaggacaggtacctggagctgaccacggcgctgccgccggagggcggggcgtcgctgtacgggctaggcgagcacaccaagcgcacgttccggctgcagcgcaacgacacgttcacgatgtggaacgccgacatcccggccgccaacgcggacgtcaacctgtacggctcccacccgttctacctcgacgtgtacttcttcgccggcccctccccgctcgacgtcgtcgaccagtacacccagctcatcggccgtccggcccccatgccgtactggtctttcgggttccaccagtgcaggtacgggtacaagaacctggctgacctggagggcgtggtggccgggtacgccaaggccaggatcccgctagaggtgatgtggacggacatcgactacatggacgcgttcaaggacttcacgctggatccggtgaacttcccggccggcccgatgcggcagttcgtcgaccgcctccaccggaacggccagaaatacgtcgtcattatagacccagggatcagcgtgaacgagacatacgggacgtacgtgcgagggatgcagcaggacgtgttcctgaagcggaacggcaccaactacctcggcaaggtgtggcccgggtacgtctacttcccggacttcctcaacccgcgcgccgccgagttctgggcgcgcgagatcgccctgttccggcggacgctccccgtcgacggcctctggatcgacatgaacgaggtctccaacttcgtcgacccggcgcccctcaacgcgctggacgacccgccgtaccgcatcaacaactccggcgtgcaccgccccatcaacaacaagaccacgccggcgtccgcggtgcactacggcggcgtgcgcgactacgacgcacacaacctctacggcttcctggaggcgcgagccacgcacggcgcgctgctcgccgacaccggccgccggcccttcgtgctcagccggtccacgttcgtggggtccggccggtacaccgcgcactggaccggagacaacgccgccacgtgggacgacctccgctactccatcaacaccatgctcagcttcggcctcttcggcatccccatggtcggcgctgacatctgcggcttcggcggcaacacaaccgaggagctctgcagccgctggatccagcttggcgcgttctacccgttcgcaagggaccattcggcgatcggcacggtccggcgcgagctgtacctgtgggagctggtggcgcggtcggcgaggaaggcgctcgggctgcgctaccggctgcttccgtacatgtacacgctgatgtacgaggcgcacaccacgggagcgcccatcgcgcggccgctcttcttctcctaccccaaggacgaggccacgtatggcgtggaccggcagttcctgctggggcgcggcgtgctcgtgtcgccggtgctcgagcccggtgccaccaccgtcgaagcctacttcccggccgggcggtggttcagcctctttgaccacgaggtcgtcgtcgcctcggcgacgggcaagcacgtcaccctcccggggcccgcggacacggtcaacgtacacgtggccggcggcaacatcctgccgctacagctgccggagctgacgacgtcgcgcgcgcgccagaccgcgttccacctcctggtcgcgctcgccgaggacggatccgcatccggggagctgttcctcgacggcggcgacttgccggagatggccgggccgcggggcgagtggagtctggtgcggttcagctgcacgcaggggcgcgacggggttaagctcatgtcgcacgtggtgcacgacgcgtacgggccgagccggaagctggtcatcggcaaggtgatgttcctgggactgccctcgctggcgccaccgggagagttcgccgtgtatgtcaacggcgttaagatggccaactcgactggcgcgacgctagggtatcaaaggcgcggagcactcggcgccgctcaagtggaggggttgtcgctggtcgtcgtcgaggagttcgagctcaaggtggtcacgtcgtcataacgtgacactcaagctcgttctgaataaaatctgatcaaaagtctaaatttaaattggaaataaaggaattgtgagtgcaatatagcaaaaaatgtgcaatgagattcgtgtcctctacccggattgagccctaacgcgcataatgaacatccggcccaaatatggaggcctaaatcaatgattgcaaattgggcttgcaaaaggctttatggcttggcacgtcatcggaaggaaacagtttagtccacgatggagactttttaatgtgttaacccttcttctatactaggagtacacttaaagcatcagtttcaacggtc

SEQ ID NO: 9409 - DNA, 670 bp, Zea Mays
tataaatgttgtttttctgtgtgctgtcgtgcaaggtgccctgaataaaattagaatcaaaccaaaattggtctggtttgcaatccgtactagccaatatttgtgacaaattgggagagggcgagcagaggctcttctgttagcagcctatgggaaaggccttgtgctgccatcggggaagttcagcaaaacctcagtttgatgtctatggtgattgcagattgacttgccatttttttgggggtaaacagaggctcttctgttagcagcctatgggaaaggccttgtacgatgcctatggtgattgccgactgacttaccatttcctgtattgatggtactgcaaattttcatttcgcttaggaggccccaatcaagacattaaggttgaatctgctgtaagtttgcaaaccgtaatagagatcatagctaacccatcatttttcgtggaatgcattacagcattagacatttcccattgtgtccttagtgtggcaggctacctagatgaaatctggatgttgtaaacatgtaatgatggaaactggaatgaactggtcgtcttttcggtgaaagtggactcgtttgctcattttgctacactgacatggttgggttggcagtgttgtgttttaaggtgtttggtttgaagaatgagttagtccatcat

SEQ ID NO: 9410 - DNA, 3686 bp, Zea Mays
gtccgtccacgtccatccatccccattccattccccggtcaaacaaactgcccagaggaaagttgtagcgcctttcctttcctgcaagtccagcgtcggtttgataagataatgcgggcggggcggagaacggcagttcccacgctgcccagtgcaaagatgtgttgttcgttgctgactgactgacccgagccgccgagcgggagtcgttggggggccccgcccgggcctgcaccagcaccgccggttgcggttgctggttggctggccacgaccgccgctagtgccagtggaggggttgcatttcttctctctgacccagcctgcctctcgttggaccggtcgtcgtcgaggccactccgttcactccactccacccaggggtgggtcgggaattgaattccccgccgtctctacgcctgctgccgcgggtggaaaatatctatctgcaccgggacggactagtcgcccgcgcgcaaggtgctcgacggattgctgctacaccgggcaggcatggcggcgggccggggcgactgggaggacatggtgcgccggatgttcccgccggggaccaccatcccggagccgctgcccgacatggactactccttcgcgctgacgtacaacgggccggacgtgtcgtacgagctcccgcggatccagcccgtctgcgtccccgccatacccaccgccgagccggcctcggggcccctggggctcggcagcggcgtcgtgcccgtcgcgcccgtcgtcggccctgctgcggcccgtgcccgtgccaacccgccggcagcgtcccgggctggtgctgctgatcgccgtgccgcgaggatgacgccgtcggattcctccgatgacgaggaggacgacgccggcagctccggctcccgctccacgaaggcctcgaggcctgcagtgccggaggggaggcgacctcaggtggtcacgttcggggtgccggaggaggacagcggcggcaggtacgagagcagcgagatggacggcggacacgacgcggcgtccgccgagcagcacgtcgcggtgacgaggccggccgagaggaaagggcggacctgctgccgccgctgcgggaagagcaagtgggagagcaaggagtcgtgcatcgtctgcgacgcgcgctactgcggccactgcctgctccgcgccatgggctccatgcccgagggccgcaagtgtgtcacctgcattggccagcccatcgacgaggccaagcgctccaggctcgggaagggctctaggatactgtctcgcctgctcggccccctggaggtcaggcagatcctcaaggtcgagaaggagtgccaggcgaaccagctccggcctgagcagctcctggtcaatggtttccctcttgacgacgaggagatgaccgatttgcttagctgccaacgacctcctgggaacctcaagcctggaagatattggtatgataaggagtcaggattgtggggaaaggaaggtgaaaagccagacagcatcattagcactaacctcaactttaacggaaagcttcagcctgatgctagtaacggcaccgctcaggttttcattaacgggcgggaaattacaaagattgaactgagaattctaaagattgcaaaagtccaatgcccccgtgatactcacttctgggtttaccatgatggtggctacgaggaagaaggacaaaacaatatcaaagggaaaatatgggagtcacctttgacacgttttgcgtgcgccttggtttcactaccggtgcctcctacaaactttgatgcgacaaaagatgaagccccttattcatcaaaaactgtacctgactacttagatcataaaagaatacaaaagcttcttattcttggatctcctggagctggaacaagcaccatatttaagcaggctaagttgttatacggcaatagatttactgatgaggaacttgagaatatcaaactaatgatccaaagcaacatgtttaagtacctggggattctgcttgagggccgggagcgctttgaggaagaggctttggctgtaccaaatcacccaagctcagtgggcgatgatcctcagcaagatgaaagtaaatcttcaagttccaattcttgcatctactcgataaatgcaaaactgaagaagttttccgattggctcctggacatcatagcgacaggagacctagatacattcttccctgcagctacccgtgaatatgctccagttgttgatgagttgtggaaagatcctgccattcaagcaacatacaaaagaaaggatgaattgcattttctccctgatgctgctgagtacttcttgagcagggtataagccaaagcagttgacttgaactaatatggtccattccattgctgataagctgcgattaagtacagagttacccttgattgatcctgttgacgacttgcattttcactgattctgctagatcagcactccatattatgacttactctactcgtgcatccttctacccattagtaatttcgttagatttttggggaaatggaattgatggtccgcaggtttttaatcatttaaggaactttaagtttccagatttttctggccttctctcatctgcaaacaatgatcttcggctccatactgactagatgtgctgctacttattttcttttccctctctgattacctaaattgacctgtccattgtatgacaaatccatgcaggctgttgaagtatcaagtaacgaatacgaaccgtcagagaaagacgtgatatacgctgagggagtaacacaagggaacggattggccttcattgacttcaccttggatgaccggagccctatgtcagaatcctttggcgacaaccacgatgcgtaccctcaacaaccagtaaacaagtaccagctgattagagtgagcgccaagggcatgaacgagggctgcaagtgggtggagatgtttgaggatgttagcatggtgatcttctctgtagcgctcagcgactacgaccagctcggagccccagcgagcggcagtagcaggacactcgtgaataagatgatccaaagcagggacctgtttgaggctacaatcaggcagccgtgcttccgtgacacgccgttcctgcttttgctgaacaagtacgacgcgttcgaggagaagatcgggcggtccccgctgtcgtcgtgcgagtggttcggcgacttctgcccgctgcggacgcaccacaacagccagtcgctggcgcagcaggcgttctactacgtggccatcaagttcaaggacctgtacgcggcgagcacggggcggaagctgttcgtgtggcagacgcgcgcccgcgaccggcccaccgttgacgaggccttccgctacgtccgggaggtcctccggtgggaggacgagcgtggcgtcgccgggtactgccccgacgagtccttctacagcaccacggagctcagctcgtcccgcctcatcgccgctgcacagtgactgtcgcagcgttgttttgtgtataatgatcgtatgcttgcttgtttcccgaacaaatcaaatgctatcaaatatagtgatctgagtgatgagcagaaaactcgtactgtccttttggtgtccatgctgccgatgttcccttctcttctgattcggagcatatccggtgagcatgggcttacggtgttgtgcacatcaaatccgag

SEQ ID NO: 9411 - DNA, 2023 bp, Zea Mays
ccccgcccccgccagtccgtcaccatcgcgcggcgccaccaactacgcccgagcccccgcctccacaccccgtccccacgcgcggcgcagcggagctatcagcgcccttccccaggccggcttcaacgctgatggagccatcctcgcctcgaatcctcgctgcagttttcgttccaaagttctcgccccgaatcctcgcccttccccaccgcaccttcggtgtctccaccacaatcaccgcggtggcttcaccgtgtccccgcaatcaccgtggcggccagatccactacctcgccttcctgccgggcgacgtcctcttcatcgcgcaccacctcgccacgctcttcgtcttcctgacctgctgccacctcgtccgccacagcgcctacgctctcctcgtcctcgccgaggtcaccagcctgctgcagaacgctggacgctcgccgggatctagcgggaccagtcccccgccgcggcccgcgtctacagcgccctctcgccgtccttctacgcgctctacacgctcgtcaggggcgtcgccggcccgctcttcctcctcaagatggccgccttctacctgtccagccaggccgtcgacgccatcccgtggtgggtgcggatctcctggatcctggttgtcggcaccgccattgcggtcagcaacctgtggatttggaacctctggaaggagctcatcagggaatggaagcagcaggcccctcccaagtcaaagaaagacacataggccgccacctccaagccgagtgccgagaagtagaaggacaagatctacatcctcatgccggtcatggccagttgcccaccccggcgcctacgctcgagaagccacccatcttggccgcttcggtgcgaggaggcgctaccgtcctcttcctccgatccacctctcctgccaacccgccaggttgccgctgccgagagcgagcggaggcctccctccgccgacgggggaggaagatgctcaccaagttcgaaaccaagagcaaccgggtcaagggcctcaccttccactcgctcagcccatggatcctgtctagcctccacagcggcgtatccagatgtgggactaccgcgtgggcaccctcctcatccgcttcgaggagcacaacgggcccgtcaggggcatccagttctaggtcacgtagctgctcttcgtgtccagagtttagggggcagtcgttatgcgtctgtagtgtcagtgatcagcttggcctccatcttttgtgtcgtgctgtcggcagttgttctgaatggtttatgatttggattatattggatgtgtctcttcatctagaattgctggttgctgagaatttgaaggcgacaaacttaaatgggacatctgatccgtatgcattgatcacttgtggtgcagaggagagtttcaggttggggacctcagggattctcccacgcgattccgacggcctccttcctctcgcgcggctgcaggcctcctccccccacctccacctgaatccacaacacgtgagaaaaagcgacgatgacgaagaacaacgtggttgacatcgggcggcctctcgattggtggtcgtgctcggatccgcacctcgatggggccaccctatccctcaccgccccatcgcgtcggattgagttcccttggacgggcgacagtgttatggcctgtaaataaactacattgtcatgttagttagagggaagtgggtctacatactgcttagctagattaattgtgatagtaaggtgtattttgctgctttgtcaacaatttcaatttagacacttgttttttgggatgagctgctaaaaacgagctgaaggctgctactgcagaaagtgttgtggtcatgcttgtacaaagaatatttgtaaacaatgcttccgataccgtttccttagatggagcgcataaacctgctcctgtatggctgagtacattggttgttgtctaaactgtaattcttactgaagtactgtataatcttcttttgaatgtattaagtgtactgggagccag

SEQ ID NO: 9412 - DNA, 1495 bp, Zea Mays
atggccaatccatccgaggctcccgtgacgctgacgccgtcgtcgtctgcatcacccgtacccctgccacgccgacgccgacgtcgcaaacacagagcagattgccgcagtccgtcggcagtcgtcaaactcgagaagatgcacgttcccacgtcacctcctccatggctccatttgatctacgagtacagcactccgactcgtaactctgggaccactcgtcagacaccggtgcgggagaccgcaccgaggacaaaaaggtcaaaaggcaacgaggcgcccccaccccccgcaaccactgtaccggggtatagcccaagccggagcactatgcttccggggggcggcggcgaggaatggaagcgacgcggcgcccccgccggcgaggacgccgccgacgccgacgccgacgctgccacctcggcgtcggcggcgtcgctgaacgacctctgcgccaccgccgcggcgggggcgcccgcgccgttcccgacggcggctgcgtgggcggtcgccgcgctgctcgcggtgggcctcggggtcggcgccctcgtcctcgccgtcgtgcgcagcccggcgctgctcgtggtggcggtcctcctcgcggcgtccgtggcggcgttcctcctgtggaatgccgcggccgcggcgtcgggccacgcgctgcgccggttcgtggacgggctccaggcctccagcctccgcgttgcggccgatggccagctcgtcaagatcaccggatttgtttcatgcggcgacatttcactgatatcttcatacgagaaggttgagaattgtgtatacacatctactattttgagaaaatgtgctagatggggttccatgacactaaatccttggaatcgatgttccaagtggaaattagcacatgccgaggtaggagggccttggtgaaagctgggcaccactcaaaggtcgtgccgctgatcgacgagaacctcctggtgacaacaagcaggggcaccgagttatcttccactctagagcactggctcgaagaaaggaacctttcttccgaagaagcccagattatccgtctagaggaagggtatatcagagaagggatgcggttgagcgtggttggagtgctgagcaagaagaacggggatgccgtgatacttcctccgctggagcctcaatcgacgggctttgtgttgctgtcgtgtctcctcccgtcatatttcgacgggatagtgctgagactggccgccgtgccgaactcgggcgtctcatgaagagccgctatgggtaggggagctcggtgagatgtaacagctaacaacaactcttgtgcggtgcccttgcccccttgggatctttttcctgtacgggtccacctttttcttttttgtttgcttctgggactcgatcgtgtatgtggttttcttttcaggtaatcctaatgtacattctcactatatcatagttgtagtgcgaggcatttcagcgctcttgcctggctcccttctatctgaaa

SEQ ID NO: 9413 - DNA, 5185 bp, Zea Mays
aagcgagatccctgacacgtcaccagcaaaaaaaaatctttgtttcatcgtcagtgaggaggaacatgagagaggagagaacgggtggcgcgatgcgacgtcggctgtcgtgctcgtgaccgcaacctcctaccgcgatcccgatctgccgctccgtccgtccggccggcaagtccccgcctccgcctccgcgcctgactgtcccctccccaccatttcattccaattgagagccgtggggaccaatcaaccctagatccacctcgtccctccacgcgacaggagaggtatctccctgatccaactccgcatggcctcctcctccttcgcccccgacgaccagaccgacgccgacttcttcgacaagctcgtcgacgacgacgacccggccaccgacttgcctcgggccgtctccgccaccagcgtcgccgacgacccaccacccgtcctggagccgcaggttccggcgccggcgccttcggaggggtcaggcaagggcggcgccggcgtccacaccgcggtcaagcaggtgcagtgggcctccttcggaggtggcgtggacgacggccctgatccgttcgctgatctctcgggaggcgccggtgacgacgacggcttcctcgggaacacggcggggacccaggcggccttggatcacgccgccgaggtgacggatcaggacttcttcgctgggagcagctcctccgatcagcagaatgtccatggtcagcacgaccagggcagaggcagcgccgcggtggattccgcagatcccaaatctctggaggccatgtaccctgggtggaagtacgacgaggcctcacagcaatggtaccagcttgatggcagtgtaaattcaactgggaatgcagctcaggcgctggacgatagcgctcagaatgcacatcatcatcagcagcagctcgacgcggcttacctgcacaattcagcgcacgcggggcttgggacaattgccgaggagagcactaccgcagctggtgctgccaatagttggggccaaggggctgccccggagtacccacccagcatgctcttctatgcagagtatcctggttggtactttgacaccaacactcagcagtggcactcccttgagtcgtaccagcaggccgccgtgcaggctggaacatctagcacgggtcagactgttgttgcaagcgatgatgttgttgcgacttcctctctgacaggccataatgccgggcaaactgaggaccttgttgcccacaatcaggtgacacaacgcaactcatcctcgaatagtttcacccatcagaaccaatggcagaccaccgatgcacttggtaacaatgtacaatctgaaagcctggctagtagcttctatggttttgaacaacacatgaatgctgagactaccagttcctctacgagccaacagactggttttcacacagctgaaacaattacagatcactatggtggacgcaaagccttcgaatcatcaagtcttcagagtggttatagctcctctgacagtcaacaatccagtcacaaggcattcgaaccttccacgggttatcaggctggttacaacgggtttgaacctgcttcaggtcaccacacggcgtttgaacctgccatgcataaccagagtggatacaaggcatttgacccttctacgggtcaccatagtgcttcgtggggattcatgccttccacgggtcagcagactgatttcaagggttccagagcttccacagttcaccaggccggttatgaagagtttgaaatttctagaggttacaatacaaatttcaaggcatttgaatcatcttcatctcaaaatgctggttacaatggttcccagccttcttcaggtcaccaacctaactacatgggatttgacacctctgcaaaccaccatggttatactgatgtcaatggtgttgcgagtactcaaggctttgtcccaatgcaaaccacgtaccagggccagaaacaagcaaatgcaacctcacaagggcacctgtcaaatagctatttgggtactgacaactccatgaactttaatcagcaacaatttctgggtgcaaatgcctcaaatttgcaattcggtcactccccgcatgaaggtaggtcatcggctggacgaccaccacatgccctcgttgcttttgggtttggagggaagctcatagttatgaaagaaactacctccatgcctgcaagttttaacagtggaaatcagggtaactctagtagcacagtgtcggttcttaatctgttggaggtagtctttgataaagttgatccttcaagtgtcactaatggtagtgcacttagttatttccatgctctatgccgtcaacctgttcctggccctctggttggtggaagtgctgcatcaaaggatgtaaataagtggcttgatgaaatgattgcacggtacgagtcttcctctagtgaattccatagaggtgatactcgcaagttgcttatttcattgctgaagatactgtctcagcactatggaaaactgcgttcaccttttgcgtctgacccatcgcaagaggagacagatggtccagaaatggcagtaactaagctattttcatcgtgtaagagaagcactgttcatatgggagattatggatccctagttccctgcatgaaaagtattccttcagaaagtcagatgcaggctgttgcacaagaggtccaaagtcttctagtttctgggagaagaaaagaggcccttcactgtgcacaggcaggtcaactttggggacctgcaatcatactggcattgcagcttggtgataagttttatgtggatacagtgaagaaaatggcccacttccattttgtatctgggtcccctctgcgaacgctatgccttctcatcgctggacaacctgcagatgtttttaatgtagagaacaatgtcaacagtgactatggtgcatcccatcaacctgtggagcctggtcctaatatgttggatgattgggaggagaatttggctattattactgcaaacagaacagaaggtgacgttctagtaatcacccatcttggtgattgcctctggaaagaaaaaaatgaggttgcagctgcccattcatgctatttagttgctgaactaaacattgattcatactcggaaagtgcaaggttatgcctcattggtgcagaccatttgaagtgtcctcgaacatttgccagccctgaagccattcagaggacagaggtttatgaatatgcgaaggtgcttggtaattctcaatatatcctactatcctttcagccatataagctgatatatgcatacatgcttgtggaagtggggaaagtttctgattctttgaggtattgccaagcgtctataaaggtactgaaagcctctggtcgtgcccctgaattggaggtgtggaaacaattattttcttcgctggaggagaggatacgcactcaccagcagggtggatatggcacaaatcttgccccaggaaaaatagttgggaagatttttacctcgcttgataaatctatatcccgcatgatggtcaatgactgagatagcagaggatagtggtggcactggcaggaaaattgcacacaacagaagtgtttctgagccggactttggtagatcatccaaacagggtgctggtggatcagatggtacacagagcagtgcatcaggatccagcagttctcgatttggttggctagtgcagaagactatgggattagtgtcaaaatcccaccgccaggcaaaattaggggatcagaacaaattttactatgatgaaaaattgaagcggtgggtggaggaaggtgctgctgttcctgccgaagagcctcctcttcctccacctccaacaaaaccatctttccagaatggtatgctagacaataagttgaatggccccatgagcgtaagccatgctcccaatggagtcacagaatggaaatcctcaaattcttcagagcaaggtctgggtatgccgccaattccacctagccaaaaccagttttctgctcgtggacggatgggtgtccggtccagatatgttgacacattcaatagatcaggtgcatctggtgcaatgccatcatataacaaaccagctgctccatctatgacaccaccagctggtgccaagttcttcatgccaactgcagcacctgttgccgcggatcagatgataccacaccaagcagcagagatacacagtgaaaccatccatcaggatgagcggtcagcctcaccgccagcagaaacatcattttcttcaaccccaccacccacgcaatttccatcaccagtgcaatcaacaatttatcggcaatctagtatggagaacatctccaccccttaccagggttccggggtatcgtcattaagcaacgacagctcattctcaaaatctcgagccgcgtcctggagtgggacatactctgagcagtttaatgcttttgcgggcactatatcgcctgacagacagacgacgcattcaccactgatgcctggcaaaccaccacacagccgttccaacagcaactcatcagggcatctcaatggattggcagaggatcttcatgaggtcgagctgtaactggcgactggtcagcatgaccgtcgcaactcgtgtcttaaaggcagcgatgacaacccctccccaagcaggtgacagaaaagaaggtgcccttaaaatgctgaccacggggatgccgcagctggaatgggcttggtgtgactttgcacgagattctggggcgcgctctaaaccaccgaggtgggaagggaagagaagcagcatgcagatgcccttgtacagataatctgcccctacccagtttgtttaaaacgcaaacaacgccattttggttttagttccctggagaaggatagaggagaaggtgtgtgtctttgtagtgtgagaagcatggctctgtagtgttgttgttatagtgtactactactgtgctagccagccgcatacacagactgtttattctttggagacgaatcaattctttcatcttgactagggcattattatttgttaacataatgctgcatcttgttatgtacgtaaaagtcaagagaaggtacaaattaagccatatgttatgtactagtaaacaatgatacaggatgcagatgcttatcgattgatacgttgatgtagcaaga

SEQ ID NO: 9414 - DNA, 952 bp, Zea Mays
atagagtgccctcaaccatataacttttcccgaccaccgccgttcctctcttctccaaatccaaattggtaaatttcccaaatccggtgcccccacaccggcatcctcacctcgtcagcgccgccggccttccttccattctccatccccgctcagtcggataggcgccggttggggaaaattctgttcggactgttcatcttgcatgtctcattatcacagcgccgattttgaagagatggaggatgagtacgacatgaacgagccagtcgatgacatggagggggaggatgagtaccaagagctcgtgattagggactctgatgcggaggatgaagacgatgcggaccaattgcataagctctccgacacttcagcagcagatgcaagaagtgggaaagatattcaaggaataccctgggagacgatagaagtcacaagagaaacgtacaggcaggcccgactagagcagtacaagaactacgagaacatacctaattctggagtagcagcaatgatggcatgcaaatcaaccgagaaaggaagaacatattatgaattcagacgaaatactagatctgtgaaatccactatctctcactttcagctgagaaatttagtatgggcaacatcgaagcatgatgtctacctgttattgcattactctgtacttcactggtcggccttaaatggtgtggatacagaaattatggatgtacatggacatgttgcaccgagtgagaagcacccaggaagcttattagaaggttttttgcatactcaaattagtaccatggcagtgaaggataatttgttagtagctggtggttttcaaggagagctaatatgcaaacacctagatcgagaaggaataagcttttgctgcaggacaacatatgatgataatgcaattaccaatgcattggagatattcaatacatctaggcaagtg

SEQ ID NO: 9415 - DNA, 1372 bp, Zea Mays
agaaaaatggttctttcttagtgtgacacggacacacttgctcgtccacatcccttcctccagccaccgacctcccaaggatgcgctcttgccgccggcctcccaaggatgcgctcttgccgcccctcttctcgcgccgccgctgccatcgccatgtcgaagcgcgctacgtacgctccgtcctccattcgctcccgacgatccgactcgttcgtttgttgctcctttcgcttactgccagacctagccggcttctgcgttgaaatggatgaactgccgcggtctcatacattttctgggatccagaaatttcggacattgtgatcttctcggccccccaggacttcagccttgattttcgagccctggtgcttgagtacatgtccaatggaagcttggagatgctcttgcactctgaagacagaagtcacatggggttccaattccatacaaggatggacaccatgctagacgtgtctatggcaatggaatatctgcaccatgagcatcacgaggtggttctgcactgtgacttgaagccaagcaatgtgctgttcgatgatgatatgacagcacacgtagcagactttggcatcgcaaagttgctactgggtgatgacaactccatggtcgtttccaccatgcctggaacacttggatacatggcaccagagtatggatctcttggaaaggcatcgcgcaagagtgatgtgttcagctttggaatcatgctttttgaagtcttcactgggaagaggcccacagatacgatgtttgagggagaactgagcattaggcagtgggttcaacaagcatttccatctcagcttgacactgtcgtggacagccagctgctgcaggatgccatttcttcttcagccaacctgaacgaggttttgcccctaatatttgagctcggtttgctctgcacgactgattcacctaaccaaaggatgtcaatgagtgatgtagtagtgaccctgaagaagatcaaaatgaactacaccaaatttggcatcagcaaggacacaatgtccttccctgcaattgatcacgcttaattctacatgtctagtttcttcggttctgcagtggaacaactgcatcagctaccttttactgtatttttttttttacaaaagttgtttcttggataactcttagtaatatatgggcatattactattgtcaggtgtgaaataagtttctgtaatttaaattaaaagaaaaggttgcgtgacattcatgtgcctgaacagagatgtcataattttatagtttgatcttttgtggtccattacgacccttaaacgttaagggattgttttgttcttacatgttcctattttgtaaaattatttgtggcacactg

SEQ ID NO: 9416 - DNA, 3650 bp, Zea Mays
ccgcactcccactccactgtcatcaacctcgctccctctctggccctctctctaggagttcatcactctctctctctctctctctccctgtctcctaccgatgtctccagctccactactcaggctcgcctcactcctcttcctcttcctcgtccactcggccgccgccggcgacaccaggcgtgcgctgcacgagccgctcttccctatcgaatggaccccgccgccatccaccacggcgcctccagcaccgggattcgcctccgatccctccacacccgtcccacccgtctacaacggggggccggcgctactccccgctccgccgccaccgaacactgtcgccgcggacgcctcttcgtcccgcactggcccggccccgcggcgccacggcggcggcggcggcggaacgcccaaggcggccatcgtcgtcgcctctgcggccgcggcggccgtcctcgcgctgctcgccttcgccgccgcgtttctcctgacgggccgtctcgcgcggcaccccgcgtggacgcacaaacccaccggcctcgccgccgccgcgcaccccgggccagcctccgcggtcgtgctgcacgccgacgcggtgggcacctctgcggcggcggcggcggcctcgtcgtcgggtgcgactgccacttccacaccgcaccggaaagcccgctcggagcgcgccaggtggggcatgtgccgcgacgtcgacaccgtcccgagcccggaactcaggccgctcccgccgctccggcgcgcggggtcgtccgacgaggacgccgcgtactacacgccgggccagcgctcggcggggtccgcgggcggcgagggcgccgggaccgggacgtggagcgaggcgagcgcgtccagcccgcggaccaccaccccctcccgccgcagcctccccagcctcaccagcgatttcttcccaccgacgccggccgccgccgttccagctgcaagcgtggcgcctcctccgcccgcccctcctgtgccacgctcccgtcgcactctgccgcggactcgcttctccgcaggctccgcctcggatatgatcaaacaagtggtctcgccaccctccaacccaccaccacctcctccaccaccaccgccaagatgcaccaacgcagtcccaaaaccttctccaccaccaccggaaccatcctatacaccattgtcaacgcgccggcttcacaaactaaagcaaacagaggggccaggtgtcgctgttccgagcgcacccgtcatggcggtgaacaaggacaacgacggcatgccgattcggacgaacgatgatcctgccgctgccggcgacgaagcccgtcccaagctgaagccgctgcactgggacacggtccgggcgtcctccgaccgcgacatggtctgggaccggctcgagtccaactcattccagttggatgaggacatgatcgaggtgcttttcacgaacaatgctgcaaatgcgcctcctagggatacacttagaaagcctggagtgccgctatgcggtgcccaagagaaggtccttgatcctaagaaggcgcagaacatcgccatcctgctgcgcgcactgaacgtcactctggaagaggtcacggatgcgctgctagacggcaacgctgaatgcctgggggcggatctgttggaaaccttggcaaagatggctcctacaaaagaggaagagctcaaactccgcaacttcactggggatatatcgaagctcggttccgcggagcggtttctcagggcgctgcttgacatccctttctgcttcaaaagagtggacgccatgctctaccgggcgaatttcgacggcgaaattaactacctcaggaaatctttccagacactagagggagcctgcgacgatctaaaaggcagtagactgttcctgaagctactcgaagctgtcctgcaagccgggaaccgaatgaacgtcggcacgaaccgtgggcaggcaagagccttcaagctggacactctgctcaagctcgcggacgtcaaaggcgccgacggcaagaccaccctgctgcacttcgtcgtccaggagatggtccggtcggaggaggacgcgaggacgacgtccgagagagccgcagaggatgaggccagaaagatcgcgagagacgagacgttccgtagtaagcaagggctgaaggtagtgtccgggctgagcggcgagctcgggaacgtcaggaaggcagccgccatggacttcgacgtgcttcacggctacgtgtccaagctccaggccgggctcggcggggtcaggtcggtcctcgcgctcgagaagcagtgcgcccaattgcaagcccaaggccaccaccacaggtttttcgccaggatgcgtgggtttctcgaggaggctggggcggagatcggacgagtcaggcgcgacgaggagagggccctggggagagtgaaggagatcaccgtgtatttccacggtgacgctgccagggaggaggcgcaccctctgaggatcttcgtggtggtcagggacttcctgtccacgctggaccgtgtctgcagggagggatccgccacgaatcgcccatggcagacgcgctccatccgccccctttcatccatggcagctgctccatccgcgccctctttcttcccatcctccccctcaaagatctcgtccacctggtccccccgtaataggatctgggagcagggccaccaatgcagacgtccctcgtcgcggcgcagctgcggcctacgctcgacgtgcccgacctgctccgccacgctgacctggttatccgaggtcaaccgcatcgaggaggtcgagcagcccctcaagccggcgctcaccttcgcctcgccgtccgagagaaggttagagggggaaaaggagcaggccaaattcatcggtggcggtgtccgaacccacctcatgccgtccctcacaagtcacgagccttctctactgtggctacacgtccctcgcctagatcgagtggccagcagacgagaaaatggtggcgtcgagttggtggcgcgtgaggggtgctaccacttccggatccgaatctcaccatcccctccgctttcttgcctccagacgaattttggtgacattgagtttggcttctttcctcatgttgcacctaagactgtcgaacacattttcaaacttgtgcggcttggatgctacaacacaaatcacttcttccggtatgctgtatttgggagggtcactaaaggtgacgatacattgactaaactagagaggcttccaacccggagagaaggcatttttgtaatgccgatcgagcgtatcaacatcctatcaacttactattatgggcagcaacttgctatatgcattacaaaagtaaggctgaaaacttctgaggtgattagtcacactagggaaaacagttgtgtcaaattcgaaagaattctagactctagagtacgaactgaacccacttcaactacagtctccaagaggagaggagcttctttacttgattggagcttggtttctcttattaatatgatcatcttctttgctattcgatttgctgttccaagaagaggtatggtgagagtgatggttatccttctcagaaagggagagatcaagaaagatgagatataaattcatatgctaccagaacaagaaagatgag

SEQ ID NO: 9417 - DNA, 1775 bp, Zea Mays
ccccgcgcgcgtcttcctccggcatgcgccagcccccccgagctcgcccgcgcaccaatctcgccgtcgggtatcccgcccgcgagcccgcgcaccaagctccttccccgcgacaagctccctcccccgcgacgcgtcttcctcctcgccctagatcgccgccccagctctctcctcaccccgcaatccccgccgcccatgctccgctctctactcgccccagatcgtcgcccctgttcgcgtggattgggtaccggtcccaactatctccatggattgcgcgtccgcgacaacccaatctcctcccggtctccatggaaggcgcgtcctccccccgtgattctcgattccccgcgtccgcgccccagatccactctcctctctcccacaatccccacggactctgccccgtatcaccaccccggctccttagaacgtgatccactctcctctctcctgcaatccccgctacctcaacccagatcgccgccctcgctctcgatcctcgcccacgctctccatggaaggcgaggccgcgatgctcgcgtggatctatgtagaggctgcgacgctctcccaggaagactactgccagtgctccgtgctccatgcgccgcgctggaacgccaccgtgcggtccatgtcctcgtagtatcgcccagactcgcccatgtagtcccacctgcatccaccgaccaccaagcacactctcactgcagaccagagaggattgccacgaataggtgtgtgcagttctactctacccctgcatcgagccggtgtgcgtccaccagaggccggagttgaaggagagcacgtcggcgtcgcgccatgactcggcgttctcgtagatgtcgtccagcatcagcacctgcttcccctggaccacgtcgatgtccaccagaaggaaattcctgcttgagccaattacagaaggccctgatatttgtcaaattgatggttgtagtgttaaattggaatacaagaggagaattatactggcagagctcctgacggagcacctgacggagctcgccacaggtaccaaacggcgcagcagcagttgatgtgcaacccgagtgtactgccgctcgaggaggccagtaagtgccaacaacatgaatagccaaagcagggaaatagggctggcgggggcacatgggtaacttggtcctggagcattggagaaggagcataccacaaggaaaccaacacgattactgggttaacgaacaactcatactttgatggagcacatgaggttcgacattatgtcaggaagcattcgaatcttggtcgtattgtgcttgaagttgctaaggactcgcaaatcccccgccaagcaaactgctagaaatcttttcagaggtggagatgatgaagatgatagtgctgatgccgacacaaatgatcctgttgtaccttggtcattaggtagagtaggagttgggcatatggtgtacatctccggtttgacttgtgccttgagttcaacaaatatgaaagtgctgagagaggtggcatctagaggacgtcatgtcgaacgtgtgaagaatttttttagaaatatgtatatttgtgcgaaactttttagaaacttgactccattttattttctatgttactctcggctttgtttcctatcctttccaatgacttgctatgcatttgcactgtatttggcatgtttaaaactgctacacaaaacttgctatatattttgtccaaaaatactatatccttgttatgattgattgatctttattttgtctgct

SEQ ID NO: 9418 - DNA, 2312 bp, Zea Mays
ccacccccgcgcgcgtcttcctccggcatgcgccagcccccccgagctcgcccgcgcaccaatctcgccgtcgggtatcccgcccgcgagcccgcgcaccaagctccttccccgcgacaagctccctcccccgcgacgcgtcttcctcctcgccctagatcgccgccccagctctctcctcaccccgcaatccccgccgcccatgctccgctctctactcgccccagatcgtcgcccctgttcgcgtggattgggtaccggtcccaactatctccatggattgcgcgtccgcgacaacccaatctcctcccggtctccatggaaggcgcgtcctccccccgtgattctcgattccccgcgtccgcgccccagatccactctcctctctcccacaatccccacggactctgccccgtatcaccaccccggctccttagaacgtgatccactctcctctctcctgcaatccccgctacctcaacccagatcgccgccctcgctctcgatcctcgcccacgctctccatggaaggcgaggccgcgatgctcgcgtggatctatgtagaggctgcgacgctctcccaggaagactactgccagtgctccgtgctccatgcgccgcgctggaacgccaccgtgcggtccatgtcctcgtagtatcgcccagactcgcccatgtagtcccacctgcatccaccgaccaccaagcacactctcactgcagaccagagaggattgccacgaataggtgtgtgcagttctactctacccctgcatcgagccggtgtgcgtccaccagaggccggagttgaaggagagcacgtcggcgtcgcgccatgactcggcgttctcgtagatgtcgtccagcatcagcacctgcttcccctggaccacgtcgatgtccaccaggaacttgtacgtgtacaaagggtccacggagacgagctgcgtcggcgactgcagcgcggcggcgtgcagcaggcagacgagcgactcccactggttgcgccccagcgagtcgcccacgaacatcaccgtcttccccttcatccgtgtcaggaagaccgtggcacaacgcctgatgtcacgttgtcccagcggcgccgcggccggcgtcacgccacgcggatggtcacccacgccacgtccctagaccggtgtggtacgccggcgcccacagcgtcgatgaggaggaggtcggagcagcagtagctgtcatgggcagtgccgcagatgtggagcagtcgaatgagaggctagacgggctggagcaccacagcaggctggtgtcgctgttggccggtagccgctcctcccccaccggcaccgagagggacttgtgacccaaggatctgttcccgggggatgtggtgtttgcgctcgtcgatgatctcaggctcaaccactccaaggacccataggccatggggttatgcaatccaaagaaggaaattcctgcttgagccaattacagaaggccctgatatttgtcaaattgatggttgtagtgttaaattggaatacaagaggaggcaagtcaaatatggtaccaaacggcgcagcagcagttgatgtgcaacccgagtgtactgccgctcgaggaggccagtaagtgccaacaacatgaatagccaaagcagggaaatagggctggcgggggcacatgggtaacttggtcctggagcattggagaaggagcataccacaaggaaaccaacacgagttccttgcttcctgaaggcctcatagctcagattactgggttaacgaacaactcatactttgatggagcacatgaggttcgacattatgtcaggaagcattcgaatcttggtcgtattgtgcttgaagttgctaaggactcgcaaatcccccgccaagcaaactgctagaaatcttttcagaggtggagatgatgaagatgatagtgctgatgccgacacaaatgatcctgttgtaccttggtcattaggtagagtaggagttgggcatatggtgtacatctccggtttgacttgtgccttgagttcaacaaatatgaaagtgctgagagaggtggcatctagaggacgtcatgtcgaacgtgtgaagaatttttttagaaatatgtatatttgtgcgaaactttttagaaacttgactccattttattttctatgttactctcggctttgtttcctatcctttccaatgacttgctatgcatttgcactgtatttggcatgtttaaaactgctacacaaaacttgctatatattttgtccaaaaatactatatccttgttatgattgattgatctttattttgtctgct

SEQ ID NO: 9419 - DNA, 2789 bp, Zea Mays
gccatgcccccgtcgccccacccccgcgcgcgtcttcctccggcatgcgccagcccccccgagctcgcccgcgcaccaatctcgccgtcgggtatcccgcccgcgagcccgcgcaccaagctccttccccgcgacaagctccctcccccgcgacgcgtcttcctcctcgccctagatcgccgccccagctctctcctcaccccgcaatccccgccgcccatgctccgctctctactcgccccagatcgtcgcccctgttcgcgtggattgggtaccggtcccaactatctccatggattgcgcgtccgcgacaacccaatctcctcccggtctccatggaaggcgcgtcctccccccgtgattctcgattccccgcgtccgcgccccagatccactctcctctctcccacaatccccacggactctgccccgtatcaccaccccggctccttagaacgtgatccactctcctctctcctgcaatccccgctacctcaacccagatcgccgccctcgctctcgatcctcgcccacgctctccatggaaggcgaggccgcgatgctcgcgtggatctatgtagaggctgcgacgctctcccaggaagactactgccagtgctccgtgctccatgcgccgcgctggaacgccaccgtgcggtccatgtcctcgtagtatcgcccagactcgcccatgtagtcccacctgcatccaccgaccaccaagcacactctcactgcagaccagagaggattgccacgaataggtgtgtgcagttctactctacccctgcatcgagccggtgtgcgtccaccagaggccggagttgaaggagagcacgtcggcgtcgcgccatgactcggcgttctcgtagatgtcgtccagcatcagcacctgcttcccctggaccacgtcgatgtccaccagggtccacggagacgagctgcgtcggcgactgcagcgcggcggcgtgcagcaggcagacgagcgactcccactggttgcgccccagcgagtcgcccacgaacatcaccgtcttccccttcatccgtgtcaggaagaccgtggcacaacgcctgatgtcacgttgtcccagcggcgccgcggccggcgtcacgccacgcggatggtcacccacgccacgtccctagaccggtgtggtacgccggcgcccacagcgtcgatgaggaggaggtcggagcagcagtagctgtcatgggcagtgccgcagatgtggagcagtcgaatgagaggctagacgggctggagcaccacagcaggctggtgtcgctgttggccggtagccgctcctcccccaccggcaccgagagggacttgtgacccaaggatctgttcccgggggatgtggtgtttgcgctcgtcgatgatctcaggctcaaccactccaaggacccataggccatggggttatgcaatccaaaggtctccatcgccaatttcattttgtagacaaataagttagctcttctgatggcataccatttatagattgccaacgatctgaaggcatatatgaaggcttgttatctcttctgtgtttaattgatcagtgactttgatttggacctggttatcagcttgttatttctatctgaattttctcgctttatttgtactacactcgtgctaattatgtgagaatgatttgtgtcactatggtgttcatctgttattttatactattatatgtattcatctgtcatgttgttgaactcctgttatcaattgcagaaggaaattcctgcttgagccaattacagaaggccctgatatttgtcaaattgatggttgtagtgttaaattggaatacaagaggaggcaagtcaaatatggtttgtgtgacagcacgttactaacttactctactatatctgcatgagaaaggatgaaccctgtttgcatgtatactaattaatctacggattcattaatgtgtgaataagattttatttaattatgacagcaaacgtgacatgccattacaatttcgtttatgcaaaaaagtaccaaacggcgcagcagcagttgatgtgcaacccgagtgtactgccgctcgaggaggccagtaagtgccaacaacatgaatagccaaagcagggaaatagggctggcgggggcacatgggtaacttggtcctggagcattggagaaggagcataccacaaggaaaccaacacgagttccttgcttcctgaaggcctcatagctcagattactgggttaacgaacaactcatactttgatggagcacatgaggttcgacattatgtcaggaagcattcgaatcttggtcgtattgtgcttgaagttgctaaggactcgcaaatcccccgccaagcaaactgctagaaatcttttcagaggtggagatgatgaagatgatagtgctgatgccgacacaaatgatcctgttgtaccttggtcattaggtagagtaggagttgggcatatggtgtacatctccggtttgacttgtgccttgagttcaacaaatatgaaagtgctgagagaggtggcatctagaggacgtcatgtcgaacgtgtgaagaatttttttagaaatatgtatatttgtgcgaaactttttagaaacttgactccattttattttctatgttactctcggctttgtttcctatcctttccaatgacttgctatgcatttgcactgtatttggcatgtttaaaactgctacacaaaacttgctatatattttgtccaaaaatactatatccttgttatgattgattgatctttattttgtctgct

SEQ ID NO: 9420 - DNA, 3651 bp, Zea Mays
gtcgtgcagccgcaggacggcctcgagaaggacctccggtccgtcagcgacaagctcaccgccgagctgcagaagaagtacggcttctgcatggccgacgcgcaaaccgatttcaacctgacgttcgactacaccgccgacccgagcttcgcctccgactgcatggagcagacaagagggcaaatgactgcaatgttgtgtgggcaagctgaaatagagttatacatcgaaagcttggctaatgctagcagtcgcagtaatcccaggataagtccgaactgcaaccaaaactcatgggcactcgggtgccagcctggctgggcttgcatggtatcaggcaccgaaccatctgatggaccatcagctgaattggttccgcaaagagcagagagctgcaggccatgttgtccgggtttcttctgccctcggggcctgacatgcatgatgccttgtcctttgggtgcttattgtccacttgggacattgaacgacactactggactttgtgatccgtatttttaccaaattactccaggaaagagcactgcatgtggtgcagcagattcttgggctgatattgttacaactaatgatatcttctgccctccagggcactactgtccatccacaacccagaaatacaattgcagcagtgggcactattgccgcaaaggttccaccgatgaaaagaagtgcttttggaaaaacacttgcaaggataatgcgataaaagaaaatctgactttttatggcattatattaattgctatcttgggctttgttttgctactggtgtacaactgttctggcctattcatttcatttcaagtaaaaatgtcatccagatctcgtaaaaaggctgcaaaaagggcagataagtcagccgcagcacgtgaaagatggaaattggcaaaagaacttatactgcggcatgagatccaaaaaccatgaaaatctaactcaggttcccactgaagggttcgggcatgcttataatcaggcagatacggatagagctatgaagacaaacaatgataaattaacattctctggagtggtgtctctagctactgaaattaggccacgaaggccaacacttgaagtggctttcagaggtctaacgctatctattggaaaaaagaaacttctgcaatgtgttacaggaaaactttcaccaggtagggtcacagctataatgggcccttctggagcaggaaagactacttttctcaatgctgtattaggtaaaacgtctgggtacaagaaggatggggtagtccttataaatgggttacctggattaatgcagtcatataagaagataattggttttgtgcctcaagatgatattgtccatgggaacctgaccgtcgaggaaaatctgtggtttagttcatgttgcaggttaagcaaaggcatgtcaagatctcataaggttagaattcttgaacgggttattgagtcattagggcttaaagaaattagaaattctctcgttgggactgtggagaagcggggcatttctggaggacaaaggaaacgtgttaatgttgggattgaaatggttatggaaccatctcttctgatattagacgagccaactacaggtttagacagtgcttcctctcagctacttctaagggcacttcgacatgaagcacttgaaggtgtaaatgtttgtgcagtggttcaccaaccgagctatactttgttcaacatgtttgatgactttgtccttttggcaagaggtggccttattgcttatcatggacctatatatgaagttgaaacgtacttcgcaggtctggggatcaaggtgccagaccgtgagaatcctccagactatttcattgacattttagagggaatagtaaagacaaaaatgaggggaaatgtcacacctaaacacttgccactcctttggatgctacataatggttatgaagttccagatgatttgcagaaggaccttgagaacatcgatacaattcgtgagttatatactgttcggtccatttctagcgaacagtcttcagaagaacagtcagaaaatacagattctgtgcaccgtaatctgagtcaatcaaatgaattactggaaaggaaaacacctggtgtgtttgcacaatatgggtactatttggggagggtagcaaagcaaaggttgcgtgaagctacacagcaggccgttgattacctaatattgtgtattgctggtatatgcattggtacaattgctagagttcgagatgattcattcggtgtagcttcttatggatataccataatggcagtttcactgctatgccagcttgcgtcattgcggtcattttcacctgaaaaattgcaatattggagggagagagaatctggcatgagctctctagcttactttcttgcaagagatactgttgaccatttcaatactgccgttaagccaatcatatttctctcaacattttatttcttcaataacccacggtcgactcttagagacaattatttggttttactggccctaatttattgtgtaaccggcataggttactcttttgctatttggtttgagctcggattagcacagttgagctctgcaatagtacctgttgttctggtcctggtgggcactaaacctgaccttccgagggttataagggaattgtgctatccaaagtgggctctagaagcattcatcattgcaggagcaaaaaaatattcaggtgtgtggctcatcactagatgtggagcattgatccaaggggactatgatatcaacgattttaatctttgcatcaccattattatactctatggtgtgctcttccgtcttgttgcgtttcttagcatgttaaagttgaaatagatgatccagtgtcgtcacaacctgttcaagaacattgtctattctccaatttgtgaagtgtgtaatattgaagatgaaacttctgatcaaatcatcttccgctgtggttttgctgtggccttcttggaggcaattgttttttcatggcctactgatcaaccgatcagcgagttataccggacggagttccatccctgaggagcagtttggaactttcattgcattatgctgctggcagctttggaagcgttggaatggtatcgtctccaggaatgaaactcaatccctgcagcaggtcttagcagcttgtaaaattgaggctcaactttggcgtctcagaatgccagtagcctccagagccatagcagatctctggtgcaatttgtttaactatgtaatgcaactctgccaaagcaaagcctctctcctccacgccgacaaaacattttgtgccagctcaaatgtaatcaggcccttcaaattttgaaataaaataaatttgggggaacacatcctccggtgacatttcaaaaaaaagaagggtcttgtcatcttatggacaagagggatagcgtagagttttatcttactgtacacctttgattattttgtttgatatatatactacatgaaagaagactatctcatataggaagctgcactcgggagtagagcaaaacaaatatatactgaattttgtatctacaattgttgtccgtaatcccgtgagaatggaatgtaaaccaatattttcctaatgtatatggacacagttcttttatgggaac

SEQ ID NO: 9421 - DNA, 3698 bp, Zea Mays
cgcgccgccgccgatcgcgcaggtgatcgagggcgcgccgccgctgccggtcgtgcagccgcaggacggcctcgagaaggacctccggtccgtcagcgacaagctcaccgccgagctgcagaagaagtacggcttctgcatggccgacgcgcaaaccgatttcaacctgacgttcgactacaccgccgacccgagcttcgcctccgactgcatggagcagacaagagggcaaatgactgcaatgttgtgtgggcaagctgaaatagagttatacatcgaaagcttggctaatgctagcagtcgcagtaatcccaggataagtccgaactgcaaccaaaactcatgggcactcgggtgccagcctggctgggcttgcatggtatcaggcaccgaaccatctgatggaccatcagctgaattggttccgcaaagagcagagagctgcaggccatgttgtccgggtttcttctgccctcggggcctgacatgcatgatgccttgtcctttgggtgcttattgtccacttgggacattgaacgacactactggactttgtgatccgtatttttaccaaattactccaggaaagagcactgcatgtggtgcagcagattcttgggctgatattgttacaactaatgatatcttctgccctccagggcactactgtccatccacaacccagaaatacaattgcagcagtgggcactattgccgcaaaggttccaccgatgaaaagataacggcacatatatttgcagagtgcttttggaaaaacacttgcaaggataatgcgataaaagaaaatctgactttttatggcattatattaattgctatcttgggctttgttttgctactggtgtacaactgttctggcctattcatttcatttcaagtaaaaatgtcatccagatctcgtaaaaaggctgcaaaaagggcagataagtcagccgcagcacgtgaaagatggaaattggcaaaagaacttatactgcggcatgaggttcccactgaagggttcgggcatgcttataatcaggcagatacggatagagctatgaagacaaacaatgataaattaacattctctggagtggtgtctctagctactgaaattaggccacgaaggccaacacttgaagtggctttcagaggtctaacgctatctattggaaaaaagaaacttctgcaatgtgttacaggaaaactttcaccaggtagggtcacagctataatgggcccttctggagcaggaaagactacttttctcaatgctgtattaggtaaaacgtctgggtacaagaaggatggggtagtccttataaatgggttacctggattaatgcagtcatataagaagataattggttttgtgcctcaagatgatattgtccatgggaacctgaccgtcgaggaaaatctgtggtttagttcatgttgcaggttaagcaaaggcatgtcaagatctcataaggttagaattcttgaacgggttattgagtcattagggcttaaagaaattagaaattctctcgttgggactgtggagaagcggggcatttctggaggacaaaggaaacgtgttaatgttgggattgaaatggttatggaaccatctcttctgatattagacgagccaactacaggtttagacagtgcttcctctcagctacttctaagggcacttcgacatgaagcacttgaaggtgtaaatgtttgtgcagtggttcaccaaccgagctatactttgttcaacatgtttgatgactttgtccttttggcaagaggtggccttattgcttatcatggacctatatatgaagttgaaacgtacttcgcaggtctggggatcaaggtgccagaccgtgagaatcctccagactatttcattgacattttagagggaatagtaaagacaaaaatgaggggaaatgtcacacctaaacacttgccactcctttggatgctacataatggttatgaagttccagatgatttgcagaaggaccttgagaacatcgatacaattcgtgagttatatactgttcggtccatttctagcgaacagtcttcagaagaacagtcagaaaatacagattctgtgcaccgtaatctgagtcaatcaaatgaattactggaaaggaaaacacctggtgtgtttgcacaatatgggtactatttggggagggtagcaaagcaaaggttgcgtgaagctacacagcaggccgttgattacctaatattgtgtattgctggtatatgcattggtacaattgctagagttcgagatgattcattcggtgtagcttcttatggatataccataatggcagtttcactgctatgccagcttgcgtcattgcggtcattttcacctgaaaaattgcaatattggagggagagagaatctggcatgagctctctagcttactttcttgcaagagatactgttgaccatttcaatactgccgttaagccaatcatatttctctcaacattttatttcttcaataacccacggtcgactcttagagacaattatttggttttactggccctaatttattgtgtaaccggcataggttactcttttgctatttggtttgagctcggattagcacagttgagctctgcaatagtacctgttgttctggtcctggtgggcactaaacctgaccttccgagggttataagggaattgtgctatccaaagtgggctctagaagcattcatcattgcaggagcaaaaaaatattcaggtgtgtggctcatcactagatgtggagcattgatccaaggggactatgatatcaacgattttaatctttgcatcaccattattatactctatggtgtgctcttccgtcttgttgcgtttcttagcatgttaaagttgaaatagatggcaggatccagtgtcgtcacaacctgttcaagaacattgtctattctccaatttgtgaagtgtgtaatattgaagatgaaacttctgatcaaatcatcttccgctgtggttttgctgtggccttcttggaggcaattgttttttcatggcctactgatcaaccgatcagcgagttataccggacggagttccatccctgaggagcagtttggaactttcattgcattatgctgctggcagctttggaagcgttggaatggtatcgtctccaggaatgaaactcaatccctgcagcaggtcttagcagcttgtaaaattgaggctcaactttggcgtctcagaatgccagtagcctccagagccatagcagatctctggtgcaatttgtttaactatgtaatgcaactctgccaaagcaaagcctctctcctccacgccgacaaaacattttgtgccagctcaaatgtaatcaggcccttcaaattttgaaataaaataaatttgggggaacacatcctccggtgacatttcaaaaaaaagaagggtcttgtcatcttatggacaagagggatagcgtagagttttatcttactgtacacctttgattattttgtttgatatatatactacatgaaagaagactatctcatataggaagctgcactcgggagtagagcaaaacaaatatatactgaattttgtatctacaattgttgtccgtaatcccgtgagaatggaatgtaaaccaatattttcctaatgtatatggacacagttcttttatgggaac

SEQ ID NO: 9422 - DNA, 3815 bp, Zea Mays
cgccgcggttgactataacccgtcgtgtttccgtggtcaccgccgtctagcttcttaggtagctgccatgcgcgccgccgttgtcctcctcatctctgtcgtcgcgctgtcgctgctccgcccggcgcgatgccagctaccgccaggcggcgttgtcggccgcgcgccgccgccgatcgcgcaggtgatcgagggcgcgccgccgctgccggtcgtgcagccgcaggacggcctcgagaaggacctccggtccgtcagcgacaagctcaccgccgagctgcagaagaagcaaaccgatttcaacctgacgttcgactacaccgccgacccgagcttcgcctccgactgcatggagcagacaagagggcaaatgactgcaatgttgtgtgggcaagctgaaatagagttatacatcgaaagcttggctaatgctagcagtcgcagtaatcccaggataagtccgaactgcaaccaaaactcatgggcactcgggtgccagcctggctgggcttgcatggtatcaggcaccgaaccatctgatggaccatcagctgaattggttccgcaaagagcagagagctgcaggccatgttgtccgggtttcttctgccctcggggcctgacatgcatgatgccttgtcctttgggtgcttattgtccacttgggacattgaacgacactactggactttgtgatccgtatttttaccaaattactccaggaaagagcactgcatgtggtgcagcagattcttgggctgatattgttacaactaatgatatcttctgccctccagggcactactgtccatccacaacccagaaatacaattgcagcagtgggcactattgccgcaaaggttccaccgatgaaaagaagtgcttttggaaaaacacttgcaaggataatgcgataaaagaaaatctgactttttatggcattatattaattgctatcttgggctttgttttgctactggtgtacaactgttctggcctattcatttcatttcaagtaaaaatgtcatccagatctcgtaaaaaggctgcaaaaagggcagataagtcagccgcagcacgtgaaagatggaaattggcaaaagaacttatactgcggcatgaggttcccactgaagggttcgggcatgcttataatcaggcagatacggatagagctatgaagacaaacaatgataaattaacattctctggagtggtgtctctagctactgaaattaggccacgaaggccaacacttgaagtggctttcagaggtctaacgctatctattggaaaaaagaaacttctgcaatgtgttacaggaaaactttcaccaggtagggtcacagctataatgggcccttctggagcaggaaagactacttttctcaatgctgtattaggtaaaacgtctgggtacaagaaggatggggtagtccttataaatgggttacctggattaatgcagtcatataagaagataattggttttgtgcctcaagatgatattgtccatgggaacctgaccgtcgaggaaaatctgtggtttagttcatgttgcaggttaagcaaaggcatgtcaagatctcataaggttagaattcttgaacgggttattgagtcattagggcttaaagaaattagaaattctctcgttgggactgtggagaagcggggcatttctggaggacaaaggaaacgtgttaatgttgggattgaaatggttatggaaccatctcttctgatattagacgagccaactacaggtttagacagtgcttcctctcagctacttctaagggcacttcgacatgaagcacttgaaggtgtaaatgtttgtgcagtggttcaccaaccgagctatactttgttcaacatgtttgatgactttgtccttttggcaagaggtggccttattgcttatcatggacctatatatgaagttgaaacgtacttcgcaggtctggggatcaaggtgccagaccgtgagaatcctccagactatttcattgacattttagagggaatagtaaagacaaaaatgaggggaaatgtcacacctaaacacttgccactcctttggatgctacataatggttatgaagttccagatgatttgcagaaggaccttgagaacatcgatacaattcgtgagttatatactgttcggtccatttctagcgaacagtcttcagaagaacagtcagaaaatacagattctgtgcaccgtaatctgagtcaatcaaatgaattactggaaaggaaaacacctggtgtgtttgcacaatatgggtactatttggggagggtagcaaagcaaaggttgcgtgaagctacacagcaggccgttgattacctaatattgtgtattgctggtatatgcattggtacaattgctagagttcgagatgattcattcggtgtagcttcttatggatataccataatggcagtttcactgctatgccagcttgcgtcattgcggtcattttcacctgaaaaattgcaatattggagggagagagaatctggcatgagctctctagcttactttcttgcaagagatactgttgaccatttcaatactgccgttaagccaatcatatttctctcaacattttatttcttcaataacccacggtcgactcttagagacaattatttggttttactggccctaatttattgtgtaaccggcataggttactcttttgctatttggtttgagctcggattagcacagttgagctctgcaatagtacctgttgttctggtcctggtgggcactaaacctgaccttccgagggttataagggaattgtgctatccaaagtgggctctagaagcattcatcattgcaggagcaaaaaaatattcaggtgtgtggctcatcactagatgtggagcattgatccaaggggactatgatatcaacgattttaatctttgcatcaccattattatactctatggtgtgctcttccgtcttgttgcgtttcttagcatgttaaagttgaaatagatggcaggatccagtgtcgtcacaacctgttcaagaacattgtctattctccaatttgtgaagtgtgtaatattgaagatgaaacttctgatcaaatcatcttccgctgtggttttgctgtggccttcttggaggcaattgttttttcatggcctactgatcaaccgatcagcgagttataccggacggagttccatccctgaggagcagtttggaactttcattgcattatgctgctggcagctttggaagcgttggaatggtatcgtctccaggaatgaaactcaatccctgcagcaggtcttagcagcttgtaaaattgaggctcaactttggcgtctcagaatgccagtagcctccagagccatagcagatctctggtgcaatttgtttaactatgtaatgcaactctgccaaagcaaagcctctctcctccacgccgacaaaacattttgtgccagctcaaatgtaatcaggcccttcaaattttgaaataaaataaatttgggggaacacatcctccggtgacatttcaaaaaaaagaagggtcttgtcatcttatggacaagagggatagcgtagagttttatcttactgtacacctttgattattttgtttgatatatatactacatgaaagaagactatctcatataggaagctgcactcgggagtagagcaaaacaaatatatactgaattttgtatctacaattgttgtccgtaatcccgtgagaatggaatgtaaaccaatattttcctaatgtatatggacacagttcttttatgggaac

SEQ ID NO: 9423 - DNA, 6540 bp, Zea Mays
cccatccctcctcctgctcatcactgctgctctctggctgctccctctccctccatccccactgctgctctcttgccaaatctgatctagggtttcgttccatctccacgcgccgtcccagtacctatctactctagactactacagtatccaaaaggcaagcttatctgcggagggagtgagctgacgcattcccgtgctggcgagggacagccagacccagacggggagatccgatccgattccgtgctagctgctgcggagtgagtgaggtgacgcgggagcgggatggcggcgccggggcggaggacggcggacgtgtcctcgtcctcgcccgccccctcgccgtccccttccaccggtaggcgcctcctgcgcacgcagaccgtcggcaacctcggcgagtccatcttcgacagcgaggtcgtgccgtcctcgctcgtcgagatcgcacccatcctccgcgtcgccaacgaggtcgaggccaccaacccgcgcgtcgcctacctctgtcgcttctacgctttcgagaaggctcaccgcctcgacccgacatccagtggccgtggtgttcgtcagtttaagaccgcacttctgcagaggcttgagagggaaaatgatcccacgctcaagggaagggtccaccagagcgatgctcgggagatgcagcgcttctaccgcgaatactacaagaagtacatccaggcactgcagcatgctgctgataaggctgaccgagcactgctcactaaagcgtaccagacagctgctgtcttgtttgaggtcttgagggccgttaatgtctcgcagtccgttgaagtcgatcaagcgattttggatacacacaataaggttgaagaaaagaaaaagttgtacgtaccttataacattctcccgcttgatcctgaaagtactggtcaagccattatgcgatatccagagattcaagctgctgtttatgctcttcgcaatactagaggtctgccatggccaaaggaccaagacaagaagcctggcgagaagaatactgggaaagaccttctcgattggcttcaggctatgtttgggtttcagaaagacaacgtgtccaaccaaagggaacatttggtactgttgcttgcaaatgttcatataatgaaagtacccaaggttgaccaacaaccgaagttggatgacaaagctctggatgctgtaatgaagaagctgtttaagaattataagaagtggtgcaagtaccttggccgcaaaagcagcttatggttgccaaccatccagcaggaagtgcagcagcgtaagcttctttatatgggcctctacctgctgatttggggtgaggcggctaacttgagattcatgccagagtgtatttgttacatctaccatcatatggcttttgaactctacggcatgctggctggaaatgtgagcccaatgacgggtgaaaatgttaaaccagcatatggtggtgatgaagaagcctttttgattaaagttgtgactccaatatacaaagttatagagaaggaagctgaaaggagcaagaccatgaaatcaaagcactcccattggagaaactatgatgatctgaatgagtacttttggtcagttgattgtttccggctaggatggcctatgagagctgatgctgactttttcaaaactccaaaagatgcttatctgaatcttttgaatggagagaacagatctgcaggtaatacccattggatgggaaaagttaattttgtggagatacgttcattttggcacatattccgtagtttcgacagaatgtggatcttcttaatattgtccttacaggccatgataattattgcttggaatggtggaacaccaagtgatatttttgatgctggagtatttaagaaggttttgagcatatttattactgctgcaattttgaagttgggtcaagcaatcctagacctcatatttggttggaaagcaagaagaaacatgtcatttgcagtcaagctgcgatatatcttgaagttaatatgtgctgctgcatgggttgtgattttacctgtgacttacgcgtacacttgggagaatcctactggacttgcaagaacaataaaaagttggcttggtgatggtcagaatcagccatctttgtacatattggccatagtgatatatatggcaccaaacatagttgcttctatgctatttcttttcccatttatgagaagattcttagagagttcaaatgttaaggtcataacgatcataatgtggtggtctcagccccggttatttgttggcagagggatgcatgaaggtataccatgttctgggttcttcttttagcaacgaagctgactgtaagcttctatattgagatcaaacctctggtacagccaaccatagatataatgagggaacctatcaggactttccagtggcacgaatttttccctcatggaactaacaatattggtgttgttatatcactgtgggctccaataattctagtatatttcatggacacccaaatttggtatgcactgttctcgacattaattggtggtatctatggggcttatcgtcgtcttggtgagatacggacattaggaatgttgagatctcgctttgaatctttgcccgaggccttcaatgaacgcttgattccttctgatgcaaataagagtaaaggtcttcgtgctgccttttcaagtagacccaaggcttctggtgacgaaagacagaaagagaaaagagctgcaaggtttgctcaaatgtggaatgtcattattacaagtttccgtgaagaagacctcatagacaatagggagatggatctgctactggttccatactgtaaagaccgtgagctcgatatatttcaatggccacctttcttacttgctagcaagatcccaatagcactggatatggcagcagacagtggcggaaaagaccgtgatctgacgaagaggataaaatcagatccatacttttcctttgctatcagagaatgctatgcttcattcaagaacatcatcaatactttagtgtttggtcagcgggagaaagatgtcctagcacagattttcgcagttgtggatcagcatatagaagatgaaactctgataaaggatctcaatatgaggaaccttcctgcactgagcaagaagtttgttgaattacttgaattactgcaaaaaaacaaggaggaagacttgggtcaggtagtcattttgttccaagatatgcttgaggtggtcacaagggatataatggaggaacaggaccagctcggcacactgttggaatctgcacatggtgcaaatagtagaaaacatgaaggaattacaccgctagatcagcaagaccagttgtttgctaaagctattaagttccctgtggatgaatcaattgcatggactgaaaagataaagaggcttcatcttctgttaactgtgaaggagtctgctatggatgttcctactaatcttgatgctaggcggcggatatcattctttgcaaattctttatttatggatatgcccaatgctccaaaagttcggaacatgttggccttctctatcttgactccttattacaaggaagatgttctgttctcattacaaaatctagaagagccaaatgaggatggagtttccattcttttctacttacaaaaaatttacccagatgaatggaaaaatttcctcgaaagggttggctgcaagaatgaagagggactccgtgaagatgaagaactagaagagaagcttcgtctttgggcgtcgtatagggggcagacattaacaagaactgtaagagggatgatgtactatcgaaaagctttggagcttcaggcttttcttgatatggcggaagatgatgatcttatggaaggttacagagcaacagaagtaatgcccgaggactcgcaattaatgactcaatgcaaggctatagctgacatgaagtttacatatgttgtctcatgccaacaatatggaattcagaagcgttctaatgagccttgcgcacatgatattttgagactaatgacggaatatccatcacttcgggtcgcctatattgatgaagttgaagcgcctagccaagatagaaacaagaagattgaaaaggtttactactcagtgttggtgaaggcttctgttacaaaacctgatgagcctggtcagagccttgatcaggtcatctacaagataaagctaccaggagcactatatggaggaggctttgaaaatgagaaatctgctgcaagagtttgagaagaaacatggagtgagatatccatcgatacttggagtcagagaacacatatttacgggcagtgtgtcatcccttgcatggttcatgtcaaatcaggaaactagtttcgtaacaattggacaacgagtgcttgccaatccgttgagggttcgttttcattatggtcatcctgatatcttcgatcgccttttccacattacgaggggtggtgtgagtaaagcatccaaaattatcaatctcagtgaggacatatttgcaggattcaattccacattgcgtgaaggcaatgttactcaccacgagtacatgcaagttggcaagggaagggatgtgggtctcaatcaaatatctctgtttgaggcaaagatagcaaatggcaatggcgaacagacgctgagccgtgacatctaccggctgggtcatcgctttgatttcttcagaatgctatcttgctactatacaacaattggtttctacttcagtacaatgattacagtgtggactgtatatgttttcctctatgggcggttatatcttgtacttagtggacttgatgaagcgctggctactggaaggaggtttgtgcacaatgcacctctccaggttgcgcttgcatcggagtcttttgtgcagcttgggtttttgatggcgctacccatgatgatggaaatcggtttggagagaggattcagaacagcattgagtgacttcatactgatgcagcttcagttggcctcagttttcttcacgttctcattgggaacaaaaactcattactacggaaggacattactccatggaggagctgaatacagagccactggacgtgggtttgtggtgttccatgcgaaatttgctgacaactatcgactctattcccgtagccattttgtcaagggcattgagctgatgattctactagttgtgtatgaaatatttagccagccatatagaggggctgtaacttacatcttcatcaccgtgtccatgtggttcatggtgggcacttggctctttgcaccattcctgttcaatccttctggatttgagtggcagaagattgtggacgactggaccgattggcacaagtggatcagcaatcgtggaggtatcggtgtagcaccagagaaaagctgggagtcatggtgggaaaaggagcaagagccccttcgatactccgggaagcgcggtactgttgttgaaatactgcttgcgctgcgtttctttatctaccagtacggacttgtgtatcatctgaatataacgaagaagataactaaggacaaccagagtgtgctggtttattgcttctcatgggttgtaatttttgtgattttgctcgttatgaagaccgtatcagtgggcaggagaaggttcagtgcagagttccagctagtgttccggttgatcaagggtctgatatttataacatttacagccatcgtggtaatcctaatagcgatccctggcatgacggtgctggacatatttgtttgcatccttgctttcatgcccactggatggggtttgctgctgattgcccaagcgatccggcctgtgatccacaagactgggctctggggctcgatcaaggctcttgcccggggctacgagatcctgatgggacttctcctgttcacgcccatcgccttcctcgcctggttcccgttcgtgtcggaattccagaccaggatgctgttcaaccaggcgttcagcagaggtctgcagatctcccgtatcctgggaggacacaagaaagaccgagggacccggaacaaagaatagggctgggctgctgctgattcaaggtttgtgtgcgccactagtatttatgtgtgaatgggtgggtagcatatggctcgagagtatctcctgaatggagattgattgatcctgaagagtagaagagactcgagtgatgtaagatgctgcaggcttgttgctttgttacctaggcgttaggcagaacagatgttttcaggatctctggcctgttaaccacatcttcccctgttcagagtgaattaattcctaatggaaactgatttgtgaattacttcctaatagaggagtgcttccaaactgatttcatgtgtgtgctgtgatattgtttagcatatagtattttaaatgtagctttgaattttcattctttcgcaacaaaaaatgaataggacaagctggtcaaacttgaaaaaaaaagttaaacgggttataatttgggacggagggagtatgatttgagaacctcatcaaatagtcttgcca

SEQ ID NO: 9424 - DNA, 6710 bp, Zea Mays
ccgctttgtctctgcccacggtccaaccgaaggaaaaaaaagtttgaaaatcaaacacctttcattccccccatccctcctcctgctcatcactgctgctctctggctgctccctctccctccatccccactgctgctctcttgccaaatctgatctagggtttcgttccatctccacgcgccgtcccagtacctatctactctagactactacagtatccaaaaggcaagcttatctgcggagggagtgagctgacgcattcccgtgctggcgagggacagccagacccagacggggagatccgatccgattccgtgctagctgctgcggagtgagtgaggtgacgcgggagcgggatggcggcgccggggcggaggacggcggacgtgtcctcgtcctcgcccgccccctcgccgtccccttccaccggtaggcgcctcctgcgcacgcagaccgtcggcaacctcggcgagtccatcttcgacagcgaggtcgtgccgtcctcgctcgtcgagatcgcacccatcctccgcgtcgccaacgaggtcgaggccaccaacccgcgcgtcgcctacctctgtcgcttctacgctttcgagaaggctcaccgcctcgacccgacatccagtggccgtggtgttcgtcagtttaagaccgcacttctgcagaggcttgagagggaaaatgatcccacgctcaagggaagggtccaccagagcgatgctcgggagatgcagcgcttctaccgcgaatactacaagaagtacatccaggcactgcagcatgctgctgataaggctgaccgagcactgctcactaaagcgtaccagacagctgctgtcttgtttgaggtcttgagggccgttaatgtctcgcagtccgttgaagtcgatcaagcgattttggatacacacaataaggttgaagaaaagaaaaagttgtacgtaccttataacattctcccgcttgatcctgaaagtactggtcaagccattatgcgatatccagagattcaagctgctgtttatgctcttcgcaatactagaggtctgccatggccaaaggaccaagacaagaagcctggcgagaagaatactgggaaagaccttctcgattggcttcaggctatgtttgggtttcagaaagacaacgtgtccaaccaaagggaacatttggtactgttgcttgcaaatgttcatataatgaaagtacccaaggttgaccaacaaccgaagttggatgacaaagctctggatgctgtaatgaagaagctgtttaagaattataagaagtggtgcaagtaccttggccgcaaaagcagcttatggttgccaaccatccagcaggaagtgcagcagcgtaagcttctttatatgggcctctacctgctgatttggggtgaggcggctaacttgagattcatgccagagtgtatttgttacatctaccatcatatggcttttgaactctacggcatgctggctggaaatgtgagcccaatgacgggtgaaaatgttaaaccagcatatggtggtgatgaagaagcctttttgattaaagttgtgactccaatatacaaagttatagagaaggaagctgaaaggagcaagaccatgaaatcaaagcactcccattggagaaactatgatgatctgaatgagtacttttgttgattgtttccggctaggatggcctatgagagctgatgctgactttttcaaaactccaaaagatgcttatctgaatcttttgaatggaatctgcaggtaatacccattggatgggaaaagttaattttgtggagatacgttcattttggcacatattccgtagtttcgacagaatgtggatcttcttaatattgtccttacaggccatgataattattgcttggaatggtggaacaccaagtgatatttttgatgctggagtatttaagaaggttttgagcatatttattactgctgcaattttgaagttgggtcaagcaatcctagacctcatatttggttggaaagcaagaagaaacatgtcatttgcagtcaagctgcgatatatcttgaagttaatatgtgctgctgcatgggttgtgattttacctgtgacttacgcgtacacttgggagaatcctactggacttgcaagaacaataaaaagttggcttggtgatggtcagaatcagccatctttgtacatattggccatagtgatatatatggcaccaaacatagttgcttctatgctatttcttttcccatttatgagaagattcttagagagttcaaatgttaaggtcataacgatcataatgtggtggtctcagccccggttatttgttggcagagggatgcatgaaggtgcattctccctcttcaagtataccatgttctgggttcttcttttagcaacgaagctgactgtaagcttctatattgagatcaaacctctggtacagccaaccatagatataatgagggaacctatcaggactttccagtggcacgaatttttccctcatggaactaacaatattggtgttgttatatcactgtgggctccaataattctagtatatttcatggacacccaaatttggtatgcactgttctcgacattaattggtggtatctatggggcttatcgtcgtcttggtgagatacggacattaggaatgttgagatctcgctttgaatctttgcccgaggccttcaatgaacgcttgattccttctgatgcaaataagagtaaaggtcttcgtgctgccttttcaagtagacccaaggcttctggtgacgaaagacagaaagagaaaagagctgcaaggtttgctcaaatgtggaatgtcattattacaagtttccgtgaagaagacctcatagacaatagggagatggatctgctactggttccatactgtaaagaccgtgagctcgatatatttcaatggccacctttcttacttgctagcaagatcccaatagcactggatatggcagcagacagtggcggaaaagaccgtgatctgacgaagaggataaaatcagatccatacttttcctttgctatcagagaatgctatgcttcattcaagaacatcatcaatactttagtgtttggtcagcgggagaaagatgtcctagcacagattttcgcagttgtggatcagcatatagaagatgaaactctgataaaggatctcaatatgaggaaccttcctgcactgagcaagaagtttgttgaattacttgaattactgcaaaaaaacaaggaggaagacttgggtcaggtagtcattttgttccaagatatgcttgaggtggtcacaagggatataatggaggaacaggaccagctcggcacactgttggaatctgcacatggtgcaaatagtagaaaacatgaaggaattacaccgctagatcagcaagaccagttgtttgctaaagctattaagttccctgtggatgaatcaattgcatggactgaaaagataaagaggcttcatcttctgttaactgtgaaggagtctgctatggatgttcctactaatcttgatgctaggcggcggatatcattctttgcaaattctttatttatggatatgcccaatgctccaaaagttcggaacatgttggccttctctatcttgactccttattacaaggaagatgttctgttctcattacaaaatctagaagagccaaatgaggatggagtttccattcttttctacttacaaaaaatttacccagatgaatggaaaaatttcctcgaaagggttggctgcaagaatgaagagggactccgtgaagatgaagaactagaagagaagcttcgtctttgggcgtcgtatagggggcagacattaacaagaactgtaagagggatgatgtactatcgaaaagctttggagcttcaggcttttcttgatatggcggaagatgatgatcttatggaaggttacagagcaacagaagtaatgcccgaggactcgcaattaatgactcaatgcaaggctatagctgacatgaagtttacatatgttgtctcatgccaacaatatggaattcagaagcgttctaatgagccttgcgcacatgatattttgagactaatgacggaatatccatcacttcgggtcgcctatattgatgaagttgaagcgcctagccaagatagaaacaagaagattgaaaaggtttactactcagtgttggtgaaggcttctgttacaaaacctgatgagcctggtcagagccttgatcaggtcatctacaagataaagctaccaggtaatgccattttaggtgaaggaaagccagaaaatcagaaccatgcaataatattcaccagaggcgaatgcctccaaactatagatatgaatcaggagcactatatggaggaggctttgaaaatgagaaatctgctgcaagagtttgagaagaaacatggagtgagatatccatcgatacttggagtcagagaacacatatttacgggcagtgtgtcatcccttgcatggttcatgtcaaatcaggaaactagtttcgtaacaattggacaacgagtgcttgccaatccgttgagggttcgttttcattatggtcatcctgatatcttcgatcgccttttccacattacgaggggtggtgtgagtaaagcatccaaaattatcaatctcagtgaggacatatttgcaggattcaattccacattgcgtgaaggcaatgttactcaccacgagtacatgcaagttggcaagggaagggatgtgggtctcaatcaaatatctctgtttgaggcaaagatagcaaatggcaatggcgaacagacgctgagccgtgacatctaccggctgggtcatcgctttgatttcttcagaatgctatcttgctactatacaacaattggtttctacttcagtacaatgattacagtgtggactgtatatgttttcctctatgggcggttatatcttgtacttagtggacttgatgaagcgctggctactggaaggaggtttgtgcacaatgcacctctccaggttgcgcttgcatcggagtcttttgtgcagcttgggtttttgatggcgctacccatgatgatggaaatcggtttggagagaggattcagaacagcattgagtgacttcatactgatgcagcttcagttggcctcagttttcttcacgttctcattgggaacaaaaactcattactacggaaggacattactccatggaggagctgaatacagagccactggacgtgggtttgtggtgttccatgcgaaatttgctgacaactatcgactctattcccgtagccattttgtcaagggcattgagctgatgattctactagttgtgtatgaaatatttagccagccatatagaggggctgtaacttacatcttcatcaccgtgtccatgtggttcatggtgggcacttggctctttgcaccattcctgttcaatccttctggatttgagtggcagaagattgtggacgactggaccgattggcacaagtggatcagcaatcgtggaggtatcggtgtagcaccagagaaaagctgggagtcatggtgggaaaaggagcaagagccccttcgatactccgggaagcgcggtactgttgttgaaatactgcttgcgctgcgtttctttatctaccagtacggacttgtgtatcatctgaatataacgaagaagataactaaggacaaccagagtgtgctggtttattgcttctcatgggttgtaatttttgtgattttgctcgttatgaagaccgtatcagtgggcaggagaaggttcagtgcagagttccagctagtgttccggttgatcaagggtctgatatttataacatttacagccatcgtggtaatcctaatagcgatccctggcatgacggtgctggacatatttgtttgcatccttgctttcatgcccactggatggggtttgctgctgattgcccaagcgatccggcctgtgatccacaagactgggctctggggctcgatcaaggctcttgcccggggctacgagatcctgatgggacttctcctgttcacgcccatcgccttcctcgcctggttcccgttcgtgtcggaattccagaccaggatgctgttcaaccaggcgttcagcagaggtctgcagatctcccgtatcctgggaggacacaagaaagaccgagggacccggaacaaagaatagggctgggctgctgctgattcaaggtttgtgtgcgccactagtatttatgtgtgaatgggtgggtagcatatggctcgagagtatctcctgaatggagattgattgatcctgaagagtagaagagactcgagtgatgtaagatgctgcaggcttgttgctttgttacctaggcgttaggcagaacagatgttttcaggatctctggcctgttaaccacatcttcccctgttcagagtgaattaattcctaatggaaactgatttgtgaattacttcctaatagaggagtgcttccaaactgatttcatgtgtgtgctgtgatattgtttagcatatagtattttaaatgtagctttgaattttcattctttcgcaacaaaaaatgaataggacaagctggtcaaacttgaaaaaaaaagttaaacgggttataatttgggacggagggagtatgatttgagaacctcatcaaatagtcttgcca

SEQ ID NO: 9425 - DNA, 6736 bp, Zea Mays
aaaccctagtggcaaaatcgtagaaccccaggccgctttgtctctgcccacggtccaaccgaaggaaaaaaaagtttgaaaatcaaacacctttcattccccccatccctcctcctgctcatcactgctgctctctggctgctccctctccctccatccccactgctgctctcttgccaaatctgatctagggtttcgttccatctccacgcgccgtcccagtacctatctactctagactactacagtatccaaaaggcaagcttatctgcggagggagtgagctgacgcattcccgtgctggcgagggacagccagacccagacggggagatccgatccgattccgtgctagctgctgcggagtgagtgaggtgacgcgggagcgggatggcggcgccggggcggaggacggcggacgtgtcctcgtcctcgcccgccccctcgccgtccccttccaccggtaggcgcctcctgcgcacgcagaccgtcggcaacctcggcgagtccatcttcgacagcgaggtcgtgccgtcctcgctcgtcgagatcgcacccatcctccgcgtcgccaacgaggtcgaggccaccaacccgcgcgtcgcctacctctgtcgcttctacgctttcgagaaggctcaccgcctcgacccgacatccagtggccgtggtgttcgtcagtttaagaccgcacttctgcagaggcttgagagggaaaatgatcccacgctcaagggaagggtccaccagagcgatgctcgggagatgcagcgcttctaccgcgaatactacaagaagtacatccaggcactgcagcatgctgctgataaggctgaccgagcactgctcactaaagcgtaccagacagctgctgtcttgtttgaggtcttgagggccgttaatgtctcgcagtccgttgaagtcgatcaagcgattttggatacacacaataaggttgaagaaaagaaaaagttgtacgtaccttataacattctcccgcttgatcctgaaagtactggtcaagccattatgcgatatccagagattcaagctgctgtttatgctcttcgcaatactagaggtctgccatggccaaaggaccaagacaagaagcctggcgagaagaatactgggaaagaccttctcgattggcttcaggctatgtttgggtttcagaaagacaacgtgtccaaccaaagggaacatttggtactgttgcttgcaaatgttcatataatgaaagtacccaaggttgaccaacaaccgaagttggatgacaaagctctggatgctgtaatgaagaagctgtttaagaattataagaagtggtgcaagtaccttggccgcaaaagcagcttatggttgccaaccatccagcaggaagtgcagcagcgtaagcttctttatatgggcctctacctgctgatttggggtgaggcggctaacttgagattcatgccagagtgtatttgttacatctaccatcatatggcttttgaactctacggcatgctggctggaaatgtgagcccaatgacgggtgaaaatgttaaaccagcatatggtggtgatgaagaagcctttttgattaaagttgtgactccaatatacaaagttatagagaaggaagctgaaaggagcaagaccatgaaatcaaagcactcccattggagaaactatgatgatctgaatgagtacttttggtcagttgattgtttccggctaggatggcctatgagagctgatgctgactttttcaaaactccaaaagatgcttatctgaatcttttgaatggagagaacagatctgcaggtaatacccattggatgggaaaagttaattttgtggagatacgttcattttggcacatattccgtagtttcgacagaatgtggatcttcttaatattgtccttacaggccatgataattattgcttggaatggtggaacaccaagtgatatttttgatgctggagtatttaagaaggttttgagcatatttattactgctgcaattttgaagttgggtcaagcaatcctagacctcatatttggttggaaagcaagaagaaacatgtcatttgcagtcaagctgcgatatatcttgaagttaatatgtgctgctgcatgggttgtgattttacctgtgacttacgcgtacacttgggagaatcctactggacttgcaagaacaataaaaagttggcttggtgatggtcagaatcagccatctttgtacatattggccatagtgatatatatggcaccaaacatagttgcttctatgctatttcttttcccatttatgagaagattcttagagagttcaaatgttaaggtcataacgatcataatgtggtggtctcagccccggttatttgttggcagagggatgcatgaaggtataccatgttctgggttcttcttttagcaacgaagctgactgtaagcttctatattgagatcaaacctctggtacagccaaccatagatataatgagggaacctatcaggactttccagtggcacgaatttttccctcatggaactaacaatattggtgttgttatatcactgtgggctccaataattctagtatatttcatggacacccaaatttggtatgcactgttctcgacattaattggtggtatctatggggcttatcgtcgtcttggtgagatacggacattaggaatgttgagatctcgctttgaatctttgcccgaggccttcaatgaacgcttgattccttctgatgcaaataagagtaaaggtcttcgtgctgccttttcaagtagacccaaggcttctggtgacgaaagacagaaagagaaaagagctgcaaggtttgctcaaatgtggaatgtcattattacaagtttccgtgaagaagacctcatagacaatagggagatggatctgctactggttccatactgtaaagaccgtgagctcgatatatttcaatggccacctttcttacttgctagcaagatcccaatagcactggatatggcagcagacagtggcggaaaagaccgtgatctgacgaagaggataaaatcagatccatacttttcctttgctatcagagaatgctatgcttcattcaagaacatcatcaatactttagtgtttggtcagcgggagaaagatgtcctagcacagattttcgcagttgtggatcagcatatagaagatgaaactctgataaaggatctcaatatgaggaaccttcctgcactgagcaagaagtttgttgaattacttgaattactgcaaaaaaacaaggaggaagacttgggtcaggtagtcattttgttccaagatatgcttgaggtggtcacaagggatataatggaggaacaggaccagctcggcacactgttggaatctgcacatggtgcaaatagtagaaaacatgaaggaattacaccgctagatcagcaagaccagttgtttgctaaagctattaagttccctgtggatgaatcaattgcatggactgaaaagataaagaggcttcatcttctgttaactgtgaaggagtctgctatggatgttcctactaatcttgatgctaggcggcggatatcattctttgcaaattctttatttatggatatgcccaatgctccaaaagttcggaacatgttggccttctctatcttgactccttattacaaggaagatgttctgttctcattacaaaatctagaagagccaaatgaggatggagtttccattcttttctacttacaaaaaatttacccagatgaatggaaaaatttcctcgaaagggttggctgcaagaatgaagagggactccgtgaagatgaagaactagaagagaagcttcgtctttgggcgtcgtatagggggcagacattaacaagaactgtaagagggatgatgtactatcgaaaagctttggagcttcaggcttttcttgatatggcggaagatgatgatcttatggaaggttacagagcaacagaagtaatgcccgaggactcgcaattaatgactcaatgcaaggctatagctgacatgaagtttacatatgttgtctcatgccaacaatatggaattcagaagcgttctaatgagccttgcgcacatgatattttgagactaatgacggaatatccatcacttcgggtcgcctatattgatgaagttgaagcgcctagccaagatagaaacaagaagattgaaaaggtttactactcagtgttggtgaaggcttctgttacaaaacctgatgagcctggtcagagccttgatcaggtcatctacaagataaagctaccaggtaatgccattttaggtgaaggaaagccagaaaatcagaaccatgcaataatattcaccagaggcgaatgcctccaaactatagatatgaatcaggagcactatatggaggaggctttgaaaatgagaaatctgctgcaagagtttgagaagaaacatggagtgagatatccatcgatacttggagtcagagaacacatatttacgggcagtgtgtcatcccttgcatggttcatgtcaaatcaggaaactagtttcgtaacaattggacaacgagtgcttgccaatccgttgagggttcgttttcattatggtcatcctgatatcttcgatcgccttttccacattacgaggggtggtgtgagtaaagcatccaaaattatcaatctcagtgaggacatatttgcaggattcaattccacattgcgtgaaggcaatgttactcaccacgagtacatgcaagttggcaagggaagggatgtgggtctcaatcaaatatctctgtttgaggcaaagatagcaaatggcaatggcgaacagacgctgagccgtgacatctaccggctgggtcatcgctttgatttcttcagaatgctatcttgctactatacaacaattggtttctacttcagtacaatgattacagtgtggactgtatatgttttcctctatgggcggttatatcttgtacttagtggacttgatgaagcgctggctactggaaggaggtttgtgcacaatgcacctctccaggttgcgcttgcatcggagtcttttgtgcagcttgggtttttgatggcgctacccatgatgatggaaatcggtttggagagaggattcagaacagcattgagtgacttcatactgatgcagcttcagttggcctcagttttcttcacgttctcattgggaacaaaaactcattactacggaaggacattactccatggaggagctgaatacagagccactggacgtgggtttgtggtgttccatgcgaaatttgctgacaactatcgactctattcccgtagccattttgtcaagggcattgagctgatgattctactagttgtgtatgaaatatttagccagccatatagaggggctgtaacttacatcttcatcaccgtgtccatgtggttcatggtgggcacttggctctttgcaccattcctgttcaatccttctggatttgagtggcagaagattgtggacgactggaccgattggcacaagtggatcagcaatcgtggaggtatcggtgtagcaccagagaaaagctgggagtcatggtgggaaaaggagcaagagccccttcgatactccgggaagcgcggtactgttgttgaaatactgcttgcgctgcgtttctttatctaccagtacggacttgtgtatcatctgaatataacgaagaagataactaaggacaaccagagtgtgctggtttattgcttctcatgggttgtaatttttgtgattttgctcgttatgaagaccgtatcagtgggcaggagaaggttcagtgcagagttccagctagtgttccggttgatcaagggtctgatatttataacatttacagccatcgtggtaatcctaatagcgatccctggcatgacggtgctggacatatttgtttgcatccttgctttcatgcccactggatggggtttgctgctgattgcccaagcgatccggcctgtgatccacaagactgggctctggggctcgatcaaggctcttgcccggggctacgagatcctgatgggacttctcctgttcacgcccatcgccttcctcgcctggttcccgttcgtgtcggaattccagaccaggatgctgttcaaccaggcgttcagcagaggtctgcagatctcccgtatcctgggaggacacaagaaagaccgagggacccggaacaaagaatagggctgggctgctgctgattcaaggtttgtgtgcgccactagtatttatgtgtgaatgggtgggtagcatatggctcgagagtatctcctgaatggagattgattgatcctgaagagtagaagagactcgagtgatgtaagatgctgcaggcttgttgctttgttacctaggcgttaggcagaacagatgttttcaggatctctggcctgttaaccacatcttcccctgttcagagtgaattaattcctaatggaaactgatttgtgaattacttcctaatagaggagtgcttccaaactgatttcatgtgtgtgctgtgatattgtttagcatatagtattttaaatgtagctttgaattttcattctttcgcaacaaaaaatgaataggacaagctggtcaaacttgaaaaaaaaagttaaacgggttataatttgggacggagggagtatgatttgagaacctcatcaaatagtcttgcca

SEQ ID NO: 9426 - DNA, 6766 bp, Zea Mays
gtgcagtgcagtgcataaaccctagtggcaaaatcgtagaaccccaggccgctttgtctctgcccacggtccaaccgaaggaaaaaaaagtttgaaaatcaaacacctttcattccccccatccctcctcctgctcatcactgctgctctctggctgctccctctccctccatccccactgctgctctcttgccaaatctgatctagggtttcgttccatctccacgcgccgtcccagtacctatctactctagactactacagtatccaaaaggcaagcttatctgcggagggagtgagctgacgcattcccgtgctggcgagggacagccagacccagacggggagatccgatccgattccgtgctagctgctgcggagtgagtgaggtgacgcgggagcgggatggcggcgccggggcggaggacggcggacgtgtcctcgtcctcgcccgccccctcgccgtccccttccaccggtaggcgcctcctgcgcacgcagaccgtcggcaacctcggcgagtccatcttcgacagcgaggtcgtgccgtcctcgctcgtcgagatcgcacccatcctccgcgtcgccaacgaggtcgaggccaccaacccgcgcgtcgcctacctctgtcgcttctacgctttcgagaaggctcaccgcctcgacccgacatccagtggccgtggtgttcgtcagtttaagaccgcacttctgcagaggcttgagagggaaaatgatcccacgctcaagggaagggtccaccagagcgatgctcgggagatgcagcgcttctaccgcgaatactacaagaagtacatccaggcactgcagcatgctgctgataaggctgaccgagcactgctcactaaagcgtaccagacagctgctgtcttgtttgaggtcttgagggccgttaatgtctcgcagtccgttgaagtcgatcaagcgattttggatacacacaataaggttgaagaaaagaaaaagttgtacgtaccttataacattctcccgcttgatcctgaaagtactggtcaagccattatgcgatatccagagattcaagctgctgtttatgctcttcgcaatactagaggtctgccatggccaaaggaccaagacaagaagcctggcgagaagaatactgggaaagaccttctcgattggcttcaggctatgtttgggtttcagaaagacaacgtgtccaaccaaagggaacatttggtactgttgcttgcaaatgttcatataatgaaagtacccaaggttgaccaacaaccgaagttggatgacaaagctctggatgctgtaatgaagaagctgtttaagaattataagaagtggtgcaagtaccttggccgcaaaagcagcttatggttgccaaccatccagcaggaagtgcagcagcgtaagcttctttatatgggcctctacctgctgatttggggtgaggcggctaacttgagattcatgccagagtgtatttgttacatctaccatcatatggcttttgaactctacggcatgctggctggaaatgtgagcccaatgacgggtgaaaatgttaaaccagcatatggtggtgatgaagaagcctttttgattaaagttgtgactccaatatacaaagttatagagaaggaagctgaaaggagcaagaccatgaaatcaaagcactcccattggagaaactatgatgatctgaatgagtacttttgttgattgtttccggctaggatggcctatgagagctgatgctgactttttcaaaactccaaaagatgcttatctgaatcttttgaatggagagaacagatctgcaggtaatacccattggatgggaaaagttaattttgtggagatacgttcattttggcacatattccgtagtttcgacagaatgtggatcttcttaatattgtccttacaggccatgataattattgcttggaatggtggaacaccaagtgatatttttgatgctggagtatttaagaaggttttgagcatatttattactgctgcaattttgaagttgggtcaagcaatcctagacctcatatttggttggaaagcaagaagaaacatgtcatttgcagtcaagctgcgatatatcttgaagttaatatgtgctgctgcatgggttgtgattttacctgtgacttacgcgtacacttgggagaatcctactggacttgcaagaacaataaaaagttggcttggtgatggtcagaatcagccatctttgtacatattggccatagtgatatatatggcaccaaacatagttgcttctatgctatttcttttcccatttatgagaagattcttagagagttcaaatgttaaggtcataacgatcataatgtggtggtctcagccccggttatttgttggcagagggatgcatgaaggtgcattctccctcttcaagtataccatgttctgggttcttcttttagcaacgaagctgactgtaagcttctatattgagatcaaacctctggtacagccaaccatagatataatgagggaacctatcaggactttccagtggcacgaatttttccctcatggaactaacaatattggtgttgttatatcactgtgggctccaataattctagtatatttcatggacacccaaatttggtatgcactgttctcgacattaattggtggtatctatggggcttatcgtcgtcttggtgagatacggacattaggaatgttgagatctcgctttgaatctttgcccgaggccttcaatgaacgcttgattccttctgatgcaaataagagtaaaggtcttcgtgctgccttttcaagtagacccaaggcttctggtgacgaaagacagaaagagaaaagagctgcaaggtttgctcaaatgtggaatgtcattattacaagtttccgtgaagaagacctcatagacaatagggagatggatctgctactggttccatactgtaaagaccgtgagctcgatatatttcaatggccacctttcttacttgctagcaagatcccaatagcactggatatggcagcagacagtggcggaaaagaccgtgatctgacgaagaggataaaatcagatccatacttttcctttgctatcagagaatgctatgcttcattcaagaacatcatcaatactttagtgtttggtcagcgggagaaagatgtcctagcacagattttcgcagttgtggatcagcatatagaagatgaaactctgataaaggatctcaatatgaggaaccttcctgcactgagcaagaagtttgttgaattacttgaattactgcaaaaaaacaaggaggaagacttgggtcaggtagtcattttgttccaagatatgcttgaggtggtcacaagggatataatggaggaacaggaccagctcggcacactgttggaatctgcacatggtgcaaatagtagaaaacatgaaggaattacaccgctagatcagcaagaccagttgtttgctaaagctattaagttccctgtggatgaatcaattgcatggactgaaaagataaagaggcttcatcttctgttaactgtgaaggagtctgctatggatgttcctactaatcttgatgctaggcggcggatatcattctttgcaaattctttatttatggatatgcccaatgctccaaaagttcggaacatgttggccttctctatcttgactccttattacaaggaagatgttctgttctcattacaaaatctagaagagccaaatgaggatggagtttccattcttttctacttacaaaaaatttacccagatgaatggaaaaatttcctcgaaagggttggctgcaagaatgaagagggactccgtgaagatgaagaactagaagagaagcttcgtctttgggcgtcgtatagggggcagacattaacaagaactgtaagagggatgatgtactatcgaaaagctttggagcttcaggcttttcttgatatggcggaagatgatgatcttatggaaggttacagagcaacagaagtaatgcccgaggactcgcaattaatgactcaatgcaaggctatagctgacatgaagtttacatatgttgtctcatgccaacaatatggaattcagaagcgttctaatgagccttgcgcacatgatattttgagactaatgacggaatatccatcacttcgggtcgcctatattgatgaagttgaagcgcctagccaagatagaaacaagaagattgaaaaggtttactactcagtgttggtgaaggcttctgttacaaaacctgatgagcctggtcagagccttgatcaggtcatctacaagataaagctaccaggtaatgccattttaggtgaaggaaagccagaaaatcagaaccatgcaataatattcaccagaggcgaatgcctccaaactatagatatgaatcaggagcactatatggaggaggctttgaaaatgagaaatctgctgcaagagtttgagaagaaacatggagtgagatatccatcgatacttggagtcagagaacacatatttacgggcagtgtgtcatcccttgcatggttcatgtcaaatcaggaaactagtttcgtaacaattggacaacgagtgcttgccaatccgttgagggttcgttttcattatggtcatcctgatatcttcgatcgccttttccacattacgaggggtggtgtgagtaaagcatccaaaattatcaatctcagtgaggacatatttgcaggattcaattccacattgcgtgaaggcaatgttactcaccacgagtacatgcaagttggcaagggaagggatgtgggtctcaatcaaatatctctgtttgaggcaaagatagcaaatggcaatggcgaacagacgctgagccgtgacatctaccggctgggtcatcgctttgatttcttcagaatgctatcttgctactatacaacaattggtttctacttcagtacaatgattacagtgtggactgtatatgttttcctctatgggcggttatatcttgtacttagtggacttgatgaagcgctggctactggaaggaggtttgtgcacaatgcacctctccaggttgcgcttgcatcggagtcttttgtgcagcttgggtttttgatggcgctacccatgatgatggaaatcggtttggagagaggattcagaacagcattgagtgacttcatactgatgcagcttcagttggcctcagttttcttcacgttctcattgggaacaaaaactcattactacggaaggacattactccatggaggagctgaatacagagccactggacgtgggtttgtggtgttccatgcgaaatttgctgacaactatcgactctattcccgtagccattttgtcaagggcattgagctgatgattctactagttgtgtatgaaatatttagccagccatatagaggggctgtaacttacatcttcatcaccgtgtccatgtggttcatggtgggcacttggctctttgcaccattcctgttcaatccttctggatttgagtggcagaagattgtggacgactggaccgattggcacaagtggatcagcaatcgtggaggtatcggtgtagcaccagagaaaagctgggagtcatggtgggaaaaggagcaagagccccttcgatactccgggaagcgcggtactgttgttgaaatactgcttgcgctgcgtttctttatctaccagtacggacttgtgtatcatctgaatataacgaagaagataactaaggacaaccagagtgtgctggtttattgcttctcatgggttgtaatttttgtgattttgctcgttatgaagaccgtatcagtgggcaggagaaggttcagtgcagagttccagctagtgttccggttgatcaagggtctgatatttataacatttacagccatcgtggtaatcctaatagcgatccctggcatgacggtgctggacatatttgtttgcatccttgctttcatgcccactggatggggtttgctgctgattgcccaagcgatccggcctgtgatccacaagactgggctctggggctcgatcaaggctcttgcccggggctacgagatcctgatgggacttctcctgttcacgcccatcgccttcctcgcctggttcccgttcgtgtcggaattccagaccaggatgctgttcaaccaggcgttcagcagaggtctgcagatctcccgtatcctgggaggacacaagaaagaccgagggacccggaacaaagaatagggctgggctgctgctgattcaaggtttgtgtgcgccactagtatttatgtgtgaatgggtgggtagcatatggctcgagagtatctcctgaatggagattgattgatcctgaagagtagaagagactcgagtgatgtaagatgctgcaggcttgttgctttgttacctaggcgttaggcagaacagatgttttcaggatctctggcctgttaaccacatcttcccctgttcagagtgaattaattcctaatggaaactgatttgtgaattacttcctaatagaggagtgcttccaaactgatttcatgtgtgtgctgtgatattgtttagcatatagtattttaaatgtagctttgaattttcattctttcgcaacaaaaaatgaataggacaagctggtcaaacttgaaaaaaaaagttaaacgggttataatttgggacggagggagtatgatttgagaacctcatcaaatagtcttgcca

SEQ ID NO: 9427 - DNA, 6794 bp, Zea Mays
gcaaaatcgtagaaccccaggccgctttgtctctgcccacggtccaaccgaaggaaaaaaaagtttgaaaatcaaacacctttcattccccccatccctcctcctgctcatcactgctgctctctggctgctccctctccctccatccccactgctgctctcttgccaaatctgatctagggtttcgttccatctccacgcgccgtcccagtacctatctactctagactactacagtatccaaaaggcaagcttatctgcggagggagtgagctgacgcattcccgtgctggcgagggacagccagacccagacggggagatccgatccgattccgtgctagctgctgcggagtgagtgaggtgacgcgggagcgggatggcggcgccggggcggaggacggcggacgtgtcctcgtcctcgcccgccccctcgccgtccccttccaccggtaggcgcctcctgcgcacgcagaccgtcggcaacctcggcgagtccatcttcgacagcgaggtcgtgccgtcctcgctcgtcgagatcgcacccatcctccgcgtcgccaacgaggtcgaggccaccaacccgcgcgtcgcctacctctgtcgcttctacgctttcgagaaggctcaccgcctcgacccgacatccagtggccgtggtgttcgtcagtttaagaccgcacttctgcagaggcttgagagggaaaatgatcccacgctcaagggaagggtccaccagagcgatgctcgggagatgcagcgcttctaccgcgaatactacaagaagtacatccaggcactgcagcatgctgctgataaggctgaccgagcactgctcactaaagcgtaccagacagctgctgtcttgtttgaggtcttgagggccgttaatgtctcgcagtccgttgaagtcgatcaagcgattttggatacacacaataaggttgaagaaaagaaaaagttattcaagctgctgtttatgctcttcgcaatactagaggtctgccatggccaaaggaccaagacaagaagcctggcgagaagaatactgggaaagaccttctcgattggcttcaggctatgtttgggtttcagaaagacaacgtgtccaaccaaagggaacatttggtactgttgcttgcaaatgttcatataatgaaagtacccaaggttgaccaacaaccgaagttggatgacaaagctctggatgctgtaatgaagaagctgtttaagaattataagaagtggtgcaagtaccttggccgcaaaagcagcttatggttgccaaccatccagcaggaagtgcagcagcgtaagcttctttatatgggcctctacctgctgatttggggtgaggcggctaacttgagattcatgccagagtgtatttgttacatctaccatcatatggcttttgaactctacggcatgctggctggaaatgtgagcccaatgacgggtgaaaatgttaaaccagcatatggtggtgatgaagaagcctttttgattaaagttgtgactccaatatacaaagttatagagaaggaagctgaaaggagcaagaccatgaaatcaaagcactcccattggagaaactatgatgatctgaatgagtacttttggtcagttgattgtttccggctaggatggcctatgagagctgatgctgactttttcaaaactccaaaagatgcttatctgaatcttttgaatggagagaacagatctgcaggtaatacccattggatgggaaaagttaattttgtggagatacgttcattttggcacatattccgtagtttcgacagaatgtggatcttcttaatattgtccttacaggccatgataattattgcttggaatggtggaacaccaagtgatatttttgatgctggagtatttaagaaggttttgagcatatttattactgctgcaattttgaagttgggtcaagcaatcctagacctcatatttggttggaaagcaagaagaaacatgtcatttgcagtcaagctgcgatatatcttgaagttaatatgtgctgctgcatgggttgtgattttacctgtgacttacgcgtacacttgggagaatcctactggacttgcaagaacaataaaaagttggcttggtgatggtcagaatcagccatctttgtacatattggccatagtgatatatatggcaccaaacatagttgcttctatgctatttcttttcccatttatgagaagattcttagagagttcaaatgttaaggtcataacgatcataatgtggtggtctcagccccggttatttgttggcagagggatgcatgaaggtgcattctccctcttcaagtataccatgttctgggttcttcttttagcaacgaagctgactgtaagcttctatattgagatcaaacctctggtacagccaaccatagatataatgagggaacctatcaggactttccagtggcacgaatttttccctcatggaactaacaatattggtgttgttatatcactgtgggctccaataattctagtatatttcatggacacccaaatttggtatgcactgttctcgacattaattggtggtatctatggggcttatcgtcgtcttggtgagatacggacattaggaatgttgagatctcgctttgaatctttgcccgaggccttcaatgaacgcttgattccttctgatgcaaataagagtaaaggtcttcgtgctgccttttcaagtagacccaaggcttctggtgacgaaagacagaaagagaaaagagctgcaaggtttgctcaaatgtggaatgtcattattacaagtttccgtgaagaagacctcatagacaatagggagatggatctgctactggttccatactgtaaagaccgtgagctcgatatatttcaatggccacctttcttacttgctagcaagatcccaatagcactggatatggcagcagacagtggcggaaaagaccgtgatctgacgaagaggataaaatcagatccatacttttcctttgctatcagagaatgctatgcttcattcaagaacatcatcaatactttagtgtttggtcagcgggagaaagatgtcctagcacagattttcgcagttgtggatcagcatatagaagatgaaactctgataaaggatctcaatatgaggaaccttcctgcactgagcaagaagtttgttgaattacttgaattactgcaaaaaaacaaggaggaagacttgggtcaggtagtcattttgttccaagatatgcttgaggtggtcacaagggatataatggaggaacaggaccagctcggcacactgttggaatctgcacatggtgcaaatagtagaaaacatgaaggaattacaccgctagatcagcaagaccagttgtttgctaaagctattaagttccctgtggatgaatcaattgcatggactgaaaagataaagaggcttcatcttctgttaactgtgaaggagtctgctatggatgttcctactaatcttgatgctaggcggcggatatcattctttgcaaattctttatttatggatatgcccaatgctccaaaagttcggaacatgttggccttctctatcttgactccttattacaaggaagatgttctgttctcattacaaaatctagaagagccaaatgaggatggagtttccattcttttctacttacaaaaaatttacccagatgaatggaaaaatttcctcgaaagggttggctgcaagaatgaagagggactccgtgaagatgaagaactagaagagaagcttcgtctttgggcgtcgtatagggggcagacattaacaagaactgtaagagggatgatgtactatcgaaaagctttggagcttcaggcttttcttgatatggcggaagatgatgatcttatggaaggttacagagcaacagaagtaatgcccgaggactcgcaattaatgactcaatgcaaggctatagctgacatgaagtttacatatgttgtctcatgccaacaatatggaattcagaagcgttctaatgagccttgcgcacatgatattttgagactaatgacggaatatccatcacttcgggtcgcctatattgatgaagttgaagcgcctagccaagatagaaacaagaagattgaaaaggtttactactcagtgttggtgaaggcttctgttacaaaacctgatgagcctggtcagagccttgatcaggtcatctacaagataaagctaccaggtaatgccattttaggtgaaggaaagccagaaaatcagaaccatgcaataatattcaccagaggcgaatgcctccaaactatagatatgaatcaggagcactatatggaggaggctttgaaaatgagaaatctgctgcaagagtttgagaagaaacatggagtgagatatccatcgatacttggagtcagagaacacatatttacgggcagtgtgtcatcccttgcatggttcatgtcaaatcaggaaactagtttcgtaacaattggacaacgagtgcttgccaatccgttgagggttcgttttcattatggtcatcctgatatcttcgatcgccttttccacattacgaggggtggtgtgagtaaagcatccaaaattatcaatctcagtgaggacatatttgcaggattcaattccacattgcgtgaaggcaatgttactcaccacgagtacatgcaagttggcaagggaagggatgtgggtctcaatcaaatatctctgtttgaggcaaagatagcaaatggcaatggcgaacagacgctgagccgtgacatctaccggctgggtcatcgctttgatttcttcagaatgctatcttgctactatacaacaattggtttctacttcagtacaatggtattttggtgacctgagtttttgaactgttcttgtccgttcattggttaacctttcttgcattttctgacttgttcgttgtttcaccttaacacctctgttatttctgcatgcacttagattacagtgtggactgtatatgttttcctctatgggcggttatatcttgtacttagtggacttgatgaagcgctggctactggaaggaggtttgtgcacaatgcacctctccaggttgcgcttgcatcggagtcttttgtgcagcttgggtttttgatggcgctacccatgatgatggaaatcggtttggagagaggattcagaacagcattgagtgacttcatactgatgcagcttcagttggcctcagttttcttcacgttctcattgggaacaaaaactcattactacggaaggacattactccatggaggagctgaatacagagccactggacgtgggtttgtggtgttccatgcgaaatttgctgacaactatcgactctattcccgtagccattttgtcaagggcattgagctgatgattctactagttgtgtatgaaatatttagccagccatatagaggggctgtaacttacatcttcatcaccgtgtccatgtggttcatggtgggcacttggctctttgcaccattcctgttcaatccttctggatttgagtggcagaagattgtggacgactggaccgattggcacaagtggatcagcaatcgtggaggtatcggtgtagcaccagagaaaagctgggagtcatggtgggaaaaggagcaagagccccttcgatactccgggaagcgcggtactgttgttgaaatactgcttgcgctgcgtttctttatctaccagtacggacttgtgtatcatctgaatataacgaagaagataactaaggacaaccagagtgtgctggtttattgcttctcatgggttgtaatttttgtgattttgctcgttatgaagaccgtatcagtgggcaggagaaggttcagtgcagagttccagctagtgttccggttgatcaagggtctgatatttataacatttacagccatcgtggtaatcctaatagcgatccctggcatgacggtgctggacatatttgtttgcatccttgctttcatgcccactggatggggtttgctgctgattgcccaagcgatccggcctgtgatccacaagactgggctctggggctcgatcaaggctcttgcccggggctacgagatcctgatgggacttctcctgttcacgcccatcgccttcctcgcctggttcccgttcgtgtcggaattccagaccaggatgctgttcaaccaggcgttcagcagaggtctgcagatctcccgtatcctgggaggacacaagaaagaccgagggacccggaacaaagaatagggctgggctgctgctgattcaaggtttgtgtgcgccactagtatttatgtgtgaatgggtgggtagcatatggctcgagagtatctcctgaatggagattgattgatcctgaagagtagaagagactcgagtgatgtaagatgctgcaggcttgttgctttgttacctaggcgttaggcagaacagatgttttcaggatctctggcctgttaaccacatcttcccctgttcagagtgaattaattcctaatggaaactgatttgtgaattacttcctaatagaggagtgcttccaaactgatttcatgtgtgtgctgtgatattgtttagcatatagtattttaaatgtagctttgaattttcattctttcgcaacaaaaaatgaataggacaagctggtcaaacttgaaaaaaaaagttaaacgggttataatttgggacggagggagtatgatttgagaacctcatcaaatagtcttgcca

SEQ ID NO: 9428 - DNA, 1399 bp, Zea Mays
atcctcatcacaggcaacaaggcaccacacctcttcttcttcttcctcctcctcctagcacagctagcgcctgctccccttcgcctgtgatcatgtcttgcagcagcggcaagtgcgactgtggctccagctgctcctgcggcagctcatgcaactgcatgtcccctaacgtggagaccgccgccgccagcagcatcaagaccacggtcctcgccgcgccgaccaccaagaaccacacctcctcccttcgcctgtgatcatgtcgtcttgctgcggcggcaagtgcgggtgcggctccagctgctcctgcggcagcggatgcaacggctgcggtatgtaccctgacgtggagaccgccgccaccagcagcgtcaagaccacggtcctcgccgcgccgaccaccaaggccagcgccggcggcttcgaggcggccaccgagggcggcggctgcgactgcaacacctgcaagtgcggcaccagctgcggctgctcctgctgcagctgcaactgagctggcccggcccggcgatggcgcacgagagtcgagaggaggaggacgacgacgaggcgtataaatataatagcggcgtccagtaaataagatcctgtcaactgcacccgccattatccatggtcgctcgctcctcgcctgcgtctcctggtcctggggttcgtctgaacgtcctcgcggcttcacgacggcgatgccgcctccgtcgatcctgtccgtctcgtgccggatttaatattagatctatatgcgtgtttttctgcgttattactacatctacatgtgtctgtctgtggtgtgtctctctgacggccccatgcgtcagcgtcactgcttgcttcagttctgcatctcactctgttgaggtgaaaaactgataacatctttgcagtgctagaaaacctgagaacctcatgatatctaagtaactgagccaagagagagagagagagagagagtatctaagtaccttgatccacttggacagcacagttagactctgaaacgatcgttgcataatgcagagtaccctgaaattcgaagcatcgacatgaccagctacagttccggctactgttatgggtttttctcttcgcccctttagataacagaatatcgatatctttataaaggaaataatggaatagtaatgggcaatgctacggcaatttccctactagaacgcaatttcttaaataaatttgaacagttattttttttagtttttaaattgattatttcattaacctacaaaataaaaaaaaacacagcaaagccctgtagtgatatctaactagcccaaaaagaacaaatgtatgagtatcttaatgtgcttggaaatatttttcggcgagagagagagtgagagagctcttaatgtgattttaa

SEQ ID NO: 9429 - DNA, 3905 bp, Zea Mays
atggttccaaaagggcggcggcaggggcaacaacggcagcccaatgtggcctttcaaatactaaatgaaaagacaactgtcttgtctcctgaagtgcttctttctgctggagttccttgctgcagatacttctccaaagcagattggttcaaaaccctggtgaatttgttatcacattccctggagcttatcattctggttttagccatggatttaattgtggagaagcaacaaacattgctacaccttgctggttgcaagtggctaaagaagctgcaatcaggagggcttccacaaattcaggcccaatggtgtctcattatcagctgctttatgagctagcactgtcattacatctaagggagcctaagaattctcatatgcctagaagctctcgtctaagggacaagaagaagaatgaaggtgaaagaatgatcaaagaaacatttgttggaagtgtgatagaaaacaacagttttctgagcacccttcttgacaagagttcttgtataattatcccggagattgaatttccccttccatctgttcctacaacgagggcacctgaagtctctgataagcaaggcttgattgctggtccctgtagtattagccagcaaaaagctgaggaaactcttgtttatggtgatgaaattgatgaaatcaaagaggttgagaacatgagtgaatcaaccacttcctctgcatgtaaccaaagaaagttctacgaaacaaaatttggaatagttagtagtactgcattttgcttatcaacttcagatattcagattggagtaattggaaaaggtagatcacatcaaggaggtgggctcttagatcaagggcggttgccatgtgttcagtgtggcatattaagctatgcttgtgtagctatcattcaacctaaagaagcggcagtccaatatgtcatttctagggagtgcatgtcatcaagtgcaatacacagagaaataatggaatcggatgatacctcaaatcgaatggtgatagctcatcaacaaggatatgctcatcaaactgatgataatacaatacaaaatgtgagtgcagcccaagtttctgataggtgtagacagctatacagcagcagcacccatggatgcacttccgctcttgggcttctggcttctgcttatgaatcatcagaatctgatgaagaagcagatgcacctaacaatatatcaaacaattgtgaaaacaataatgcggcaaatggagccacaaatattcagtcctccagaacatcagttcaggatgaaaatacgaatttgcaattgtatgaagaggaaaataactccagagcaatagcatctctgatgcaaccagtggaggataagagtactgctatgactcctgttagtatggaaacaaatattatccatctagcagatcagggagagtcactaaccttccatgagcagtggcatgcgtatcttgactttgatgatctaactgcatcaggtgtaaaagcctctccgaatactagtttgggcacggctaaagctgcaatgaaaacagatgcactgactttgttcaagtacagcaaggattcctgcagaatgcacgtgttttgtctagaacatgctttggaaacttggacacgacttgaacaaattggtggtgctaatatcatgctcttatgccatccagaataccctagagcagagtcagcagcaaaagttatagcagaagaacttggtatgaagcatgcctggaaagatatcactttcaaaaaagcaacacgtgaagacactggaagaattcaattggctcttcaggatgaagatgcagaacctacgagcagtgactgggcagtaaaaatgggtatcaacatatattacagtgccaaacaaagcaaatctccactttacagcaagcaggtaccatacaattctatcatttacaaggcatttgctcaggaaaatccagacagcttcgcagatggacagcgatcaagcacaacaaagaaaaaggtagctggatggtggtgtggcaaaaaatggatgtcaaaccaagttcatccacttttagcttgtgaacaggtagaacagaatcatgaaacagtttacagcaaaacgatgttatctgctagttgtgacaggatgcaagaacaatcaacaagatctactaccctgatcaaccaaaattcttcaaaaaagataaccagaagaaaagagggggactctgttgagaaatctagaggcaaaaagaagagatgcagtgccagtgcttctgatgaagctgctttgcactgcagtgtgtatgatcagcctgtaaattctgataatcatgccaaatatgaagatggagatgaaagtgtggaagcacggaacacccgacatcatcaacaatatgaatcgctaaataaaaaatcaagtttgaagaggcgaaaggataataatagaagcaacagctttcatgagctacacaaggacaatgttgacattgactgcaggtttgatacagacggcactgaaaacacctcaataggtgactgggataatagtccaccacaagggggtgatgtcaaagcagtgaaatctggtgctcgattgctaggcactaagaggtttagcaaggagaagggaagtaatggtttgtcaaatgtaaacaagaaattggtaaagatgggtaagaaaattagtactaagaagcaaaagaatgacaaaacaaataggcagtttcaagaaaatcacaaaaaggctgacattgtggatttgcttcatgaagatgatggagatgaaggcacatacatagactgcaatgaaattcgaaaacaaaaaacagatgacgtgagagtaaaatctagaggcaaaatgcaaagtggcaagaaaaaagtcagcagatgtcaggcaagtgatggttcgcacaatggaggcaaggaaatgaaattatcaagtgacatagaagtgtgcaacagaagaggagatggaacaacggcagccaattttgaagaaattccaaaagaaaaggccgatgctgtgaaagtgaaacccaagatgcaaggtgacaagaaaaaaaccagtaaacatcaggcaggcgatggagataaaggagcaaaattttcttgcgatatagaagggtgtgacatgagtttcagcacccagcatgacctgtcgctgcacaagagagacatctgtcctgtcaaaggatgcaagaagaagttcttctgccataaatacttgctccagcaccgcaaagtgcacctggatgaaaggccgctcatgtgctcattcccaggctgcgcgaagacattcaagtggccatgggcgaggacagagcacatgagggtgcatacaggggtgcgcccgtacgcatgcacggaacctggctgcacccagacgttccggtttgtgtcggacttcagccgccacaagaggaagactggccactcgtgtgacaagaaaaagaaacgcggcctttgactgctcgtgcacaagtacaggtttcttctctgacggcgagcgatctgaaggggatggatgctaatcgaataattgcgccaggttccattgtttgcagaattaatctgcattaggagtctaattcatttcattgtttattaccgctgcaacataacagctcattcactgtcgctttaggtccaactgacctgctggtgactgagattgtaccatgtcaattgtatcgttctttcgttcatacttagaaatcgggaagtttctgttgacaggaacgttggatttagtgtacggcgcctgttattaacatgcgtgtaattctgtactgaagtgctcctttcttatttttacattttttaaaatctggaaggaattagtgtacggcgcctgctagttttgatgtaggattcatttggcagttcttgaaacgattatcgcaaaaatagaatcacttgttggaaa

SEQ ID NO: 9430 - DNA, 3712 bp, Zea Mays
attttcccagcgcgacggcgccccgctctcccgctccgttcctcctcccttccccgaagcttcggcgccccctcgctccctccgccccgttttaagcgcgcccgcctccgaccgaccggccgccacgcgagcgaccgcttcggcaaacggggaggaggaggagtgtttgcttctctgtcttgatcggggaggcgccatggcggacacccgcaaattcgtgctgcccggccaacccccagacatctcgcagatactgcaggaggctcagaaccggtggctgcggcccaccgagatctgcgagatactgtccaactacaagctcttctccatcgccgccgagccgcccaacatgccgaggagtggctctctttttctatttgatcgcaaagtactgaggtacttcagaaaggatggacacaactggagaaagaaaaaagatggcaagactgtcaaagaagctcatgagaaactgaaagctggcagcattgatgtactccattgctactatgcccatggagaggagaacgaaaactttcaaaggcgaacatattggctgttggaagaggatttcactcatattgttcttgtacattacctagaagtcaagggatgcaagcaaagtttcaatcgtgtgaaagaagaacttatgcagctatcgaatgtcgacagtccttcatgttcaaattccatcactagtcagaatcagatgggcccacaaaacatggaggctgctgaaagcccaataagcggacagatttcagaatatgaagacactgaatcagtgtatctaaagcgaaattcggtgcagcagataattgccgagcaagctccagataccaccctctcgctgagatgcagcagcttgtggatggagtcataacggaaaacatgttatacccttccgcatcaactgttggtagtagacaaggcaagagtcactcctctgtatttgaggttttgggtttctgtgctaatactatcttctaaatcattccccctcttgaactttaccaggttatcatggtgaaatgttgccaataacagataacttagataaccgttcattttctaaccatgacatagctagaatgctcgacggcgccaacattgggctaagcgatgtttccagcactctgtttgattcagtgccattcaatgagcccttcaccaattattcagctgggttcacagagccaacactccattcttcatttgcctgcttagaggctaacgatttggacgatagctcttgtttgcagacatttacatctgaggctctatacactaaccacctcaaccagaaggaagctgatgcactgggtttcactggcatattagcatcagaggtgaacagagatagatataatgatggtagcatcaaacattcactcttgaagcagtcatcattggatctattgacgattgaggctcctggtttgaagaaaaatgacagcttttcaagatggatgagtaaagaacttgaagagtgaacccttcactttctcaagaccaactattcagcattctcgatgtttcaccaagttgtgcatatattggtacaaatacaaaggtttcagttactggtacattcttggtgaataaaaaacatgtggaaagtcacaggtggtcatgtatgtttggggatgttgaagtaccagctgaggttttgaccgatggcaccctacgctgctatgcaccagcacaccaatcaggaagagttccattttatgtgacctgttcaaacagggtggcttgtagtgaagtgcgagaatttgagtatcgtgattctgaagctcattacatggagacttctcgttcccaagccaatggtgtaaatgaaatgcatctacacattcgtcttgagaagctactcactttggggccagatgaccatcaaatgcttgttataagcagtggtaatgagaaatatgagataatgaatgctataaattccttaatgcttgatgggaaatggtcaaatcaagaatcttctgtcaaggaagtagtttccactgctagggtccaaagtttaaagaaactggtgaaagagaagctgcatcaatggctcatctgcaaagtaaacgatgatggaaagggtcccaatgttctgtgcaaggaaggacagggtgtgattcatttagtagcagcactgggttatgattgggctataagaccgataatgattgctggtgtcaatgtgaacttccgggatgctcatggatggactgcactccactgggctgcatctttgggaagagagcggacagttagtgtcctcatagcaaatggagctgcagcaggagcactaaccgatccaacttctgagttcccttctggaagaagtccagctgatttagcttcagtaaatggacacaaggggattgctggttttctcgcagaatctgctttgacaagccatctgtcagcacttactattagggaatcaaatgatagcactgtagaagcgtgtgggctaccatttgctgaagatctcactggcatcgattctgtccatctcgctggagagggtcctgatgctgaatcacttgaaggttctttaagtgccgtgcggaaatccactcaagctgcagctcgtatatttcaagccttcagggtggagtcattccacagaaagaaagtcgtggaatacggagatgacacctgtggattatctgatgaatgcacactttcacttgtttctcttaaaaatgtcaaaccaggacaacatgatacacatctgcattctgctgctgttcgcatacagaacaagtttcgcggatggaagggaagaaaggaatttatgatcattcgccagagaattgtcaagctacaggctcatgtacgaggacatcaagtgaggaagaactatcggaaggtagtctggtcagtcggtatcgtcgagaaggtcatactgagatggaggagaaagaggcctgggttacgcgggtttcggcccgagaaacaactagaaggtccatcgcaaatccaacctgcaaaggctgaagatgaatacgatttcttgcacgacggcagaaggcaggccgaagccaggctacagagagcacttgcccgggtgcactctatgtcacagtacccagaagcgagagagcagtaccacaggcttacaacctgcgttgctgaaatgaaacagtccaggatgatgcaggatgagatgctaagccaggcggctggtggtgcggacgatttcatggctggactggaggacttgatctgcatagatgatgccccgccccgatgtctgccattcggtgaagctgagcctttttacatcagataggcagggaggcggtttccttgctccccttttgtcagactagccctgtaaatattcttcagctagttgttcaccccgactgtttactcgctttctgctagtgtacaactataacatagtttcaatgcactgattatcggtagaataatcgcctcttatttgatatatagtttatattaattcaacgtattttatggttttatctgtaattctgcattcgtatcgagccataacagtgtgaatttgcgacatccgccatgacccaataatacaagcaccatggcggcggatctgtttgaatgcactatagccaaaccaactaagacttagtttcatagtttgagtactctagtattgaccataatctatatgtattgagttggattggagtgtaacttaaactaatttacatcccaa

SEQ ID NO: 9431 - DNA, 3749 bp, Zea Mays
attttcccagcgcgacggcgccccgctctcccgctccgttcctcctcccttccccgaagcttcggcgccccctcgctccctccgccccgttttaagcgcgcccgcctccgaccgaccggccgccacgcgagcgaccgcttcggcaaacggggaggaggaggagtgtttgcttctctgtcttgatcggggaggcgccatggcggacacccgcaaattcgtgctgcccggccaacccccagacaaaaaggggtttcggtaccaagaacgaggagtcgaggaccgtatgcgagtggtggtggtcgcctggtcggagcagttgttggcgttgactaaccggggactaactaactaacctcgtcgtgaatgaatctgcagacatctcgcagatactgcaggaggctcagaaccggtggctgcggcccaccgagatctgcgagatactgtccaactacaagctcttctccatcgccgccgagccgcccaacatgccgaggagtggctctctttttctatttgatcgcaaagtactgaggtacttcagaaaggatggacacaactggagaaagaaaaaagatggcaagactgtcaaagaagctcatgagaaactgaaagctggcagcattgatgtactccattgctactatgcccatggagaggagaacgaaaactttcaaaggcgaacatattggctgttggaagaggatttcactcatattgttcttgtacattacctagaagtcaagggatgcaagcaaagtttcaatcgtgtgaaagaagaacttatgcagctatcgaatgtcgacagtccttcatgttcaaattccatcactagtcagaatcagatgggcccacaaaacatggaggctgctgaaagcccaataagcggacagatttcagaatatgaagacactgaatcagataattgccgagcaagctccagataccaccctctcgctgagatgcagcagcttgtggatggagtcataacggaaaacatgttatacccttccgcatcaactgttggtagtagacaaggttatcatggtgaaatgttgccaataacagataacttagataaccgttcattttctaaccatgacatagctagaatgctcgacggcgccaacattgggctaagcgatgtttccagcactctgtttgattcagtgccattcaatgagcccttcaccaattattcagctgggttcacagagccaacactccattcttcatttgcctgcttagaggctaacgatttggacgatagctcttgtttgcagacatttacatctgaggctctatacactaaccacctcaaccagaaggaagctgatgcactgggtttcactggcatattagcatcagaggtgaacagagatagatataatgatggtagcatcaaacattcactcttgaagcagtcatcattggatctattgacgattgaggctcctggtttgaagaaaaatgacagcttttcaagatggatgagtaaagaacttgaagagctggatgcttatgtagtgaacccttcactttctcaagaccaactattcagcattctcgatgtttcaccaagttgtgcatatattggtacaaatacaaaggtttcagttactggtacattcttggtgaataaaaaacatgtggaaagtcacaggtggtcatgtatgtttggggatgttgaagtaccagctgaggttttgaccgatggcaccctacgctgctatgcaccagcacaccaatcaggaagagttccattttatgtgacctgttcaaacagggtggcttgtagtgaagtgcgagaatttgagtatcgtgattctgaagctcattacatggagacttctcgttcccaagccaatggtgtaaatgaaatgcatctacacattcgtcttgagaagctactcactttggggccagatgaccatcaaatgcttgttataagcagtggtaatgagaaatatgagataatgaatgctataaattccttaatgcttgatgggaaatggtcaaatcaagaatcttctgtcaaggaagtagtttccactgctagggtccaaagtttaaagaaactggtgaaagagaagctgcatcaatggctcatctgcaaagtaaacgatgatggaaagggtcccaatgttctgtgcaaggaaggacagggtgtgattcatttagtagcagcactgggttatgattgggctataagaccgataatgattgctggtgtcaatgtgaacttccgggatgctcatggatggactgcactccactgggctgcatctttgggaagagagcggacagttagtgtcctcatagcaaatggagctgcagcaggagcactaaccgatccaacttctgagttcccttctggaagaagtccagctgatttagcttcagtaaatggacacaaggggattgctggttttctcgcagaatctgctttgacaagccatctgtcagcacttactattagggaatcaaatgatagcactgtagaagcgtgtgggctaccatttgctgaagatctcactggcatcgattctgtccatctcgctggagagggtcctgatgctgaatcacttgaaggttctttaagtgccgtgcggaaatccactcaagctgcagctcgtatatttcaagccttcagggtggagtcattccacagaaagaaagtcgtggaatacggagatgacacctgtggattatctgatgaatgcacactttcacttgtttctcttaaaaatgtcaaaccaggacaacatgatacacatctgcattctgctgctgttcgcatacagaacaagtttcgcggatggaagggaagaaaggaatttatgatcattcgccagagaattgtcaagctacaggctcatgtacgaggacatcaagtgaggaagaactatcggaaggtagtctggtcagtcggtatcgtcgagaaggtcatactgagatggaggagaaagaggcctgggttacgcgggtttcggcccgagaaacaactagaaggtccatcgcaaatccaacctgcaaaggctgaagatgaatacgatttcttgcacgacggcagaaggcaggccgaagccaggctacagagagcacttgcccgggtgcactctatgtcacagtacccagaagcgagagagcagtaccacaggcttacaacctgcgttgctgaaatgaaacagtccaggatgatgcaggatgagatgctaagccaggcggctggtggtgcggacgatttcatggctggactggaggacttgatctgcatagatgatgccccgccccgatgtctgccattcggtgaagctgagcctttttacatcagataggcagggaggcggtttccttgctccccttttgtcagactagccctgtaaatattcttcagctagttgttcaccccgactgtttactcgctttctgctagtgtacaactataacatagtttcaatgcactgattatcggtagaataatcgcctcttatttgatatatagtttatattaattcaacgtattttatggttttatctgtaattctgcattcgtatcgagccataacagtgtgaatttgcgacatccgccatgacccaataatacaagcaccatggcggcggatctgtttgaatgcactatagccaaaccaactaagacttagtttcatagtttgagtactctagtattgaccataatctatatgtattgagttggattggagtgtaacttaaactaatttacatcccaa

SEQ ID NO: 9432 - DNA, 1037 bp, Zea Mays
agcattttgtttttttcagaataatgatgattcatgccttgcctatgtattaggagccatttctaatctattatcaaagataggcatctcaaacacagttggaataatcagttctccatattcacttgggaccaatattggactaggcacaccattatccattcagcaacagttacttgttcttttaaagcgatcactcaagagagctgatgcattgaaacttccaagtttactatcctttgatcacctttcgcttgcaaaatttgatctgaagcatgtccaaaggccactagtctctttcggccctaatgcatctacaaagcttagaacatgtcctgcagatgtctgtaagaatctaaggttaggttcccgtgtgttgactgactttggagcagatgttctatctacttcaaatgataatggtagttttagcacttcttggcttaggaatctatccgccacttctgattcatggcgtagcagttcaaagaacaccaaaaaaatacatattaatgacttcgacaatttccattatcatgcacaaccaagtccagtacctgcatcaatattgcaattagctggctcagcatatttgctgagagctaccgcttgggagcactatgggagtgctccaatggtacgaatgaatgttctagtttatgcaacctgctttgcggatgctgcaagttcatcagagttatcactagcatatgttaagctaattcaacaactggcggtgttcaaaggatattcagctgcattctgtgctctaaagcttgctgaaaagaagttcccatcctcaacaagtttacacatccagcttctaggaatgcagattctacatgagcgcgcacttcatcgagggcatctaaaagtcgcgcaacaaatctgtgatgagtttggggtgttatcatcttctgtttctggagtagacattgagctaaagacagaatttagtgtacggcgtgctcgcactctccttgccgcaaaacagtttagccagtacatgaactgacagaataaaacctgtttgtgac

SEQ ID NO: 9433 - DNA, 1767 bp, Zea Mays
atggcgctccgtcgctgcaatgccgccgcgcaacgtcgccaggcttcaccgacgccgaatccgaggtatgtggcctcctcagttgttcatcgtggtccgcttgtcgtgctaagcctttcgggtggtggttggtgcgcgggggcgtcggagcatgaaggcatgataccttctgtgaggatctctcctggctatgcagccttctctggctccagcctacgcttaaaattacattcaattccatccatctctagtctcaaaccctccaaatatgtggtctcctcgctgaaaccactctacctagcaccgctagatggtccacacacttctgagcttaagtcttggagacaaccacttgagttccgttgtgctgcttctgctgccgatgacaaggagtcaaagactcaggtggtgccagttcagttggaaggcgcacagaggttaaagatctccatctatttcgcgacctggtgggcgcttaatgtgatatttaacatttacaacaagaaggttctcaatgctttcccttacccctggctcacctccacactctcccttgcctgcggctctgcgatgatgcttttctcgtgggccactcgtcttgttgaggcccccaagaccgacctagacttctggaaagttcttttcccggttgctgtggcacatacaattggccatgttgctgcgacagtgagcatgtctaaggtggcagtgtcattcacacacataattaaaagtgcagaacctgcattcactgttttggtgtcaaagttcctccttggggagacgtttccagttccagtctatctttctcttcttccaatcattggtggttgtgctctagctgctgtcacagagctgaactttaatatggttggatttatgggtgctatgatatccaaccttgcatttgttttccgcaacatcttctcgaagaggggcatgaaggggaagttcgtcagtggcatgaattactatgcttgcctgtcaataatgtcgctggtcatactgactccatttgctatagctatggaaggtcctcagatgtgggctgctggttggcaaaaggctgttgcagaagttggacccaatgttgtctggtggatcgctgcacagagcgtgttctatcacttatataaccaggtgtcctacatgtctctcgatcagatctctccattgacgtttagcattggcaatacaatgaaacgtatatcagtgattgtttcatctataattatcttccacacgcctgtccgccctgtcaatgcactgggagctgccattgccatccttggcacattcctgtactctcaggcaaaggcgtgaggctaaagctttggccaaaggatcggagccagtagcaggcactggatccagttttgcttgttggagtggcatgtagatataaggccgtgacatgaaccgtcgtcaagtgtacctgaataacaccgtaacgaaattcaccgatgctgtttctttatggtattttagcagagctaagctgcgagccatgaccatgaccatgagcgcttgaacctccctacctttctggcgtttgagcatcatcagaagttagcttgaacaagcaagagtgaagatttcgaaggcttgaagaatgttctctgcatcagtgtacaaatatattgcagggctagtacaacaaagtagaatgtgatgttatgtttagctgcattgtgattgctttgccagtttacatgtaacaactaaaaagatagctgggacgtaaaataatactacctttgttctcgg

SEQ ID NO: 9434 - DNA, 4190 bp, Zea Mays
cacttcgcttctcactcgatctgctttgctctgctctcggtctcggctgcttgcctgcttcgagtcgtcgccggcgggagcagagaacccacccgcacggtgcgatgtcgttgaccgcggcccccgtggccttcatcggcctggacgagctcagcgttgagctagctgcctccttcctccgctccggcgcttgcgtccgctccttcacccccgaggcggaacggtcgccttctgcggcgctcgcggagttgaatggcctcctccagtgcgcgagcccagtggaagccgcgcgagatgctgcgctggtcgtcgtgctaagcgatgctggtggggttgacgagttgttcttcggggttgaggggatcgcgaaagggttatgcgcgggttctattgtattgattcattcgacattgctgcctagtcagttggagaagctggagcaggagcttacagatcagaagaaggatgtcttccttctggatggatacattttcactggtttatctgatgaattaaagcaacagattattattgttgcatctgggagacaggacatagcagaaaaagctagcaaatttttccatggtctatacaaaaccatttattttgctgaaggtgaattctgcactagcagaaaaattaggatggtgaatgatttgctggagggcattcattttgttgcgtctattgaagcaatgtatcttggtgttcgagctgggattcatccaacaattatttatgacataatatcgaatgctgctgggagctcgaggatatttgtggagttagttccaaaacttctgagtgaagatcctttgctgattgattttctaaaatcaacaaggaaaaaagcaagccatgtgatggatatgtcaaaatcagtaacatttccactgccacttctgggtgttgcctatcaacaattggtacatggttcatcagcagtaactggagatggatctgcctcaccgctgaaggtttgggaagcatcgtttggagtaaatattgtagatgctgctggcgaacaaatttatgatgcaagcaaattagctgatcagcttgttgcggaatctaaagcagcgaagcggattggcttcattggtcttggagctatgggctttggaatggcatctcatttgctgaaatcagggttctgtgttgttgcttatgatgtctacaagccaacaatggccaggtttgctgatttgggtggatcaacaaaaggttctcctgaggaaatagcaaaagatgtggaaatacttattatcatggttgcaaatgagtctcaagctgatagtgttctttttggaaacgctggtgctgtaccagttttatctgctggaacatctgtcatcctttcttctacagtttctcctggatttgtgatccacctcaacagaagattagaagctgaatgccgacagataaagttggttgatgctccagtatctggtggtgtcaaaagggcggcggatgggacactaactataatgacttcagggacagatgaagccctccattgcactggttctgttctatcagcgctgagtgaaaagttgtatgtaatcaaaggaggatgtggagctgcaagttctgttaagatggtcaaccaacttcttgctggggttcatatagcttcagcagctgaagccatgtcatttgctgctcgactaaatttgagaacgagaagagtcttcgaaattatgcaacatgcaaggggttattcatggatgtttggaaatcgtgtgccacacatgctcgataatgattatacaccctattctgcagtggatatatttgtcaaggatcttggtatagtatcttgtgaaagttccaattcgaggatcccagttcacgtctctagtatagcccaccagctgtttatttcaggatctgcttctgggtggggtagatatgacgatgctgccgttgtgaaggtctatgagacattaactggtgtaaaagttgaagggaaggctccgatgctcagtaaagaagatgttcttcagtctcttccatctgaatggccagaagatccaattgataatcttgtacctattgcatctcatagtagcaaaaagtttcttgtagttttagatgatgatccaactgggactcaaacagttcatgatatagaagttttaactgaatggcctgttgaagcccttgttgaacagttcctcaagctaccaacttgcttttttattttgacaaactctcgttccatgactgctgataaggccatgctgctagtacaaactatctgtaaaaatcttaaagctgcggcagagaaggtccctggtgttagttatacaatagtcttgagaggtgattcaactctacgtggtcatttcccagaggtgagatggatgcttggataatctgtccattttttcttcaaggtgggagatacactattaacgacatccactacgtcgcagactctgatagattaattcctgctggtgaaaccgaatttgccaaggatgcagtttttggctataaatcttccaatctcagacagtgggttgaagagaagaccaaaggacgggttttggagaaccaagtttcaacaatttccataactctcttgcgtaaacaaggaccaactgctgtttgtgagcatctctgtagcttggagaaggtgtctgtcgagatggtttcaatgaaatcaatggaggacagagaccaagaaatcagacgaattgttgaactagggaatgcttatatacaatccagaaaagacactctaattctcaccagccgccaactcattactggaaaaactcctgaagaaagcttagaaattaattataaagtgagttcagcactagtggagattgtgagaaggattgatagtaaacctcattatatcattgcaaagggaggaatcacttcatctgatattgctacaaaggcgctggaagctaaacgtgccaaagtcatgggacaagcattagctggtgtacccttgtggcagcttggtcctgagagtagatttcctggggtcccttacattgtttttcctggtaatgttggtgataacagtgctcttgctaaagtggtgaaaagttgggcttccccatctagaagttctacaaaagaaattcttcttaatgcggagaagggcggttatgctgttggtgctttcaatgtgtataaccttgagggaattgaagctgttgttgcagcagcagaggctgaaaagagtcctgctattcttcagattcatccgagtgctctaaagcaaggtggagtcccactggtagcatgttgcattgctgctgcagaacaatccagtggatttgattcagtcatggtggatggttctcatctaactttaggggataacatcttatacacaaagagcatatcttccttggctcatgcaaaaggtttacttgtggaagctgagttgggtaggctctcaggctctgaagatggcatgaccgttgaagaatatgaagcaagatttactgatgttgcccaggctgaggaatttattgatgagacaagcattgatgctctagcagtttgcattggaaatgttcatggaaaatatccacctagtggaccaaaccttaaattcgacttgctaaaggaccttcgtgcattaacattaaagaaaggagttagcttggtcctccatggagcatctggtctatctcatgagctcgtaaaggagtgcatagacttgggcgtgagaaaattcaatgtgaacaccgaggttcggaacagctacctggcgtccctcagaaagccagaaaaggacttgattcaggtgatggcgtctgctaaagaggcaatgaaagctgttgtagcagagaagctgcgcctgtttggatcgtgtgggaaagcctgagcgaagtacttgcgttgcgccggcaacatgcagtacaagaccgactgcatcatcgggttcgtgatgctgctgctactgtgcagttgcttacagttacagctcattgcgttgaacagctgaagtggttattgtactttgcagtgtagcgcaactaaggctaattcataaatcgtaataatgtatgtatgctgccccgctgtaaaaatgctccgtcgttaataaatgccatcgcgcttgctgtgcctttgtttacatttttattcgcctctcgagtgttctaacatgcaatctcagttgtcctatttagccctagtttgaaaactcaaat

SEQ ID NO: 9435 - DNA, 3121 bp, Zea Mays
cccttcaagtcccagggatggcgaggatgttgcaattaccattgggcgccccaagtggacctaagttcggcaccatgatgggtgtctttgttccatgcttgcagaacatcttgggaatcatttattatatccgttttacctggattgtaggtatgtcaggtgtatggcagtcacttgtgttggtttcattttgtggtgcatgcacatttttgacctcgatatcattaagtgccattgcaacgaatggagctatgaagggtggtgggccatattatcttataggccgtgcacttggtcctgaagttggagttagtataggattatgcttcttcctcgggaatgcagtggctggatccatgtatgtgcttggggctgtagaaacctttcttgacgctgttccttctgctggacttttccaaaagagtgtaacagttgtcaacaatacattagtgaatggtacagaaactgctggcacgtcaactatatctacacccagcttgcacgatcttcaagtgtatggtgttattgtgaccatactgctgtgttttattgtgttcggtggtgtcaaaattatcaacaaggttgcacctgctttcttaataccagtcctgttttctttgctgtgcatctatcttggtgtcttcattgcaccaaggcataatgctccaaagggaatcactggattgagtataaccacattgaaagacaattggggtgaaaactatcaacgtacaaataatgctggcgttcctgatccaagtggatcaatatattgggatttcaagtaagttaaacagaatggcaggatgtgctttggtaggtctgtttttcccagcagtcactggaattatggctggctcaaaccgatctgcttcactgaaagatacacagcgttcgataccaatcggcacattatctgcaactctttcaacaactgctatgtacttgttctctgtgcttctgtttggagccttggccacacgggaagagcttctaactgataggcttcttactgctacggtggcttggcctgctcctgcagtgatttacattggtattattctgtccaccttaggtgcagcactgcagagtttgactggggctccaaggttgcttgcagcaattgcgaatgatgacattcttcctgttcttaattacttcaaagtttctgagggatctgagccacatgcggccactttattcacagctttcatctgtatttgctgtgttgttattggaaacttggatttgattacccccactatcacaatgtttttccttctgtgctatgctggcgtgaacctgtcatgctttctgcttgacctccttgatgctcctagttggcgccctagatggaaatttcaccattggagcctttcacttgttggggcattactctgtgttgcctcatctattactatgtgagcataaaagggaaggctggagactggggagatgggttcaagagtgcatactttcaattggccctccgaagtctcagatcacttggagcaaaccaagtccatcctaagaattggtaccccattcctctggtattctgccgtccatggggtaaacttccggaaaatgttccttgtcatccaaaacttgcagacttcgctaattgtatgaagaagaagggtcgtggtatgtccatttttgtctcgataattgatggtgattatcatgaactagctgaggatgcaaagactgcctgccgccaactagatgcttatattgactacaaacgctgtgagggtgttgcagagatcattgtagctcctaatatgtctgatggtttccgtagcattgtgcagacaatgggcctaggaaacttaaaaccaaatattgttgtgatgcggtaccctgagatctggcgacgtgagaatttgacacagataccgtcaacatttgtcagcataataaatgattgcattattgctaacaaggcagtagtcattgtgaagggactcgatgagtggcctaatgagtaccagcgacaatacggtactattgacctctactggattgtaagagatggaggattgatgcttcttctgtctcagctcctgctgacaaaggagagttttgagagctgtaagatccaagtattctgcatatctgaagaggatacagatgcagaggagttgaaggctgatgtcaagaagttcttgtatgatcttaggatgcaagctgaggtcattgttgtcactatgaaatcatgggaatcacacatggagagcagcagtaacggcgctcagcaggataactcccatgaggcttacacaagcgcacagcaaaggatcaggacataccttgatgagatgaaggaaactgctcaaacagaaaggcagttactaatggagaatgggaggcaagttgtgaacgaacagaaggttgataaattcctttacacaatgtttaagttgaactccacgatactcaggtactccagaatggcagctgtagttcttgtgagccttcctccaccgccattataccatccttcatatttctacatggagtacatggatttgcttgtagagaatgtcccacgcatgttaatagttaggggatatacgagagatgttgtcacatttttcacatgattatacatacgaacttctcacctggagactctagtgccgtcaggctgttgtactatctcagcagagactggatacacaagagcgtggaatctaccactgaaatgacaagccctcaccttgaaggcaaccacgatgagatgtcagatgtgcagagctgttgttcgcatattggattcgtgaactattgaactgcagtgtcttcattcttttttctggatttaaaagatccacatagcgagctttgattcttacagattttgtagctatcatatgtaaacacttaccatcttgtaattgtaagcatacttacatgctggcccaaagacaaatgcaatccttaccttctcactgaaacatttatataggtattttttttgcatcacttgtatgcgtctaaaactgatggacttgttgagatgagcagagctgcgaattttgaatggctacccccaaatgaattttggttatgctttgtcgcaaatatttggttttaatggtacaagatttctgag

SEQ ID NO: 9436 - DNA, 3095 bp, Zea Mays
cgagaattcctttcgttgcgcgttgcaagtgcaagtgcaacccgccgatccgcgcacacagccgaccgccgccgccatggaggacgtcctgacaccgccgccgcagccggaactcgtcggagagaagcgtaagagggatgagacttcgctggatgcgtccattgaagacgctccagccgcccccgcctccaccggcggcgccgaggatgcggccggcagcgacgtcgcccggcacccgatgtggaagacgagcctgtgctcctactttcgccgtcgcggcgccggcgccgaagagtgcagccacggggagtcctgccgttacgcgcacaccgaggaggagctccgcccgcgtcccgacggcacctgggaccccacctctgaccgcgccaagaagctgcgcaaggtcgccgcggaggcccaggaggaggccgaggaggaggtcacggtggatgagcagtcacttgaaaagtgcctcgtcgggctccccatggggtggacggctgataggctcaagcccttcctccaggaccagggaatctcatatgcaatagcaaagaaaaagaagggaatgacagttggttttgtgacttttcagagtgttgaacaactaacaaatgctgttcagatccttaagaagaacccttctggtggaaaggaaataaagatagtagatgccaatcgtaggtctcatcaaaaagcacatgatggagcacttgtatccaatactggaaccacaacagaaaatggtagcagtcctactacacctgcagaggaaacatctgtgcttgaatcggtgtcatcaagtaaaaaaggtgcccgtgatgcagttactccccttgccaatatgacttacattgatcagctagaacacaaaaatcaatctatggcacagatactgaagaaacttactcgcaatgctaggaaagcttgcccacctgccattccccatcctgattgggtttttaaatcaaaggaaatcggtggtcttccttgcaagtttgaaggcattttggagtccccagttgttaatggataccgtaacaagtgtgagttctctgtaggatattccttagagggcaaaaagacagtaggatttatgctcggaaatttcagggaaggtgtgactgctgttgaggaacctgtgaattgtccaaatgtctcagaaatttcctgcaaatacgctcagatgttccaagattttcttcaaccatcaagtttccctttgtggagcaggattgacaactctgggttttggcgccaactcacagtccgtgaaggaagatgtccagctgaagctgttgtttcacagaatgcagaatcacaaatatcagaagtcatgcttattgtgcaggatgatccatcgtcacctcattcctcacaagccaataactaatactagtatgaggaatggagtcattccatcaaatttgaggaatgatctcatgatgcaacacctcatctggtgtgttcaacaggtgttgatgaagctcttatgaaagaagagtttgacaagctgtctgctatcctgatacaaggagcagcaacatgctcacctcccttgccactgacaactattgtagtgcaagatcataaagggatatcaaatgctgcacctactgattgcccactgatcccactattggtaccaaagggagatcagttggatggcacaacagaagataaaataagaatccatgatcacataagcaacttaaagttctctctatcaccaacagcttttttccaggttaatactcttgctgcggaaaggttgtacacccttgctggtgattgggctaatctcaattcagacacattactttttgatgtgtgttgtgggactggaactattggcctgaccttagcacagcatgttggaatggttgttgggattgaaatgaatgaatcggcagtttcaaatgcttgcagaaatgcccttgtcaatggcataaaaaattgtcgttttgtctgtggtaaggctgaagatgtgatggggccccttctcacagaatatcttggttcaccacagcagcaggctgcagcttctaaaagtaattctgaaatcgatgatgcaagcaaaaatgaggatacaattggctgtgcaagttatgatggtgaaaatatagatagctcaaagcagagaaatgacaatgctgaaggtcagcagcctatgggtgcgtcagttgatcatcctacctgtgcaagcgaggtggatgaaaacaatgtggcttctggtgaacagaattgtggggaagcatcattggttaatgataaacccattgagacagcatcagataatagtttggagcaaggcaaggcatgcaaggatggttcttccagtccaaacaacaatgtccttgctgctaatgcatgccagtttaagaatgtcgttgctattgtagactctccacgtgttggccttcgccctactgtcaggggttgggacaggattattcaagtgttgtccacagttgtccctcaaaattggagggacgagagagaacaccagagtgatcaaggcattgaggacgcatccacgtattcgacgtctagtgtacgtttcctgcaaccctgacagtctagtcgccaacgcgatcgagctttgcacaccaacatccgagaaacaagagaagaacaagggcaaccgagggtggcggtctatgagcagcgcggggcttgctcggcagaggacgaagtcgatgcccaactctgagccttttatccccaagagggcaatggctgtcgatctgttccctcacacgccgcattgcgagatggttatgctctttgagagatgaaggaagtgtgtgtctaccaatgcctcagattcttgacctgtgtcgaggaccctatcagtttttcctcatcaccttggcccatccatatgttgtaacttagtgacatctattcgattgagaggccaggacagttggtggtgggatttgccttcttttgatataggatcggctactcttaatcacctgtacgtatttattgtttttgttaaatggatgtaatagtaggattaatttcaaagaaaaaaaaagagaaaatgattcctagagattgagttacagtaggtccaggctgatgag

SEQ ID NO: 9437 - DNA, 3044 bp, Zea Mays
aaaatcctaaaaattccaccaccaccgaaccgagcactttcgctacgcaaacacgcgcgtggaaaacaaaacggcacacaaattatttattttttttcctttttcgatcccagacacaacacaagactgaaaaagtcagcgaggaaggaaaaaaaaatctgcgaggcagcgcagccggacgaggaggaggaggtcaggactcaggaggagaggcgtcgcggactcgcggtggcagtgccgcgcacggcaacccaacccagctcagctccggcgaggacgcaaccgttgacgtcgctcttggcctcgcctcgttatttgaggtcgcgcggccgcgagccggggtccagatcgagtctcgcgcgaggtgtttcggcaccgcgaaatgccgcctccggctgcgatgctgctccttacggcggcctcggggcctcccacgctgtcgctgaccctggccgcgaggcgggcgccgctccgggccccaagccggcggaggctgcgggcgctgcggccggcgaggatccgcgccgccgcggcgatcggtggcgagttcggcggcctcggccggcgccgcgtcgtcgtgggagagttcatcgagcgcctgcgcaacgttctgcccgggggcagttggtggcgcctcgaggacggcgatgaggccggggacggggccggccgcgcagaggggagcggtaccaccgccgtgtccgcgctcaggcggatgtgggccctcgttgccggcgacagattggtcatctatgtcggcttcgcgtccctcgtcggcgctgcgctttcggagatcgccataccacatctccttgcagcgtccattttctctgcgcagaatggaggcgcggtgttctaccgaaatgccaagcttctggttgtcctatgtctggtttccggggtgtttagtggcatacgaagttgctgttttggtgttgcaaacatgatattggatatttccttttttgatgaagaaacagtaggagatctgacaagtagacttggttcggactgccaacaagtgtctcgtgttataggcaatgaccttaacctgatttcacgcaatttacttcagggtgcaggtgcattaatttatctgctagtcttatcttggcctctcggattgtgtacaatgtttgtttgtgcaactctatcagcaattatgctagttcatggacggtttcagaaaagggcagctaaatttgcacaggagttcaccgcaaacgccaataatgttgctcaagaggtgataactttggttaggacagtgcgagtatatggaacagaaaagcaggagtttaaaaggtatgcaaactggcttgataagctgtatgatgtgagctttcggcagacagtggcttatggaggctggagcctgagcttgaactatctataccattctactcaggtcattggagtggtgattggaggcctagcaatcatgtctgggaagttaactgctgagcagttgacaaaattcacactctatgctgaatggctaattttgtccacatggtggattggggacaactggtcctccctgatgcagtctgtcggagcaagtgaaaaagtttttcgtttaatggatctccttcctagcaagcagcttagctctgaaggcctcaagttagagaagttgaaagggcaaattcagtatgctgatgtatcattttcatatccatcaagacctacggtaccaattttgggaggcttgaatttaacactgaatccaaacgaagtagttgcaattgttggtcttagtggaagtggcaagagcactataatcaatttactacttagattatacgaacctacaaatgggcaaatactaattgatggtgtcccgctcactgagcttgatatcagatggttcagggaaagaattggtttcgtcggacaggaaccacgcttattccgaatggatatcagctctaatattaaatatggttgcccaagagatgtcagtcatgaagaagtgatatgggctgcaaagcaggcctatgctcatgacttcataatggctttgcctgatggttataacaccatcgttgatgatgctcttctcagtggaggtcagaaacaacgtgttgctattgccagggcccttctgagggacccatctatcttactgcttgatgaagccactagtgcgcttgatgctgagagtgaacattatgtcaagagcgtcatcacaaaagttagtcgagattcaaaggctaaaagaactgtggtaatcatagcacacaggctatctacaattcaaacagctgatagaattattgtgatggaaaatggtaatattgtggaggatggtaaacacattgatcttattgagaagggtggtctatattcaagattagccaggcgacaaaatgacgatctcaagtagccctggatcacagaatgtggtttagtgcacgccttctttttaaatggaatggcagaagggagagtcgtctgtcattagtgtattctttgcaagaactgacctggacccaggagctcgaataagctggcattgtttttcccatgaaccagaaacggtttgtgactgatcaaaataaaccaaaacggtttcccccacgaggacgagcacattaagcatcgagagcggcagtatggagaacagacttctaagaggtccagtattgtaaaagtagcttccataacaaagtgtatatgcgtttttatcttgttatcgggaactctgaaacttatcttacactacacacggaggaaacgctccaattttgttacgagcactgtgtgccttatttcctgaattttcgtgtaaaaatgtactccctgcgtcccaaaacagttgacgttataatatttatagttaaacttgtaacttaaattattagcaacataaattattataaaaatatatttaaagatctattgaaatattttttttggttgttttaggatcgggggactatgccattcacgtagaatcgtgtttgtattttacgaagaaattggtctccttgttacgatgcactatgctttgccctggcagccccttcatccatgataac

SEQ ID NO: 9438 - DNA, 3099 bp, Zea Mays
aaaatcctaaaaattccaccaccaccgaaccgagcactttcgctacgcaaacacgcgcgtggaaaacaaaacggcacacaaattatttattttttttcctttttcgatcccagacacaacacaagactgaaaaagtcagcgaggaaggaaaaaaaaatctgcgaggcagcgcagccggacgaggaggaggaggtcaggactcaggaggagaggcgtcgcggactcgcggtggcagtgccgcgcacggcaacccaacccagctcagctccggcgaggacgcaaccgttgacgtcgctcttggcctcgcctcgttatttgaggtcgcgcggccgcgagccggggtccagatcgagtctcgcgcgaggtgtttcggcaccgcgaaatgccgcctccggctgcgatgctgctccttacggcggcctcggggcctcccacgctgtcgctgaccctggccgcgaggcgggcgccgctccgggccccaagccggcggaggctgcgggcgctgcggccggcgaggatccgcgccgccgcggcgatcggtggcgagttcggcggcctcggccggcgccgcgtcgtcgtgggagagttcatcgagcgcctgcgcaacgttctgcccgggggcagttggtggcgcctcgaggacggcgatgaggccggggacggggccggccgcgcagaggggagcggtaccaccgccgtgtccgcgctcaggcggatgtgggccctcgttgccggcgacagattggtcatctatgtcggcttcgcgtccctcgtcggcgctgcgctttcggagatcgccataccacatctccttgcagcgtccattttctctgcgcagaatggaggcgcggtgttctaccgaaatgccaagcttctggttgtcctatgtctggtttccggggtgtttagtggcatacgaagttgctgttttggtgttgcaaacatgatattggttaaacggatgagagaggagttatttgattccattctttcacaggatatttccttttttgatgaagaaacagtaggagatctgacaagtagacttggttcggactgccaacaagtgtctcgtgttataggcaatgaccttaacctgatttcacgcaatttacttcagggtgcaggtgcattaatttatctgctagtcttatcttggcctctcggattgtgtacaatgtttgtttgtgcaactctatcagcaattatgctagttcatggacggtttcagaaaagggcagctaaatttgcacaggagttcaccgcaaacgccaataatgttgctcaagaggtgataactttggttaggacagtgcgagtatatggaacagaaaagcaggagtttaaaaggtatgcaaactggcttgataagctgtatgatgtgagctttcggcagacagtggcttatggaggctggagcctgagcttgaactatctataccattctactcagctttgcgtaggtcattggagtggtgattggaggcctagcaatcatgtctgggaagttaactgctgagcagttgacaaaattcacactctatgctgaatggctaattttgtccacatggtggattggggacaactggtcctccctgatgcagtctgtcggagcaagtgaaaaagtttttcgtttaatggatctccttcctagcaagcagcttagctctgaaggcctcaagttagagaagttgaaagggcaaattcagtatgctgatgtatcattttcatatccatcaagacctacggtaccaattttgggaggcttgaatttaacactgaatccaaacgaagtagttgcaattgttggtcttagtggaagtggcaagagcactataatcaatttactacttagattatacgaacctacaaatgggcaaatactaattgatggtgtcccgctcactgagcttgatatcagatggttcagggaaagaattggtttcgtcggacaggaaccacgcttattccgaatggatatcagctctaatattaaatatggttgcccaagagatgtcagtcatgaagaagtgatatgggctgcaaagcaggcctatgctcatgacttcataatggctttgcctgatggttataacaccatcgttgatgatgctcttctcagtggaggtcagaaacaacgtgttgctattgccagggcccttctgagggacccatctatcttactgcttgatgaagccactagtgcgcttgatgctgagagtgaacattatgtcaagagcgtcatcacaaaagttagtcgagattcaaaggctaaaagaactgtggtaatcatagcacacaggctatctacaattcaaacagctgatagaattattgtgatggaaaatggtaatattgtggaggatggtaaacacattgatcttattgagaagggtggtctatattcaagattagccaggcgacaaaatgacgatctcaagtagccctggatcacagaatgtggtttagtgcacgccttctttttaaatggaatggcagaagggagagtcgtctgtcattagtgtattctttgcaagaactgacctggacccaggagctcgaataagctggcattgtttttcccatgaaccagaaacggtttgtgactgatcaaaataaaccaaaacggtttcccccacgaggacgagcacattaagcatcgagagcggcagtatggagaacagacttctaagaggtccagtattgtaaaagtagcttccataacaaagtgtatatgcgtttttatcttgttatcgggaactctgaaacttatcttacactacacacggaggaaacgctccaattttgttacgagcactgtgtgccttatttcctgaattttcgtgtaaaaatgtactccctgcgtcccaaaacagttgacgttataatatttatagttaaacttgtaacttaaattattagcaacataaattattataaaaatatatttaaagatctattgaaatattttttttggttgttttaggatcgggggactatgccattcacgtagaatcgtgtttgtattttacgaagaaattggtctccttgttacgatgcactatgctttgccctggcagccccttcatccatgataac

SEQ ID NO: 9439 - DNA, 3398 bp, Zea Mays
aaaatcctaaaaattccaccaccaccgaaccgagcactttcgctacgcaaacacgcgcgtggaaaacaaaacggcacacaaattatttattttttttcctttttcgatcccagacacaacacaagactgaaaaagtcagcgaggaaggaaaaaaaaatctgcgaggcagcgcagccggacgaggaggaggaggtcaggactcaggaggagaggcgtcgcggactcgcggtggcagtgccgcgcacggcaacccaacccagctcagctccggcgaggacgcaaccgttgacgtcgctcttggcctcgcctcgttatttgaggtcgcgcggccgcgagccggggtccagatcgagtctcgcgcgaggtgtttcggcaccgcgaaatgccgcctccggctgcgatgctgctccttacggcggcctcggggcctcccacgctgtcgctgaccctggccgcgaggcgggcgccgctccgggccccaagccggcggaggctgcgggcgctgcggccggcgaggatccgcgccgccgcggcgatcggtggcgagttcggcggcctcggccggcgccgcgtcgtcgtgggagagttcatcgagcgcctgcgcaacgttctgcccgggggcagttggtggcgcctcgaggacggcgatgaggccggggacggggccggccgcgcagaggggagcggtaccaccgccgtgtccgcgctcaggcggatgtgggccctcgttgccggcgacagattggtcatctatgtcggcttcgcgtccctcgtcggcgctgcgctttcggagatcgccataccacatctccttgcagcgtccattttctctgcgcagaatggaggcgcggtgttctaccgaaatgccaagcttctggttgtcctatgtctggtttccggggtgtttagactgtagtttgtactgtagcgttctgaaagctctgtgatcagcaaagtttggaagcatactctgacacatttgggagttgagaagttctcatgtatgtgcaatataatgatgattaaaaaagcgggtcatagagaaaattatgcttgctacaggccattatgaaaaatgcacatatacaaacgcacacaaacagaaacgaggaactttttatgatactctgtactgaattattaaaattgattattgcattctgcatggttttgtgaaacaaatgaggttgcttatgtaatggtgtccctaacttgcagtggcatacgaagttgctgttttggtgttgcaaacatgatattggttaaacggatgagagaggagttatttgattccattctttcacaggatatttccttttttgatgaagaaacagtaggagatctgacaagtagacttggttcggactgccaacaagtgtctcgtgttataggcaatgaccttaacctgatttcacgcaatttacttcagggtgcaggtgcattaatttatctgctagtcttatcttggcctctcggattgtgtacaatgtttgtttgtgcaactctatcagcaattatgctagttcatggacggtttcagaaaagggcagctaaatttgcacaggagttcaccgcaaacgccaataatgttgctcaagaggtgataactttggttaggacagtgcgagtatatggaacagaaaagcaggagtttaaaaggtatgcaaactggcttgataagctgtatgatgtgagctttcggcagacagtggcttatggaggctggagcctgagcttgaactatctataccattctactcaggtcattggagtggtgattggaggcctagcaatcatgtctgggaagttaactgctgagcagttgacaaaattcacactctatgctgaatggctaattttgtccacatggtggattggggacaactggtcctccctgatgcagtctgtcggagcaagtgaaaaagtttttcgtttaatggatctccttcctagcaagcagcttagctctgaaggcctcaagttagagaagttgaaagggcaaattcagtatgctgatgtatcattttcatatccatcaagacctacggtaccaattttgggaggcttgaatttaacactgaatccaaacgaagtagttgcaattgttggtcttagtggaagtggcaagagcactataatcaatttactacttagattatacgaacctacaaatgggcaaatactaattgatggtgtcccgctcactgagcttgatatcagatggttcagggaaagaattggtttcgtcggacaggaaccacgcttattccgaatggatatcagctctaatattaaatatggttgcccaagagatgtcagtcatgaagaagtgatatgggctgcaaagcaggcctatgctcatgacttcataatggctttgcctgatggttataacaccatcgttgatgatgctcttctcagtggaggtcagaaacaacgtgttgctattgccagggcccttctgagggacccatctatcttactgcttgatgaagccactagtgcgcttgatgctgagagtgaacattatgtcaagagcgtcatcacaaaagttagtcgagattcaaaggctaaaagaactgtggtaatcatagcacacaggctatctacaattcaaacagctgatagaattattgtgatggaaaatggtaatattgtggaggatggtaaacacattgatcttattgagaagggtggtctatattcaagattagccaggcgacaaaatgacgatctcaagtagccctggatcacagaatgtggtttagtgcacgccttctttttaaatggaatggcagaagggagagtcgtctgtcattagtgtattctttgcaagaactgacctggacccaggagctcgaataagctggcattgtttttcccatgaaccagaaacggtttgtgactgatcaaaataaaccaaaacggtttcccccacgaggacgagcacattaagcatcgagagcggcagtatggagaacagacttctaagaggtccagtattgtaaaagtagcttccataacaaagtgtatatgcgtttttatcttgttatcgggaactctgaaacttatcttacactacacacggaggaaacgctccaattttgttacgagcactgtgtgccttatttcctgaattttcgtgtaaaaatgtactccctgcgtcccaaaacagttgacgttataatatttatagttaaacttgtaacttaaattattagcaacataaattattataaaaatatatttaaagatctattgaaatattttttttggttgttttaggatcgggggactatgccattcacgtagaatcgtgtttgtattttacgaagaaattggtctccttgttacgatgcactatgctttgccctggcagccccttcatccatgataac

SEQ ID NO: 9440 - DNA, 1503 bp, Zea Mays
atggctctattttgcggcaactccaacggggaaagagaaacagaacgtgatagctggacaggaagaggtctctagctacattctagcctagtctgagacgacacgtacaccgataagctgcgtgcggcatgccatggcgtggtgcgtgggaccggaccgacaccgagaccagccgccaccgaatcccgccgctcttctggccgccgagttgtcaagcaacgcacgcaccacaagccgcccgcctcagttgaagccccgcggaaaggctggctgcgagtgcgagaccgaccaaacaaagaacacatatcaatcaccagctcacagtgggaggggacgcacgatcggcacccggccatcccctccctcctcttcctcgcacgtcctcttccattccagtaatgggctctgcttcatcagatggtctccgggagcacttgctggacgtggacggcggcggagcggcggcggtgcccaagatacgggtgcgcgggctgcggcgccgcgcggacgcgaccggcgaggagatcctccgcggcgtccacctcgacgtgccgcgcggggccgtcatgggcgtcatcggccccagcggcagcggcaagtccacgctgctccgcgcgctcaaccgcctctgggagcccgcgcccggcgccgtgctcctcgacggcgccgacatctgcgccctcgacgtcctcgccctgcgccgcaaggtcggcatgctcttccagctccccgccatgttcgacggaaccgtggctgacaacgtacgatacgggccgcagttgcgcggcaagaagctaaccgaggccgaagtgaagagcctgctgcacctggccgacctggaccctgctctgtgctccaagccggcgtccgagctgtcggtgctcctgctggacgagccgaccagcgcgctggaccccatctcgacgcagaacatcgaggaggccatcgtgcggctgaagaagacgagggggctcaccacggtgatcgtctcccacagcgtgaagcagatccagcgcatcgccgacctggtgtgcctcgtcgtcgccggcgaggtcgtggaggtgctcgcgccgtccgacctgtccgacgccaagcacccgatggccaggcgtttcttggagctcagcggctgaaagcccgcctgctcgctgctgcttcgttggatttcgaaactcttctacctaatcggatgctttcgagctgttctggatggaaaggatcggacgtgtggttatctttccaatcgcctatcatgttctctacttttgttctcgtgtatacatacaatctgttaaagtagcttctcacagctagaaagtgtttgcaatacaaacaagttcttggcggattagctttgttttttttcctgggcaactgttagtaattattgctaatctccaaactagtgttcatctcccaacggtacaaaacaacaatccaaaagtcttgtctttcagctttttcaattaatattaaacaaagtgcaaaggtcgattacatggg

SEQ ID NO: 9441 - DNA, 3082 bp, Zea Mays
gcctagactccttgagccttctcgtctccccccttcgtccgcaccctataacctttgcatcatcttccttgcccgcgccctaacccttgcaccctcctccttgctgccgccggggccgatctccgctgccgccagccatggaggacttctgcgtggtgtgcgcagatacgctggagtgggtggcctacggtccgtgcggtcaccgcgacgtgtgctccacctgcgtcgctcgcctccgtttcgtgatggacgataagaagtgctgcatctgcaagaccgtctgccccttcgtcttcgttactaaggccatgggtgaatacactagagtggttgctgatttctcagtgttccccattggggtaaatgagggcaaagctggtgatttctggtaccatgaggatactcaggcatactttgatgatgtggaccactacaggatgatacgggcaatgtgtcgactttcttgtagcgtttgtgacaatgcagaagatcaggttgcccttgctgctcaagcaaagcgcagaagcaagttcaggagcatcgatcaactaaagggacatttattccatgtgcataggttgcacatgtgcaatctttgcttggaggggaggaaggtgttcatttgtgaacaaaagctttattcaaggtctcagttagctcagcatatcaagactggtgactctgaagtggatggctctgagggaacactattcttgccacatatgccagaggcagcatcctgagcagtatgactattttcggaactatgatgaccttgagttgcattttcgaaaggaccattttctttgtgaagatgaagcatgcttggcaaagaagtttgttgtttttctgagtgaagcagagctgaagaggcataatgctatggagcacggtgggcgaatgtctcgttcccagaggaatgctgcacttcagatacctaccagttttatatatcgcagaaatgagcaagcacaacggcgtggcagaggtagggggcgtaatgctctccatgaccgatttgacagtcatatctcatcatctgcacaaaacggccaagcaactgccgatcgccgtcttgatagtgtttcagggtcatttcagtcattaagcattggatctagttctgggggagctgaagttggccaaggctcgaggactggacaagtgctcgaacagttgtccttcccacctcttttagacccagatattcctgacaacaacgttgattcttttcatgatgaaacctcatttccttcattatccgagcagcaatcaaggtatgcactagctctcagtcagagtgcaaggggcactgcgaggcttggggatgagtcactattcccccctttgcctgggtctagtgggtctaataacaataggggtgctggttcagtccaacagggactacaaagtctagccaagagcacacttgcagcaagacttcaacaacgtagcaagggccctgtgaaggtacttaatactgctcggccacgtccccctgaaaatgttgaagccctctctagttccacccagacatggcctacacctgatcagggcctagtcctgtctggatattctcagcttcgatctggaactcaaccaacaagggaaaatgccatgccaactatctccagtaacacagtgtggaatcctgttgctccaaacaagatgaagcactctgtttctacgcctaatcttgtgtctggtggatcctctgcccaagtatcattgagtacagcttatggtagcaacaaaagtcaggatcctcctcaaggtaaccaaactttgcctgttccagaggatttccgtgctgcaaacaaaactctggttgaaagaatgcgttctgctctgggaatggacgaggacaggtactctgcattcaaagagattgctggtgaataccgtcaaggtatcataggtactctggagtatctttcatatgtcgagcagtttggactgtcacaccttgttcctgaaatggctaggctattgcctgatcctcaaaaacagagggaacttgctgatgcatattatacaaatactcgatttaaaagcctacaagaaaacggaggtggaactagctcacaagagggcaaccgtaaaaagaaggggaaggggaaagctcctgtcacagaaagcagtgctgctaatgatgtgaatagtgcactagcagataacattctggagactgtaagaaggcttcaatcaaaccagcaggctcgggaaggaggagctgaggtgctgtcgaaggatgggtatcgaccttccaagggggtccaaccggcagctggatcttcatctaatctggacagtgatactagttccaacacaaaatcatctggtgcaaaagataacataggcaagggaggaggcaataagcaaccgaagaagacagcaaagtttctcagagctcgtttaggtgacaactcattagccacacttgatttaagtcgtccaagtgcaagccctgaacgtccagaaagggaattacaaggccctgagacagggttgccagcgcgaggtgcttggaagaatggcggggggcagaaactcttttcgagcaatggacggaaataagtcattccaactgcatagccgtggggacggggttgacagcgccaggtgcttggaagaaatggtggccagaaactcgtttttgagcaatggacaaagtgagtcactgcaactgcatttaggtgtgtccatatacctgatcaacaattaggcaatgccctgttcattgctaccggcagactgcgcaaatttcatagtcatccatttcaaattcgtaatgatgtggtgggcaacatttaatgtggtacaaatatactactagattttctgtgcattacaacggaacatgtttggtagtattgtccaaaaaaaacttgtcaagctaaaaccaagatacagagggtccgtgtcaacatgttactatgtgttttcagtgctttgtttttttaaaggaaatatcttgctgaagtatgcaaaccgtaatgtctaattaaacttatgattccataattttttcttagcccgttgtatcgtgaattggcgatagatgtatagtatatagcattag

SEQ ID NO: 9442 - DNA, 2684 bp, Zea Mays
agcgaagcagccacggtccgggccacgccaaaccaaaccaaacaaaccatcctctccctccctctctccccgctcgcttcttgcaactctcccgtaaatctgcacaggcgcagcgcggcatttaatgctctccaacctttggtctctgcctgcccccaaacgctcccccattccgtccactcccctctctccccaccaagcaccagcccacggatgcggtcgcgaccaccgcggcaaggtcgaatccatggctagagctagcagaagcagaagcagaagccgcgggctcggcgcttgagccctcgatcctcgggggtcccggttccttctccctgcattgatcgcgtcactcgacgcgagaaggcgagcaaagaggggaaaaaaaggaggatcctttcccgtgtttcttctgtcgattctgcggttctttgcaagtggcaatgaggcggcatgggtggcagctcccgtaccaccctctccaggtggtggccgtgtccgtcttcctggcgctggcgttcgcgttctacgtcttcttcgcacccttcgtcgggaggaaagtgttccagtacgtggtcatggggctatacactccgctggtattatgtgtcttctttctatacatctggtgtgccgcagcaaacccagcagatccaggggtcttcaaatcaaagaagtatctgagcttgtacggaagcggcaaacacaagcatctgaaggaatccagaaagacttcttcagatgctcggttacaaatagagggaactagagaaaaacaagagcatgaggtcgcagcatctagcgagaggtcaattactcaatacaaggacaataatccatcttgcttgagttcaaccctctctccttctctccttctattctaccctctctcttttgttttctcctgctgccaaccacatgaaagttcctctgagcagcaagccaccgaggaagggatgtttttctgcagcctatgtgaagttcaggtgttgaagtatagtaagcattgcagagtttgtgacaaatgtgttgatggttttgatcatcactgcaggtggctcaacaattgcattggaagaagaaactatagaaggttttttattctaatgtcaactgccgttatcttggtctccatggtttgtgcaatttgggccagcttatcctacaatcagcaattggagtattggtgctagtgctatgctttgttgagcgaaaggaattctctatgcaaattgtttcaaagcttggaagcagcttctctgtagtgccttttgttattgtggtggcatcatgtaccatcctagccatggtcgcttcactgcctgttgctcaacttctttttttccacattcttctgatcaagaagggaatcagtacctatgactacatcattgccctgcgagagcaagagcaagatgatctgagtgggcagcagagtccacagatgtctcgtgtaagctcctacaccggactcagcagtgctagttcctttggtccacttcgtcgtggttcatggtgcactccgccaaggctgtttcttgaggatcaggctgcttcttcgcataattctgctacgaagaggaaagaagaccaggggaagaggaaaaagggctcaggggccgtgaaaataagcccatgggcattagctcgtcttaacgctgaagaagtttcgagggttgctgcagaggcacggaataagtccaaagttttagtgccaatcagaaaagatgactattcacgaggccacgaaacagatagtagctatggaggcaccagcagtggtaggatcgatctaggacccgatagcaagaggagaacaaacagaagaggaagacagcccagtgatctctttctcaaacctgttgcaaagatatctacagatgctattgattctgccagcagcgacatgtccaatttagcaccattgcaacttgaggcacggagcgccttccatcccagcagggctgcatcctctgtgaatgttggtgggtcatctccagatagcagcttggattcgcctgacctgcatctgtacagagtctcagctgtctcatcgtctggagccgaagacttgcagctgacagctctcactgctccaggaagcacttcacatcaagggattcaactgtcgagatcgaccagcgatgggtatgaagcgtcagggggtgaagacagcgaccgcattccgtcacagatagtgcaccgctcgtcaaactgggcaagcatcatcctcaactctgaccagagtgcgtcctcgtctggcattcttgtgccgaagaacagattgtcctgaattcagataaatgaagattgtaaatgatcaaccaagaacgggaggttccagtatctgagctttgttttcaatgtcgaatcttgttgcagggatggcttgatactgcgcaaatcattaatttttttattagtttctgaatcgctaggtaggcaagtgtctgaatttcttccgtggggtgttcaggtgcttgtaattttgctgtcagacgacaatgaactgatttgtttagaggttggtaccttggatcaaatgcctgattagttggtgattgttcttgtggttgacttgtcggctctgacggcatgtacttatatgctgcaataggcaacgagcattcagaaagtactacatccatcctagaaaaaaatgccattatagaagactgtaatatttt

SEQ ID NO: 9443 - DNA, 2385 bp, Zea Mays
ttgaggtaatttaccttattttcataagctatgtattaaaaagtcactcacatacacatcatgcactcacccttatgaacacacatacacacaccctacctttatgaacactttcgagagactggcaggtttttgagattgaggaagttaccatgggtgtctcaatgtcaatggccatgtcacttaccactaaattgatagtgccatttgttcggaaaataggagcacctgtgcccaggtggttggttgcataaataagaaacttggctaccgctccaccttattctatagcactgttattcagggctgcagttcattctgtttgcacaatgcatgttttcatcttgttctttcttcagaatcttcttctacttttcttttttttactttacaggaaccagtgagctctgtatatgatctcatcaagttctgtgaaaagaatgtcttgcctgttgcacttgatgagactattgacaaccttaggggggatgtaatttgtaagcttcatcaatttgttcatccaggaataattgctcttgttataaagcctagtgttgttggaggttttgagaatgcagctcatattgccaaatgggcgcagctacatgataagatggccgtcatcagtagcacgtatgagagttctataggtttggcatcctatatacagttagcacattatgttgaccaacagagctctatagtctccagaataagaaacaaagatacatgtagagccactgcacatggacttggaacatatcagtggttaagggaagatgtatcagaacaaaagttaaagatccatgcatccccacttggtgacggaatccgagccacagtagaagatgcccatggttatcttcaccatttaaacataaacaatgagaagataaaaagtacgtatggtgaagaaaaacataggtcatattctatccaagttgatgtggacgattgttcttatctagtcaaacttcgagaggctggtgatcatacaaatgaaaaggttgtccttttacttcatggatttcttggtacaagtgaagactgggttcccacgatgaaagctcttgcccccagtgcacgggtaattgcaattgatcttcctggtcatggcgagtcacagatactgcaacgtcacaaaaattcagaacaacctgctgtaacagttcaactagttgcagatttgttgttgaagttgatataccacataactaatggtgaggtggtggtggttggctattcaatgggtgcaaggattgcactccacatggcactaaatcaagatcacaagatccgtggagctgttacaatatcaggaagtcctggactgagagatgaagcaagcagaagacgccgtattgctattgataaatcaagagcccagttcctgatgtgttgtggacttgaatgttttcttcagacatggtactctggaaaactgtggaccagtctacgagagcatcctgagtttaattctctggtgaggacacgcagtaaacacaaaaacatcaaagctctagctaaggttcttgcagactcaagcgtggggagacaaaagtcccctgtgggaagacctgaagcacttgaagaggcctttactcgtcgttgctggtgaaaaggacgcaaagttcaaagacatctcgcagaaaatgcgcacggagataatgagccacgcagaatgcggatctgatggtcctaaagggaaggaactttgtgaagtgctcattatcccagatagcggccatgctgtgcatgttgagaaccctcttcctttggtgagagccgtgaggaagttcttactgaagctgtattgaggagaacatctgagtagaaccggtaaatggagcatcatgcaggtatattggtgtcctcacatatgcaggtgaagaaaggtttcaaattcgtgccgcccaagaagaactgaaatttggtctccgtctcgtccaatttgtcgtcgttggatcgttgcagtaactttttcccgtttggccttagtgttaatagcgtggctggtagatccaactggtgatgcctcttacgagggtttttgaaccccaatggactggcttccctttggtgattgtcagggttctgcatttcctagagataaattctcagcatgttcagacctggagtgccgtgccctttgtacaaggattccttttctagagttgtatgaaataaatgctcgctctcgagaagcggatttggtcaaaatctcactccactaccgagctgcggcgattcatcaagaagaccttcgtgccgatccctttgtgtaaataaaagtagcctcatctttctttgtcttgttgggatccgggaaccggccgactgtcgatcaagtgcgctttctgtgcgattcctgactgccaatttaag

SEQ ID NO: 9444 - DNA, 1072 bp, Zea Mays
atctcgggcgctactgatggaatatggatgggcaggcgaaagagcaggaggagcagaagaagcgcggtttgctgacgtctccatcccatcatgtattatcctcagcctaccgtctccttggcggcggcggttgccctcctccgcccctcactccgccgccactctcaaagggcgtcatcccttctccgctcctccacgccgcctccatgggttagtgcgaggaggaggacggccgtctccgacgacttcttcaccgtcgagttggacgctactggagtggaaccggaaccggattccatcgacgacgggctcccctctccatgggagggagctgtcgtctaccgccgcgacgctgccgtccagcacctcgagtacgccagcacgctggagcgcctcggcctaggggacctctcctcccccgactcccgcgcgcgcgccgctgacctgggcctggctggagggaccctggacagcactggcgcgcagcctcggacccccgtgctcgtctccgtcgacgtgaccaggcgccgcggccgcctgcgcctggacggcatcgtgcgcaccgtcatcaccctcggctgcttcagaagacccagtagaggaggaaccagacctcggcacgatttttcaagaggacgacgacaaaggtggtgcttcgctagcctgcgccatggatggagatcaagatatcgactgggatgaccggctgcatttcccagcagctgacaaggaaatcgatatatccaagcacatccgggacatgattcatctggagatcaccttggatgcagtgtgcaaccccaactgcaagggtctatgccttacctgcggcgcaaacctcaacaccaccagcagctgcacatgcaagcccaggaacgtccaaggactttctcctctcaaaggggttttcaagtgatgatgcggataccaaagtttgtacaaccagcccaacttcatgtcatgctgaccaggatgattatgtacataaataaataaaataaatgcctccgggaccacgaacaagaagggggacatgtgaggctggctatcgatgactgttgcaacctgagag

SEQ ID NO: 9445 - DNA, 1275 bp, Zea Mays
atctcgggcgctactgatggaatatggatgggcaggcgaaagagcaggaggagcagaagaagcgcggtttgctgacgtctccatcccatcatgtattatcctcagcctaccgtctccttggcggcggcggttgccctcctccgcccctcactccgccgccactctcaaagggcgtcatcccttctccgctcctccacgccgcctccatgggttagtgcgaggaggaggacggccgtctccgacgacttcttcaccgtcgagttggacgctactggagtggaaccggaaccggattccatcgacgacgggctcccctctccatgggagggagctgtcgtctaccgccgcgacgctgccgtccagcacctcgagtacgccagcacgctggagcgcctcggcctaggggacctctcctcccccgactcccgcgcgcgcgccgctgacctgggcctggctggagggaccctggacagcactggcgcgcagcctcggacccccgtgctcgtctccgtcgacgtgaccaggcgccgcggccgcctgcgcctggacggcatcgtgcgcaccgtcatcaccctcggctgcttcaggtgtgctgagccagctcctcaaggtatatttgccaatttctccctgctgttgacagaagacccagtagaggaggaaccagacctcggcacgatttttcaagaggacgacgacaaaggtggtgcttcgctagcctgcgccatggatggagatcaagatatcgactgggatgaccggctgcatttcccagcagctgacaaggaaatcgatatatccaagcacatccgggacatgattcatctggagatcaccttggatgcagtgtgcaaccccaactgcaagggtctatgccttacctgcggcgcaaacctcaacaccaccagcagctgcacatgcaagcccaggaacgtccaaggactttctcctctcaaaggggttttcaagtgatgatgcggataccaaaattgatgacgatggaagaacctatttttggatgtcctgcgatgcaagtgaaattgtctgctgctctgctgcttaacaactccctaaacatatctgggtagcttgggactgcattggttggtgctatttcaattggtttatttgtgcctgagttattgtacccattaataaattgatgattattttgacattggtgataagttacagtaaactaaccaaaacagaaacaactgatttccccctaatgtacacagcttttcaaatatgtgatggatgtttcctattaaa

SEQ ID NO: 9446 - DNA, 3486 bp, Zea Mays
atgtacaagctccgcggccgtggcggcgggcgcggcggcagcggcgtagcaaagcgaccgatgccctccaacgcccgcggccgtggcgttgcctcctctatcggcgggatggccgggcctcctcgcagtcgcgccgccgccgccgccttgaaacagccggtgggacgcgaggaggcgttctgcctcgagtccagcgggctgcctgcctttgcggctataatacggctgacgcccgacctcgtcgacgagatacggcggacggaggaggccggtggaggcgcccgcatcaagttcaaccctaacatgtacaactcatcggagaacgttatagatgttagtggtaaagaattcaaattcacctgggcatctgaacgaggcgaattgtgtgatatttatgaagaacgtcggagtggagaggatggaaatgggttgcttctggagtgtggctctgcttggcgcaagatcaatcgtgctggaccctgccaatccatctgtcaagagtcaggccaagtcaatggctgctgcagctgtagaaggtaatccacggaggatgcactggaagcagaagagcgaatttcttaagaagaataaagctgctgttatcaccccaaccaaatcagttttgaaggtgaagttatctaacaacatccccaaagggaatatctcaagttcacctgcaccttctcctgaacaacctggagaaagcaatccttcgtttcctgttggatcagatgcaaataatgaagtcataacaccttttgattttaacaaagaggaaaacagtaaatatgagaaatcagttagaaataagatgtctaacaaagatataaatcgccgagcaagttctcatgctgcaaatgtggatgataatacaaatgaagtgcgaagctacttgatatccgtgctctcaaaaaatccaaaaggaatgggcctaaaggccttggagaaagctgttgcagatgcatttccaaatgcatcaaagaaaatacagagcatcatcaagaatattgcaaattaccaaggacctgagaggtatgttctgaaatcagggttggaggtagaaagctcaaaaagtcatgtatctgaaggagtaagatccatcagtaagaaaattgaggaatcggctccaagcctgacgattgatgatcctgatatatgtgagaggattgacattgtgggctccctagttgctccaactgatggaaaactcagtaatgacagtgaaggtaaggctggaacttccagtgacagtggaagcgatagcgatagtgacagcagtaacagtggaagtgatagtgggagccaaagcagaagtgctgcagaaactggtagtggaagcagcagcaatagtgacagtgatggctcatcaagcagcaaggaaggatctgatgcagctgttgatattacgagtgatgatgacaaagcaaatatagcacacacaaaagtagtggatgaccttaatttgtcttcatcgccaagagatttgaaaagactcgatgttgatgatgaacaaattgacattgaaacaaatcttgactacaggagtacatcacctcatattggtctgaataagtttaataccggtaatgatgatgcagcagcagagggctttagtgccggcaaccttagtaagccatctgaaatgtcaggaagcaagaacatgacgagcaccagaatggattctattggagttgataccaaatataatgaaatgtcttttctggacaacctttttgatgactccatgagaatagccagtgaaaactcacccaagggggaagctggtcaattgacagtgcagcatgtcaacaagagaaaatcaacatcaaaggatgaatcaaaatttggcccagtgagtattgctaaacctaaattaaaaaggtcttctggcagcgagaactctacagcaaagcctgagagtgctaaaaaggtcaaagctgacatagcatcgtcaataggttctttatcagagcacaaaagaagtttaccacctgaaaaatatagcaatgataggtttaacaaggggacatgggatgttagccgccatgcttcacaagatagcagtcctgccatgaaaggaagacctttggctcctggaaatttacagaggatagatcagagcccaaatttacctgtcccaacaatgcactctgagagaacaaaagaaaatactgtgaaatcaagtttgaagaaaaaatcagataagtcgcagaaaccatggcatggtatggatggtgactttgggccaggttattcacatggtgtagatcaccacgctaattttgatggctctgatgatttttccacaagaaaaaggagtagacatgggaatcttcttattgatgataaaatgtttaagcgttcgaaggacgctaatgccaatgtagattccatgaatttaaccaaaagttccagagaaactgttgtgcctgatgaaataactgcttttcctgaatctaatgaatgtaatggtgagcagtcaaattctcaaagagataatgttgagagatcaccttacggtaaaaaaaagctccagagggagttttctgatcttgagttggctgaacttcgcaagacttctttggaaaatgacgatggaaggataaggaagcaatttgagagtagttcctccaagtcgcttgatgctaaattaaatgtaattaactcctaccccagtatgaatgacagaaaggttcctgttaccgtctttaatgatactaagaggaaaccttcacctcaagaatatggaattggaggccatataaaccaggaagggtttcccaggaaggcagcagggtatgagtttgatgataataggcctcagcaaaatattccagacagtcagcatttgccaaggatttataatacagattttgagaatttaatatatccagatagttcaggaaaaacaagcaaaagggaaactaggatgacacatggtggaatgctagagtatgctgatatccagaagaagaaaacaacctcaaggcttccacagaatggtactaataatgtcagagtgtctcgaatgcagaaatcaatatccccatcagataatgatgaaagaagtaggaacgactctttgattgagacaaagacaggtaggaagagaaggggcagttcttcagatgatgataatttgtttttctccaagtatgataaagatgctccggagcttaaagatccaataaaagatttctcacaatacaaggattatgtgcaggagtacaatgagaagtatggggtttattcttatttgaatagtcagatagacaaaactatgtcagaatttttaaagattcaggatgatctcaatgttggaaaagaaagaggcaaggaacagtattataacaccttagaaagactcagagacatgtatcatgaatcaggaacaagacataaattgatgaagaaggtcttcgttttgcttcatgaggaactgcagaacaacagccaactgaggtctgacgacgaactacattattg

SEQ ID NO: 9447 - DNA, 359 bp, Zea Mays
caaatgaagttcagttggtagaaataattgcagatcaagggtgtactctcatgaggcttttcattggggaaccagtctggaccgcattaaaccgccctcaggaggaccaccccgcgaggcaagagtatgtcaagaatgtgagtgcgggcactggatttgctcttgcagcacactgaatctgtcccccccccttcccgtgtataagaatatatggtcacttggattcatgtaccactgcatagtatcatcatatggtatgacgcaaccgtatgttatcatcaggagtcatgaaaccttgctgcatgttcagttaaatctgtgcacataaaactgcaaattatgggaacgcacggtgtagc

SEQ ID NO: 9448 - DNA, 1047 bp, Zea Mays
ttcggtactgaagatcaaggatgagtccagattgtggattcaagtaggataccataggggttatggcatgactgagtctgctgccgttggaactcgtggcttcaatacttcaaagcataagaagtatggttcagtaggactcctggctccaaacatgcatgcaagaattgttcatgtggaaactggttgctccttgcctccaggctcttgtggggagctctggctccatggtccagctataatgaaaggttacttgaatcatgttgatccatgcgcaataaatggtggctggctgcgaactggtgacattgcctacttcgatttcgatgggtacttgtatatagtgggccgcttgaaagaggtgatcaagtacaagggatttcagctccagctgacttggaagcagttttgatcgaacaccctggaattgttgatgtggctgtgacgtcgtgagttttaactactgaggatgaagaagctggagaggtaccagtagccttcgtggtgaggaaatctggaagtggcctatcgtgcacgcaagtgatggagtatgtagctaagcaggtgtccccgtataagaaggtgcggaaggtggtgttcgtggagtcgatccccaagtcgccggctggaaaggttctcaggaggcttctcagggaatctcttgcagctagcgctgttgctggtccaacaagttattccgagtccaattccatgcgccattcgagactgtaactgcaggacaaggccagccaagcaggatctcggtcaggaacagtttccagctttattttaggttgccgtgacctgaataggccttctgtatcacagttaggggcttagcacactcacatagatgaacaaagaccttttggattagtttgcttgttgagcaaaattcaaagtgtaaggaagatgttttgtcttcttcttctctttgtgtccttccgttgaaaaataccatggtcaaatctttctacaatctgaaaagaaggtagccaagtgatagttcgtagttcaagaaacggtttcacgctatgttggtcctat

SEQ ID NO: 9449 - DNA, 1328 bp, Zea Mays
ccaaagagtagtgacacgagaagaccaggggaggggagagccacaaatctccactgacgatgcaggacgccgtggcgacccacggccccgccaatgccgccgccggcgccaccttctactgcgccgccgccggcgtgtacgcgagcacgcaccctccggtggccctcccgtccgacccctccctctccctcgtcccgcacatcttcgcccgcctacccgccgcccgccccgacgccccggccctcgtcgacgccgccactgccgaggccctctcccgcgccgacctccgccgcctcgtatccgccctcgcggcgggcctccgccgccgtcggggcctccgtgagggggacgtcgtgctcctcgctctgccgaactccatcgccttccccgtcgcgttcctcgccgtcctcgccgccgggtccatcgccaccacaatgagcccgttcagcgcccccgccgagatcgccgctagggttcgggacaccagccccgccctcgtgttcgccacgctcgacaacgtcgggaagctcccgccgttgcgcgtcccggtcgtcctcgtccccgacgccttccacctcgcggacgagggcgcccccgagttcgcacccttccgcgagttgctgctgctcgattccgagccactgccgggcccttcggtcggtcaggacgacgcggccgccatcctctactcgtcggggacgggcggccggagcaagggcgtcgtgctcacgcaccgcaacctcatcgccacggtcgagctcttcgtgcacttcgaggcctcgcagtacgccgcacctgcttgtgataatgtctacctggcggcgctgcccatgttccacgtctacggactctcgctcttcgcggtgggacttctctcgctcggttccacggtggtcgtcatgaagaggttcgacgcaggcgaagccgttaagaccattcgcagattcaaagtcacgcacttcccggtcgttccgcccatcatggcggcgctggtgcacaccaccaagccagcggcaatgccgttggaatgcttggtgcaagtgtcaaccggtgcagcgccgtccagccgcaggctcatcgacgacttcgtcaaggctttccctcacgtcgatctcattcagtgacatacaaacagcttacatttacaacccggcatgaaccgagcttgttcttttttgtttggaggaggagggggtgggggttgctgtttacatcttattgcctcgcactggaaaacaccatctgccaggcagcacgcacacccagttctctgcttcggtggctgtagcaccagatttcagcttcgttgccgcatcgttgcaggagac

SEQ ID NO: 9450 - DNA, 2281 bp, Zea Mays
tccggagcaacaacacatggcagaacagatcaatccaagggcatcgtgtgttgctggtgctaaacttgcagcgtgctttccgcaccttgacgccgtcgccttgatccactgcagctggagggtggcatcgcattcgcagccgccaaatcacatctatttatactcgtccggcaaggagtccaaagagtagtgacacgagaagaccaggggaggggagagccacaaatctccactgacgatgcaggacgccgtggcgacccacggccccgccaatgccgccgccggcgccaccttctactgcgccgccgccggcgtgtacgcgagcacgcaccctccggtggccctcccgtccgacccctccctctccctcgtcccgcacatcttcgcccgcctacccgccgcccgccccgacgccccggccctcgtcgacgccgccactgccgaggccctctcccgcgccgacctccgccgcctcgtatccgccctcgcggcgggcctccgccgccgtcggggcctccgtgagggggacgtcgtgctcctcgctctgccgaactccatcgccttccccgtcgcgttcctcgccgtcctcgccgccgggtccatcgccaccacaatgagcccgttcagcgcccccgccgagatcgccgctagggttcgggacaccagccccgccctcgtgttcgccacgctcgacaacgtcgggaagctcccgccgttgcgcgtcccggtcgtcctcgtccccgacgccttccacctcgcggacgagggcgcccccgagttcgcacccttccgcgagttgctgctgctcgattccgagccactgccgggcccttcggtcggtcaggacgacgcggccgccatcctctactcgtcggggacgggcggccggagcaagggcgtcgtgctcacgcaccgcaacctcatcgccacggtcgagctcttcgtgcacttcgaggcctcgcagtacgccgcacctgcttgtgataatgtctacctggcggcgctgcccatgttccacgtctacggactctcgctcttcgcggtgggacttctctcgctcggttccacggtggtcgtcatgaagaggttcgacgcaggcgaagccgttaagaccattcgcagattcaaagtcacgcacttcccggtcgttccgcccatcatggcggcgctggtgcacaccaccaagccagcggcaatgccgttggaatgcttggtgcaagtgtcaaccggtgcagcgccgtccagccgcaggctcatcgacgacttcgtcaaggctttccctcacgtcgatctcattcagggttatggcatgactgagtctgctgccgttggaactcgtggcttcaatacttcaaagcataagaagtatggttcagtaggactcctggctccaaacatgcatgcaagaattgttcatgtggaaactggttgctccttgcctccaggctcttgtggggagctctggctccatggtccagctataatgaaaggttacttgaatcatgttgatccatgcgcaataaatggtggctggctgcgaactggtgacattgcctacttcgatttcgatgggtacttgtatatagtgggccgcttgaaagaggtgatcaagtacaagggatttcagatagctccagctgacttggaagcagttttgatcgaacaccctggaattgttgatgtggctgtgacgtctactgaggatgaagaagctggagaggtaccagtagccttcgtggtgaggaaatctggaagtggcctatcgtgcacgcaagtgatggagtatgtagctaagcaggtgtccccgtataagaaggtgcggaaggtggtgttcgtggagtcgatccccaagtcgccggctggaaaggttctcaggaggcttctcagggaatctcttgcagctagcgctgttgctggtccaacaagttattccgagtccaattccatgcgccattcgagactgtaactgcaggacaaggccagccaagcaggatctcggtcaggaacagtttccagctttattttaggttgccgtgacctgaataggccttctgtatcacagttaggggcttagcacactcacatagatgaacaaagaccttttggattagtttgcttgttgagcaaaattcaaagtgtaaggaagatgttttgtcttcttcttctctttgtgtccttccgttgaaaaataccatggtcaaatctttctacaatctgaaaagaaggtagccaagtgatagttcgtagttcaagaaacggtttcacgctatgttggtcctat

SEQ ID NO: 9451 - DNA, 2339 bp, Zea Mays
cacaaatctccactgacgatgcaggacgccgtggcgacccacggccccgccaatgccgccgccggcgccaccttctactgcgccgccgccggcgtgtacgcgagcacgcaccctccggtggccctcccgtccgacccctccctctccctcgtcccgcacatcttcgcccgcctacccgccgcccgccccgacgccccggccctcgtcgacgccgccactgccgaggccctctcccgcgccgacctccgccgcctcgtatccgccctcgcggcgggcctccgccgccgtcggggcctccgtgagggggacgtcgtgctcctcgctctgccgaactccatcgccttccccgtcgcgttcctcgccgtcctcgccgccgggtccatcgccaccacaatgagcccgttcagcgcccccgccgagatcgccgctagggttcgggacaccagccccgccctcgtgttcgccacgctcgacaacgtcgggaagctcccgccgttgcgcgtcccggtcgtcctcgtccccgacgccttccacctcgcggacgagggcgcccccgagttcgcacccttccgcgagttgctgctgctcgattccgagccactgccgggcccttcggtcggtcaggacgacgcggccgccatcctctactcgtcggggacgggcggccggagcaagggcgtcgtgctcacgcaccgcaacctcatcgccacggtcgagctcttcgtgcacttcgaggcctcgcagtacgccgcacctgcttgtgataatgtctacctggcggcgctgcccatgttccacgtctacggactctcgctcttcgcggtgggacttctctcgctcggttccacggtggtcgtcatgaagaggttcgacgcaggcgaagccgttaagaccattcgcagattcaaagtcacgcacttcccggtcgttccgcccatcatggcggcgctggtgcacaccaccaagccagcggcaatgccgttggaatgcttggtgcaagtgtcaaccggtgcagcgccgtccagccgcaggctcatcgacgacttcgtcaaggctttccctcacgtcgatctcattcagggaagtatggttctcaaccttacagccactaggcctgcatgcagtgatgccagactccaatagcaaacttgctacttggtggtttcagagtagggaacagattgataagtcagggtgcaatggttttgattgccttatgctcttagtgattttgttactttggaaggaaaggaaccatcaagtctttgaggggttcagtcttcaactatcagtctatcacttcggtactgaagatcaaggatgagtccagattgtggattcaagtaggataccataggggttatggcatgactgagtctgctgccgttggaactcgtggcttcaatacttcaaagcataagaagtatggttcagtaggactcctggctccaaacatgcatgcaagaattgttcatgtggaaactggttgctccttgcctccaggctcttgtggggagctctggctccatggtccagctataatgaaaggttacttgaatcatgttgatccatgcgcaataaatggtggctggctgcgaactggtgacattgcctacttcgatttcgatgggtacttgtatatagtgggccgcttgaaagaggtgatcaagtacaagggatttcagatagctccagctgacttggaagcagttttgatcgaacaccctggaattgttgatgtggctgtgacgtctactgaggatgaagaagctggagaggtaccagtagccttcgtggtgaggaaatctggaagtggcctatcgtgcacgcaagtgatggagtatgtagctaagcaggtgtccccgtataagaaggtgcggaaggtggtgttcgtggagtcgatccccaagtcgccggctggaaaggttctcaggaggcttctcagggaatctcttgcagctagcgctgttgctggtccaacaagttattccgagtccaattccatgcgccattcgagactgtaactgcaggacaaggccagccaagcaggatctcggtcaggaacagtttccagctttattttaggttgccgtgacctgaataggccttctgtatcacagttaggggcttagcacactcacatagatgaacaaagaccttttggattagtttgcttgttgagcaaaattcaaagtgtaaggaagatgttttgtcttcttcttctctttgtgtccttccgttgaaaaataccatggtcaaatctttctacaatctgaaaagaaggtagccaagtgatagttcgtagttcaagaaacggtttcacgctatgttggtcctat

SEQ ID NO: 9452 - DNA, 3170 bp, Zea Mays
ctcatctctcgaacacacaccacctggcttgacgacgcttaagccctagcggcaggtgccggaggccgctgcgccgcgcccgccccgtcgccgatgtggaacggcgtgccgcctccgcctccgcctccgttgcagatggcggcggcccctcctccccctggcacgacggtgcccggggcaggccagcccccgcccccgcccccgccgcctgccggggcgtcgcagggcggcaagccgctgacaccgatggagctggaggcgcagctggtggagaaggcccgcaaatggcaccagctcaactccaagcgctacggcgacaaacgcaagttcgggttcgtcgaggcacagaaggaggacatgccccctgagcacgtccgcaaaatcaccagagaccatggagacatgacttccaagaagtacagacatgataagcgtgtttatcttggagcactcaaatttgtgccccacgctgtgtacaaactgctggagaacatgccgatgccttgggagcaggttcgccatgtgaaaatcttgtatcatatcactggggctatcacttttgtaaatgaaatcccatgggttgttgaacccatatacctcgcacagtggggtacaatgtggattatgatgcgacgagagaagagggataggcgtcattttaaacgaatgcggtttcctccatttgatgatgaggaacccccactggactatgctgataatttgttggatgttgaaccacttgaagctatacagttggagttggatgaggaggaagatgcagctgtctatgaatggttctatgatcacaaacctctgatgaagacgaagctcataaatggccctagttacaggaaatggcatctatctcttcccataatggcaacactatatcgccttgctggccagctgttgtcagatctgatcgataggaattatttctacctatttgatatggagtctttctttactgccaaggcccttaatatgtgcattccaggtgtgatgattggaatcgatctagcatataatttgcactctgctttcggtaactggtttcctggatcaaagccactacttcagcaggcaatgaacaagatcatgaagtcaaatcctgccctgtatgtcctgagggagagaataaggaagggtctgcagttgtactcttctgaacccacagaaccgtacctgtcttcacaaaactatggagagatattcagcaatcaaatcatatggtttgtggatgatacaaatgtgtatcgagtcactattcacaaaacatttgagggtaacttgaccaccaaaccaatcaatggtgctattttcattttcaatccaagaacgggtcaactttttcttaaggttatccacacaagtgtatgggcagggcaaaaacgtcttgggcagctggccaagtggaaaacagctgaggaggttgctgcattagttcgatctcttcctgtagaagagcagccaaagcaaattattgtgacaaggaagggcatgttagatcccttggaggtccatctacttgacttccctaacattgttatcaaaggcagcgagctgcagcttcctttccaggcttgcttgaagattgagaagtttggtgatctgatactgaaggcaactgaaccacaaatggttctttataatatatatgatgattggttgaaaagtatctcatcatacacagcattctctcgcattgtgcttatcctacgtgcacttcatgtgaataatgagaaggcaaagatgttgctcaaacctgacaaaacaattgttactgaaccacatcatatatggccaactctgaatgatgaacagtggttgaaggttgaatgtgcactaagggacctcattctttccgattatgcaaagaaaaacaatgttaatacttctgcactcacacaatctgaaatgcgagatatcatccttggtgctgaaattgctccaccatcacagcagaggcaacagattgctgaaattgagaaacagtcaagagagacgactcagttaactgctgtaaccacaaggacaacaaatgtgcatggagatgaactcattatcacaaccacaagtccatacgagcaacaagcattcgcatccaagactgattggcgtgtcagagccatctctgccacaaacttgtatcttcgtgtaaatcacatttatgtcaattctgatgatataaaggagactggctacacttacattatgccaaagaacatattgaagaaattcatatgcatagcagatctgcggacacaaattgctggatttttgtatgggctgagtccacaggacaatcctcaagtcaaagagattaggtgtatagccatgcctccacagcatggaacacaccagatggtgactcttccagcaaatcttcctgagcacgagttccttaatgatctagaacccttgggatggatgcatacacagccaaatgaagctccacagctatcgccacaggacctgacatcacatgccaagattctggagaacaacaaacaatgggatggtgagaagtgcatcattctgacatgcagcttcaccccaggatcttgctcgttgactgcatacaagctgacaccaagcggttacgagtggggacgcagcaacaaggacaacggaagcaatccacatggataccttccaactcactacgagaaggtccagatgcttctgagcgaccgcttccttggattctacatggttccggataacgctccttggaacttcaacttcatgggagtgaagcacgacccacagatgaagtacaacatgaagctgggcatgccccgggacttctatcacgaggaccacaggccaacacacttcctcgagttcagcaacatcgaggagggtgaggccgctgaaggcgatagggaggacacattcacgtaggcgcctgttagaaactgctctgttttaacggcagtgtgtgtagctgtaacctgacttgacgggtgtcatctgttcgcctgttgcttaagcctgtattatactacctctttgttgtaagaagccctggtgagggattaaaattgtacaagtgcgcgccatggtaacagtaaaggttttgcttcctcccaagcttccaccttcaatccttccaggcttcataaatttaaattaaaaaaggtcttttaatagattcctttctttat

SEQ ID NO: 9453 - DNA, 4264 bp, Zea Mays
gaaatgttgtcatcatcccttttcgcaccatacgagtaggctctagccattgccgctagcccgctaccaacgttctattctgaattgagttaaaaaaaaaacgttctattctgaagagcggcttccattttgccaattttctcatctctcgaacacacaccacctggcttgacgacgcttaagccctagcggcaggtgccggaggccgctgcgccgcgcccgccccgtcgccgatgtggaacggcgtgccgcctccgcctccgcctccgttgcagatggcggcggcccctcctccccctggcacgacggtgcccggggcaggccagcccccgcccccgcccccgccgcctgccggggcgtcgcagggcggcaagccgctgacaccgatggagctggaggcgcagctggtggagaaggcccgcaaatggcaccagctcaactccaagcgctacggcgacaaacgcaagttcgggttcgtcgaggcacagaaggaggacatgccccctgagcacgtccgcaaaatcaccagagaccatggagacatgacttccaagaagtacagacatgataagcgtgtttatcttggagcactcaaatttgtgccccacgctgtgtacaaactgctggagaacatgccgatgccttgggagcaggttcgccatgtgaaaatcttgtatcatatcactggggctatcacttttgtaaatgaaatcccatgggttgttgaacccatatacctcgcacagtggggtacaatgtggattatgatgcgacgagagaagagggataggcgtcattttaaacgaatgcggtttcctccatttgatgatgaggaacccccactggactatgctgataatttgttggatgttgaaccacttgaagctatacagttggagttggatgaggaggaagatgcagctgtctatgaatggttctatgatcacaaacctctgatgaagacgaagctcataaatggccctagttacaggaaatggcatctatctcttcccataatggcaacactatatcgccttgctggccagctgttgtcagatctgatcgataggaattatttctacctatttgatatggagtctttctttactgccaaggcccttaatatgtgcattccagggggtccgaagtttgagccattataccgtgatatggagaagggtgatgaggactggaatgagttcaatgatataaataagctcatcatacgtcagccacttcgaactgagtacaggattgctttccctcacctgtacaacaacaggccaaggaaagtgaaacttggtatatatcatacccccatgataatgtatatcaagactgaagatccagacctgccagcgttctactatgatcctctgataaaccctatcacttcaaccaacaaggttgatcgtagggagaggaaagcagctgaagaggaagatgatgaagatttttgtctcccagaagatgtagagcctctcttgaaacagactgaactctacactgatacaacagctgctggtatatcgttactttttgctccaaagccttttaacatgagatctggtcggacacgtcgtgcagaggatattcctcttgtatctgagtggtacaaggaacattgccctccagcttatcctgtgaaagttcgggtgagctatcagaagctattgaagtgttatgtgctcaatgagctacatcataggcctcccaaggctcagaaaaagaagcatctgttccgttcactccaagcaactaagtttttccaaactactgagcttgactgggcagaagcaggcttgcaagtttgcaagcaggggtacaacatgttaaacttgttgattcacaggaagaatcttaattatctccatttagattacaatttcaatttgaagcctgtgaagactcttacaacaaaggaaaggaagaaatctcgttttggaaatgcatttcatctgtgtcgtgagattttacgacttacgaagttggttgttgatgctaacatccagttccgtctgggaaatgtggatgccttccagttggctgatggtctgcaatatatattttctcatgttggacagttaactggtgtgatgattggaatcgatctagcatataatttgcactctgctttcggtaactggtttcctggatcaaagccactacttcagcaggcaatgaacaagatcatgaagtcaaatcctgccctgtatgtcctgagggagagaataaggaagggtctgcagttgtactcttctgaacccacagaaccgtacctgtcttcacaaaactatggagagatattcagcaatcaaatcatatggtttgtggatgatacaaatgtgtatcgagtcactattcacaaaacatttgagggtaacttgaccaccaaaccaatcaatggtgctattttcattttcaatccaagaacgggtcaactttttcttaaggttatccacacaagtgtatgggcagggcaaaaacgtcttgggcagctggccaagtggaaaacagctgaggaggttgctgcattagttcgatctcttcctgtagaagagcagccaaagcaaattattgtgacaaggaagggcatgttagatcccttggaggtccatctacttgacttccctaacattgttatcaaaggcagcgagctgcagcttcctttccaggcttgcttgaagattgagaagtttggtgatctgatactgaaggcaactgaaccacaaatggttctttataatatatatgatgattggttgaaaagtatctcatcatacacagcattctctcgcattgtgcttatcctacgtgcacttcatgtgaataatgagaaggcaaagatgttgctcaaacctgacaaaacaattgttactgaaccacatcatatatggccaactctgaatgatgaacagtggttgaaggttgaatgtgcactaagggacctcattctttccgattatgcaaagaaaaacaatgttaatacttctgcactcacacaatctgaaatgcgagatatcatccttggtgctgaaattgctccaccatcacagcagaggcaacagattgctgaaattgagaaacagtcaagagagacgactcagttaactgctgtaaccacaaggacaacaaatgtgcatggagatgaactcattatcacaaccacaagtccatacgagcaacaagcattcgcatccaagactgattggcgtgtcagagccatctctgccacaaacttgtatcttcgtgtaaatcacatttatgtcaattctgatgatataaaggagactggctacacttacattatgccaaagaacatattgaagaaattcatatgcatagcagatctgcggacacaaattgctggatttttgtatgggctgagtccacaggacaatcctcaagtcaaagagattaggtgtatagccatgcctccacagcatggaacacaccagatggtgactcttccagcaaatcttcctgagcacgagttccttaatgatctagaacccttgggatggatgcatacacagccaaatgaagctccacagctatcgccacaggacctgacatcacatgccaagattctggagaacaacaaacaatgggatggtgagaagtgcatcattctgacatgcagcttcaccccaggatcttgctcgttgactgcatacaagctgacaccaagcggttacgagtggggacgcagcaacaaggacaacggaagcaatccacatggataccttccaactcactacgagaaggtccagatgcttctgagcgaccgcttccttggattctacatggttccggataacgctccttggaacttcaacttcatgggagtgaagcacgacccacagatgaagtacaacatgaagctgggcatgccccgggacttctatcacgaggaccacaggccaacacacttcctcgagttcagcaacatcgaggagggtgaggccgctgaaggcgatagggaggacacattcacgtaggcgcctgttagaaactgctctgttttaacggcagtgtgtgtagctgtaacctgacttgacgggtgtcatctgttcgcctgttgcttaagcctgtattatactacctctttgttgtaagaagccctggtgagggattaaaattgtacaagtgcgcgccatggtaacagtaaaggttttgcttcctcccaagcttccaccttcaatccttccaggcttcataaatttaaattaaaaaaggtcttttaatagattcctttctttat

SEQ ID NO: 9454 - DNA, 1486 bp, Zea Mays
gtgcctccctccccacgaaacccccttccccaaactaccttcgccgctctccttgatccgcaattttctcccacatctctcttctgcccacttgcctccatcttggcctccccctccactccccacccccgaacatccggcgccgtccacacccttgcaccccgactcccctcgtccttcgtggccacgatgggggcgtccatggcatcgccttaggggcgatcgatctgggagaaagtgctggagcacgtggcgtcgtaccaccagcagcaacggaggcagaagctacgcaagagcctcacctacaccggcagtgagttctcgttcgctgtccggggtcgtggggacgaccccgcctccacgtccgttggggcacagaacgaggacatgcctcttgagcacgtctttaaaatcattaggtaacttccagatctgcctagccccttgacgtttaacttgatgcccaatcggtagtttgttcattcagaccagcaaacacaactcatttgtttcttgtgaggctaggccaaagtttgtgcgaccgttgatgtgaatttcctctgggcccaactttgatccgatggcaaaagtgtgtgtttatggttcctgagtcagatgatctttcttcagttttagatgtgatagatattagtatgaaagataaaactagaatgctatgtctgtcaaaggagctttcttcagtttcagaacacacctctccatctttcggtgctaggtggatcaccgtctaaacaatccaccaccagaaccgccctaccccaagatagccgtagtctcctccatccaacatttcctacgcatgcagctccatctcagtcgttgtacccattcaatggcgagctggtggcagcgatgtaggagatgatccatgacgaggtgcacaagtacatgttagtggacgacacctgccaaagatacacaatttctactggtacacattttattttttcatgtttttcagttggagaaaacatttaagacaatattttctcgtttgttctccatatggggcttgttccacgccacttgaaggaagaagggaatggtggtgttaagttcggacaatacatctacacatcttggagcatcggcatcaatgttttcaatcttctcaaatttcaaattattctggtctcttcgtgcaaccataaaagtttattaagtcacttatctgagtggtctaaaagtctagcatatttttgttcctctgcctgtcgagacggatcaactgacatgaataatatccagtgaatactgcaagagctattcatgatctgccgtgaactagctagtatgatataactcagtttgtggagtgctaatgcacaaacaggaaataggatgatacttcatgtatatttttttatttcatgaaaatgaactataggatactgttcacaatccataccaagcttctgcagttatcaacatgttttctatgttcaaccttgttaacatattaaaa

SEQ ID NO: 9455 - DNA, 2726 bp, Zea Mays
caaagactcaacacaagcgcccccctcgtcgcagtcccgccgttacatggcccgctctgttcccctttccggcgcccgcgacggactgcgacgagcggatagatagatctgtgccccgtccctgtctcgccatcctcctttctcctcctccactccctatcgactatcgagcagagcgaatccttagcggggaagtctttccgagctcagggagtggggtttaaaacgcggctcgacgaaaggaaggccgcactcgctgctgctgctggtcgcttgctttcggtggcgagcgtctcggtaaagcggcgtcggcgtcggaggcggcggcagagactggacttgcttgctccttgctgcgcagtgtagtgctgtgctaccttggagacaggatcctgccgcagggactcataattgatcagtgtgccccaacataagagcgaaacgtgactgagtttgccagctcccccttcatccactgtggtcgctcgtctgctaatgcccgcatcggaggattgctcacggatatgcttctggtgatgggcaacccggggcgctcgcggcagttgtcagcgctggttgcttccgccgccatcttgctgtcactgtccgcgttgccaatttgtcggccctacacctacgagcaagatgtgtttgcgataaacggcttgtacacggcacttggagcaccacagctgcctaattggacttcaaatggtggtgacccctgcaatgaaggctggcaaggtgtttcatgtgtagcgtcaaatataacctccataattctcagcggtgcaaatttaggtggacagctgggcaacactttggggaattttacatcattaatcacctttttcctttcagctaaccaactaagtggtagccttccaagtacattgtcatcccttacacttttgacaagcatgtcactcaatagcaatcatttgactggagcgataccagatgtattttcagcactcactggacttgcaaatttagatttttctgataacaatttgaccggtccgttgccaccttcaatgggaaatttgacatcattgactagcctacatattcagaacaatcaaatatctggaactcttaatgtgttgcaagatctccctttccaagatttgaacgttgaaaacaaccttttctctggtcccgtgcctgtgaaattactgaacttgccaaacttcaagaaggatgggaacccattcaatacaagcatagctccatctgcgcagcctcccatcgcgccaacaccattaccgtctatcccaccttcgtcagggcatgtcccctcaaaagaacctgcacattcttctagtgttccagaaaaaaggtcgagagatgatatttatatgaaaaacaagataggaagggtacctcagaagcttggagagcctaaaatcaaggagccaccattaaaactcaagaatgatgctgagaaagaaacttcaaatgtggtttatgatccaagtccaagggatggggcagaacttagattcatcaccgacagtttcagtgaggaaaatatcataagagacagcaggtttggtaaggtgtatctggcaaagcttcctgatggagagctactggaaattttgaagattgactcttctaactcaaaagtgccagtagatgcctttcttgagctagttgtgaggatttctgaactgaggcatcctaacatacttggtcttgttggatactgtgcggagtttgagcagcgattacttgtctatgagtactgtagcaagatgaccctacatgatgaacttcgtcatgtggatgactcaagcaagccattatcgtggaatgctcgcctccaagttgcttcagaggcagcaaaagcattgcaacatcttcatgacggttgccaaccaccagttgtacaccagaattttgaaccctctgttgttctgctcaacagcaccttagttgtgcatatttctgaatgtggccttgcatcactagcatcaaaatcagtttctcagttgtctggacacaccttattccattatgaagcacctgaagtgcatgaatctggatcagtaagcgatcgaagtgatgtttacagcttcggtgtagttatgttggagcttctaacaggacgtaaaccttatgacagttcgtatccacgagctgaacaacatctagtacgatgggccacttctcaactctatgatattgatgccataacgaagatggttgatccttccattcgaggacaatgttctgataaggcattatcccgttttgctgacattattagccgctgcattcagcatgaaccagaattcaggccaccaatgtctgaagttgtccaagacttaactcgcatgatgcctttgacgaccattgatgcggtagtaggatattttggccaatgcaaaatgggtggaacacagtggcaggatgcagagactgcaccacgttttgtccactgccagtaatgctcctctgaatctctggtcaatttatagttcaaagctattgttgtaattctgtagtctgcactctgcacaatatatttcttagtgcccagttccagatcacgtggtgtgattatgcgtggttatctagaccatatgtaaataccaagaagttaaacaaatgtattatagcgtgcttgtttgaggaatgagaaagtacatcttcttactcctcactttattatttgatttgttaaatgaaatgagttggtccatcatatttcattcttt

SEQ ID NO: 9456 - DNA, 2949 bp, Zea Mays
caaagactcaacacaagcgcccccctcgtcgcagtcccgccgttacatggcccgctctgttcccctttccggcgcccgcgacggactgcgacgagcggatagatagatctgtgccccgtccctgtctcgccatcctcctttctcctcctccactccctatcgactatcgagcagagcgaatccttagcggggaagtctttccgagctcagggagtggggtttaaaacgcggctcgacgaaaggaaggccgcactcgctgctgctgctggtcgcttgctttcggtggcgagcgtctcggtaaagcggcgtcggcgtcggaggcggcggcagagactggacttgcttgctccttgctgcgcagtgtagtgctgtgctaccttggagacaggatcctgccgcagggactcataattgatcagtgtgccccaacataagagcgaaacgtgactgagtttgccagctcccccttcatccactgtggtcgctcgtctgctaatgcccgcatcggaggattgctcacggatatgcttctggtgatgggcaacccggggcgctcgcggcagttgtcagcgctggttgcttccgccgccatcttgctgtcactgtccgcgttgccaatttgtcggccctacacctacgagcaagatgtgtttgcgataaacggcttgtacacggcacttggagcaccacagctgcctaattggacttcaaatggtggtgacccctgcaatgaaggctggcaaggtgtttcatgtgtagcgtcaaatataacctccataattctcagcggtgcaaatttaggtggacagctgggcaacactttggggaattttacatcattaatcacctttttcctttcagctaaccaactaagtggtagccttccaagtacattgtcatcccttacacttttgacaagcatgtcactcaatagcaatcatttgactggagcgataccagatgtattttcagcactcactggacttgcaaatttacatattcagaacaatcaaatatctggaactcttaatgtgttgcaagatctccctttccaagatttgaacgttgaaaacaaccttttctctggtcccgtgcctgtgaaattactgaacttgccaaacttcaagaaggatgggaacccattcaatacaagcatagctccatctgcgcagcctcccatcgcgccaacaccattaccgtctatcccaccttcgtcagggcatgtcccctcaaaagaacctgcacattcttctagtgttccagaaaaaaggtcgagagatgatatttatatgaaaaacaagataggaagggtacctcagaagcttggagagcctaaaatcaaggagccaccattaaaactcaagaatgatgctgagaaagctccgaatgttgtttctgatggaagagaggagcataagttaaaagtgccaacatcagaaacttcaaatgtggtttatgatccaagtccaagggatggggcagaacttagattcatcaccgacagctgtacctttggctgttacaatgaataaaaaagagcatgtgattgatatggaaaaggctgataattttgttgaggaccaactgcatcctccgcagccgatggcactgcggactgaaaaagtcactgtcaatcccagtgtacgtacaagaaggggaagagtaccttcagttgaaaaggtggaatcgacgactactgtcaagtccttttccattgcatcccttcaacaatataccaatagtttcagtgaggaaaatatcataagagacagcaggtttggtaaggtgtatctggcaaagcttcctgatggagagctactggaaattttgaagattgactcttctaactcaaaagtgccagtagatgcctttcttgagctagttgtgaggatttctgaactgaggcatcctaacatacttggtcttgttggatactgtgcggagtttgagcagcgattacttgtctatgagtactgtagcaagatgaccctacatgatgaacttcgtcatgtggatgactcaagcaagccattatcgtggaatgctcgcctccaagttgcttcagaggcagcaaaagcattgcaacatcttcatgacggttgccaaccaccagttgtacaccagaattttgaaccctctgttgttctgctcaacagcaccttagttgtgcatatttctgaatgtggccttgcatcactagcatcaaaatcagtttctcagttgtctggacacaccttattccattatgaagcacctgaagtgcatgaatctggatcagtaagcgatcgaagtgatgtttacagcttcggtgtagttatgttggagcttctaacaggacgtaaaccttatgacagttcgtatccacgagctgaacaacatctagtacgatgggccacttctcaactctatgatattgatgccataacgaagatggttgatccttccattcgaggacaatgttctgataaggcattatcccgttttgctgacattattagccgctgcattcagcatgaaccagaattcaggccaccaatgtctgaagttgtccaagacttaactcgcatgatgcctttgacgaccattgatgcggtagtaggatattttggccaatgcaaaatgggtggaacacagtggcaggatgcagagactgcaccacgttttgtccactgccagtaatgctcctctgaatctctggtcaatttatagttcaaagctattgttgtaattctgtagtctgcactctgcacaatatatttcttagtgcccagttccagatcacgtggtgtgattatgcgtggttatctagaccatatgtaaataccaagaagttaaacaaatgtattatagcgtgcttgtttgaggaatgagaaagtacatcttcttactcctcactttattatttgatttgttaaatgaaatgagttggtccatcatatttcattcttt

SEQ ID NO: 9457 - DNA, 3003 bp, Zea Mays
actcaacacaagcgcccccctcgtcgcagtcccgccgttacatggcccgctctgttcccctttccggcgcccgcgacggactgcgacgagcggatagatagatctgtgccccgtccctgtctcgccatcctcctttctcctcctccactccctatcgactatcgagcagagcgaatccttagcggggaagtctttccgagctcagggagtggggtttaaaacgcggctcgacgaaaggaaggccgcactcgctgctgctgctggtcgcttgctttcggtggcgagcgtctcggtaaagcggcgtcggcgtcggaggcggcggcagagactggacttgcttgctccttgctgcgcagtgtagtgctgtgctaccttggagacaggatcctgccgcagggactcataattgatcagtgtgccccaacataagagcgaaacgtgactgagtttgccagctcccccttcatccactgtggtcgctcgtctgctaatgcccgcatcggaggattgctcacggatatgcttctggtgatgggcaacccggggcgctcgcggcagttgtcagcgctggttgcttccgccgccatcttgctgtcactgtccgcgttgccaatttgtcggccctacacctacgagcaagatgtgtttgcgataaacggcttgtacacggcacttggagcaccacagctgcctaattggacttcaaatggtggtgacccctgcaatgaaggctggcaaggtgtttcatgtgtagcgtcaaatataacctccataattctcagcggtgcaaatttaggtggacagctgggcaacactttggggaattttacatcattaatcacctttttcctttcagctaaccaactaagtggtagccttccaagtacattgtcatcccttacacttttgacaagcatgtcactcaatagcaatcatttgactggagcgataccagatgtattttcagcactcactggacttgcaaatttagatttttctgataacaatttgaccggtccgttgccaccttcaatgggaaatttgacatcattgactagcctacatattcagaacaatcaaatatctggaactcttaatgtgttgcaagatctccctttccaagatttgaacgttgaaaacaaccttttctctggtcccgtgcctgtgaaattactgaacttgccaaacttcaagaaggatgggaacccattcaatacaagcatagctccatctgcgcagcctcccatcgcgccaacaccattaccgtctatcccaccttcgtcagggcatgtcccctcaaaagaacctgcacattcttctagtgttccaggtggtagtacttcaggatcaggaaaacatactacactcaaattagttggatatattcttattggagtggtattagcagtagttcttgtgctaattgcaatgtactgtttatccaagtacaaagaaaaaaggtcgagagatgatatttatatgaaaaacaagataggaagggtacctcagaagcttggagagcctaaaatcaaggagccaccattaaaactcaagaatgatgctgagaaagctccgaatgttgtttctgatggaagagaggagcataagttaaaagtgccaacatcagaaacttcaaatgtggtttatgatccaagtccaagggatggggcagaacttagattcatcaccgacagtgtacgtacaagaaggggaagagtaccttcagttgaaaaggtggaatcgacgactactgtcaagtccttttccattgcatcccttcaacaatataccaatagtttcagtgaggaaaatatcataagagacagcaggtttggtaaggtgtatctggcaaagcttcctgatggagagctactggaaattttgaagattgactcttctaactcaaaagtgccagtagatgcctttcttgagctagttgtgaggatttctgaactgaggcatcctaacatacttggtcttgttggatactgtgcggagtttgagcagcgattacttgtctatgagtactgtagcaagatgaccctacatgatgaacttcgtcatgtggatgactcaagcaagccattatcgtggaatgctcgcctccaagttgcttcagaggcagcaaaagcattgcaacatcttcatgacggttgccaaccaccagttgtacaccagaattttgaaccctctgttgttctgctcaacagcaccttagttgtgcatatttctgaatgtggccttgcatcactagcatcaaaatcagtttctcagttgtctggacacaccttattccattatgaagcacctgaagtgcatgaatctggatcagtaagcgatcgaagtgatgtttacagcttcggtgtagttatgttggagcttctaacaggacgtaaaccttatgacagttcgtatccacgagctgaacaacatctagtacgatgggccacttctcaactctatgatattgatgccataacgaagatggttgatccttccattcgaggacaatgttctgataaggcattatcccgttttgctgacattattagccgctgcattcagcatgaaccagaattcaggccaccaatgtctgaagttgtccaagacttaactcgcatgatgcctttgacgaccattgatgcggtagtaggatattttggccaatgcaaaatgggtggaacacagtggcaggatgcagagactgcaccacgttttgtccactgccagtaatgctcctctgaatctctggtcaatttatagttcaaagctattgttgtaattctgtagtctgcactctgcacaatatatttcttagtgcccagttccagatcacgtggtgtgattatgcgtggttatctagaccatatgtaaataccaagaagttaaacaaatgtattatagcgtgcttgtttgaggaatgagaaagtacatcttcttactcctcactttattatttgatttgttaaatgaaatgagttggtccatcatatttcattcttt

SEQ ID NO: 9458 - DNA, 3081 bp, Zea Mays
caaagactcaacacaagcgcccccctcgtcgcagtcccgccgttacatggcccgctctgttcccctttccggcgcccgcgacggactgcgacgagcggatagatagatctgtgccccgtccctgtctcgccatcctcctttctcctcctccactccctatcgactatcgagcagagcgaatccttagcggggaagtctttccgagctcagggagtggggtttaaaacgcggctcgacgaaaggaaggccgcactcgctgctgctgctggtcgcttgctttcggtggcgagcgtctcggtaaagcggcgtcggcgtcggaggcggcggcagagactggacttgcttgctccttgctgcgcagtgtagtgctgtgctaccttggagacaggatcctgccgcagggactcataattgatcagtgtgccccaacataagagcgaaacgtgactgagtttgccagctcccccttcatccactgtggtcgctcgtctgctaatgcccgcatcggaggattgctcacggatatgcttctggtgatgggcaacccggggcgctcgcggcagttgtcagcgctggttgcttccgccgccatcttgctgtcactgtccgcgttgccaatttgtcggccctacacctacgagcaagatgtgtttgcgataaacggcttgtacacggcacttggagcaccacagctgcctaattggacttcaaatggtggtgacccctgcaatgaaggctggcaaggtgtttcatgtgtagcgtcaaatataacctccataattctcagcggtgcaaatttaggtggacagctgggcaacactttggggaattttacatcattaatcaccttggatctcagcaacaacaatattggagggaccataccagatggtctaccactcacaatgcagagatttttcctttcagctaaccaactaagtggtagccttccaagtacattgtcatcccttacacttttgacaagcatgtcactcaatagcaatcatttgactggagcgataccagatgtattttcagcactcactggacttgcaaatttagatttttctgataacaatttgaccggtccgttgccaccttcaatgggaaatttgacatcattgactagcctacatattcagaacaatcaaatatctggaactcttaatgtgttgcaagatctccctttccaagatttgaacgttgaaaacaaccttttctctggtcccgtgcctgtgaaattactgaacttgccaaacttcaagaaggatgggaacccattcaatacaagcatagctccatctgcgcagcctcccatcgcgccaacaccattaccgtctatcccaccttcgtcagggcatgtcccctcaaaagaacctgcacattcttctagtgttccaggtggtagtacttcaggatcaggaaaacatactacactcaaattagttggatatattcttattggagtggtattagcagtagttcttgtgctaattgcaatgtactgtttatccaagtacaaagaaaaaaggtcgagagatgatatttatatgaaaaacaagataggaagggtacctcagaagcttggagagcctaaaatcaaggagccaccattaaaactcaagaatgatgctgagaaagctccgaatgttgtttctgatggaagagaggagcataagttaaaagtgccaacatcagaaacttcaaatgtggtttatgatccaagtccaagggatggggcagaacttagattcatcaccgacagctgtacctttggctgttacaatgaataaaaaagagcatgtgattgatatggaaaaggctgataattttgttgaggaccaactgcatcctccgcagccgatggcactgcggactgaaaaagtcactgtcaatcccagtgtacgtacaagaaggggaagagtaccttcagttgaaaaggtggaatcgacgactactgtcaagtccttttccattgcatcccttcaacaatataccaatagtttcagtgaggaaaatatcataagagacagcaggtttggtaaggtgtatctggcaaagcttcctgatggagagtttgagcagcgattacttgtctatgagtactgtagcaagatgaccctacatgatgaacttcgtcatgtggatgactcaagcaagccattatcgtggaatgctcgcctccaagttgcttcagaggcagcaaaagcattgcaacatcttcatgacggttgccaaccaccagttgtacaccagaattttgaaccctctgttgttctgctcaacagcaccttagttgtgcatatttctgaatgtggccttgcatcactagcatcaaaatcagtttctcagttgtctggacacaccttattccattatgaagcacctgaagtgcatgaatctggatcagtaagcgatcgaagtgatgtttacagcttcggtgtagttatgttggagcttctaacaggacgtaaaccttatgacagttcgtatccacgagctgaacaacatctagtacgatgggccacttctcaactctatgatattgatgccataacgaagatggttgatccttccattcgaggacaatgttctgataaggcattatcccgttttgctgacattattagccgctgcattcagcatgaaccagaattcaggccaccaatgtctgaagttgtccaagacttaactcgcatgatgcctttgacgaccattgatgcggtagtaggatattttggccaatgcaaaatgggtggaacacagtggcaggatgcagagactgcaccacgttttgtccactgccagtaatgctcctctgaatctctggtcaatttatagttcaaagctattgttgtaattctgtagtctgcactctgcacaatatatttcttagtgcccagttccagatcacgtggtgtgattatgcgtggttatctagaccatatgtaaataccaagaagttaaacaaatgtattatagcgtgcttgtttgaggaatgagaaagtacatcttcttactcctcactttattatttgatttgttaaatgaaatgagttggtccatcatatttcattcttt

SEQ ID NO: 9459 - DNA, 2210 bp, Zea Mays
gtcgcgctgttcctctcgggctctcgttcctcttgctccctcccgcgggccgcggccgccttcgcccgtccccgtccccgtccccgtccccgtcccaatttccaccaacctttcccaatcgccctccaggctctggcactgcgagacgtttcattagccacttagccgttcccacgacacaatcagcaccaccggtgtcctcgctgccaaggcgcccgcccgctcgtgtgacgagtggcgttcgtccaccgcccattccgcgctcagctctgagggcctcccgcccgccgcggcatcatctccggctcctctcgtcaatggtaaggggggcgataggtgtcctaagatgaaactgcggttgcatctgttcgtcctgtgcgtgatcattatattcctggtgtacaacatggctaactttcaacataagcagacaacgttggaagcaaaatctcatccatttgatacagtgacggtgtctgacagagatgctgttaaggtgcctcaaaaggctgaggctaggattggttatttaccccatggtatagtggagtctaactctgacatggacttgaagccattgtggctgactacaagtgcacggtcaaagaagcctaaacaaaatgataattttttgattgctattgctgccggtataaatcagaaaaaaactgtggatgctattatgaagaagtttcttccagaaaattttacagctatattgttccattatgatgggaatgtcaatgggtggaatgatctaccatggagcaaaagtgtgatacatatagctgcctctaatcagactaaatggtggtttgcaaagaggttcctccatcctgctgttgtgtccatataccagtacatctttctttgggatgaagatctggaagtagataactttagcccgagaagatacttaaatatagttagatcagaagggttggagatatcacaaccaggtcttgactctaagctttctgaaattcatcaccggataactgttcgtaaaaaagcagggacctttcatagaagagttagccgggctaacaaaaagtgttcaagagaaggaccaccttgttctggatgggtcgagggcatggcaccagttttctcaaagtccgcttggcaatgtgtgtggcaccttatccagaatgatcttatccatggatggggcatcgattacaagtttgggtattgtgctcagggtgacaggacaaagaacattggcgtagttgatagtgaatttatagttcaccgaggagtgcagacattaggaggttctacaataacaaaggatggtattcgtggcaaaaatgccaagccactcggccagaaagcagctcaaatccaaagatcgagagggagggctccaggccttgatatgcgaacaaaggtgagctaacaaagcacttggtatacgtcgtttgaagtgtttaactcgaaaaatgttggtggaagctgaaaattcagagttcaaaaacctatcacttcgcttgtaaaactgctgttccgcttcagttgacagtaacagctcagtaatcaatagctacccagattatgcaatgcgtcggaatttacattccatcccatcgatcagccctcacggtttgctgcaatttttttcgatcttgcagatccggagaaaatcgcgatccgagctccgtgattttcagaagcgctgggaccgggctgcaagggaagacagaacatgggttgatccgtttgcccgctcccgaagaaagcggaagaatagaaacccacagtagatcagcataatcttcactgttacacttgcacataattccgtttgcaccttggatttagagtgtataataattgcataatcaacattgtataaattctcacagacgaaacgagaaccacacacgtgaaattttccgatgggagttgtgggttcttgtatcgaggggcaggtccaggatttaaaggatgggcattcggaattgtagttggcacaatttttttaacaacataaatttattattcatgggagcggataattatccattggacatagatgtggtataatttgttatccacatgtatgagtatgaatataataaggtattcattgatattttttttctgaacccaatgggtatcagacatgagtacaaatctatacctacgaacgtatatgagtatgagtatatattgaattttgtctcgtagttatagatttgtaaacc

SEQ ID NO: 9460 - DNA, 2303 bp, Zea Mays
agagaagcggcagtgttgggccgatagtgggccttcttgccgtgcgtcagtctttgggcatgcatcctctattgggccgtgcgtcaccgtctagcacacgcaccagcgcagcggcgaggggaacattgtgaaggaaccaacaaaccgagcggaaaacccggtcgcgggcgtggccggaacggcagctgcgccgcctccgcgctcgtcgcccgagccgaggaggccgtgtagcgctgtggggtgcgcgctgcgagcactgacagggcagcgcggatggaatcgagcgaggcgccacccgtcgcgtttcctctgaggctctgacccgaccgtcgctgtcgcgctgttcctctcgggctctcgttcctcttgctccctcccgcgggccgcggccgccttcgcccgtccccgtccccgtccccgtccccgtcccaatttccaccaacctttcccaatcgccctccaggctctggcactgcgagacgtttcattagccacttagccgttcccacgacacaatcagcaccaccggtgtcctcgctgccaaggcgcccgcccgctcgtgtgacgagtggcgttcgtccaccgcccattccgcgctcagctctgagggcctcccgcccgccgcggcatcatctccggctcctctcgtcaatggtaaggggggcgataggtgtcctaagatgaaactgcggttgcatctgttcgtcctgtgcgtgatcattatattcctggtgtacaacatggctaactttcaacataagcagacaacgttggaagcaaaatctcatccatttgatacagtgacggtgtctgacagagatgctgttaaggtgcctcaaaaggctgaggctaggattggttatttaccccatggtatagtggagtctaactctgacatggacttgaagccattgtggctgactacaagtgcacggtcaaagaagcctaaacaaaatgataattttttgattgctattgctgccggtataaatcagaaaaaaactgtggatgctattatgaagaagtttcttccagaaaattttacagctatattgttccattatgatgggaatgtcaatgggtggaatgatctaccatggagcaaaagtgtgatacatatagctgcctctaatcagactaaatggtggtttgcaaagaggttcctccatcctgctgttgtgtccatataccagtacatctttctttgggatgaagatctggaagtagataactttagcccgagaagatacttaaatatagttagatcagaagggttggagatatcacaaccaggtcttgactctaagctttctgaaattcatcaccggataactgttcgtaaaaaagcagggacctttcatagaagagttagccgggctaacaaaaagtgttcaagagaaggaccaccttgttctggatgggtcgagggcatggcaccagttttctcaaagtccgcttggcaatgtgtgtggcaccttatccagaatgatcttatccatggatggggcatcgattacaagtttgggtattgtgctcagggtgacaggacaaagaacattggcgtagttgatagtgaatttatagttcaccgaggagtgcagacattaggaggttctacaataacaaaggatggtattcgtggcaaaaatgccaagccactcggccagaaagcagctcaaatccaaagatcgagagggagggctccaggccttgatatgcgaacaaagatccggagaaaatcgcgatccgagctccgtgattttcagaagcgctgggaccgggctgcaagggaagacagaacatgggttgatccgtttgcccgctcccgaagaaagcggaagaatagaaacccacagtagatcagcataatcttcactgttacacttgcacataattccgtttgcaccttggatttagagtgtataataattgcataatcaacattgtataaattctcacagacgaaacgagaaccacacacgtgaaattttccgatgggagttgtgggttcttgtatcgaggggcaggtccaggatttaaaggatgggcattcggaattgtagttggcacaatttttttaacaacataaatttattattcatgggagcggataattatccattggacatagatgtggtataatttgttatccacatgtatgagtatgaatataataaggtattcattgatattttttttctgaacccaatgggtatcagacatgagtacaaatctatacctacgaacgtatatgagtatgagtatatattgaattttgtctcgtagttatagatttgtaaacc

SEQ ID NO: 9461 - DNA, 1712 bp, Zea Mays
aaagtcacacagctcacaaactggtggattcgtggcgtcacctgctaaaccatctgctattctgctcgacggctcagctctagcctccactccaggcaccggagtccgagagcccgcctacagtgatggcgcccaagcacctcaacctcttcgccgcggcgctgctcctcctcctcctcccctccggctccagcgccaccgccgtcgagtactgcaaaaaggggtgggactacccagtgaaggtgagcagcgtggaggtcgtccccgatcccgtcgtcaggggacagccggccaccttcaagatttccgcctccacagataaaaacatcactaaagggaaactaacgatagatgttgcatacttcatcttccacgtccactcggaaactcataacctctgtgatgagacttcttgcccagtaacaggtgaatttgtgctagctagccaacagacattaccatcgttcaccccgccaggttcctacaccctcacgatgaagttgctgggggacagcaacgaggaactgacctgcatctctttcgggttcagcatcgggtttgttgcgccgaatcccgtcatctgaacccagtatcgaatgtcatggatgtactttacatgaaccttgtagtgcaacattctccatggagtcagggcatcccgaggcatattttcccagagctcttctcctttgccaagaactcaaaaatgaccatcaaagaggtcaaggatcaagagcagttccatgatctttttcatttacctgtctctgatcaagcgtttgatcaatttctggtactcaaggggtcttgggagcaaattattcttaataatgttcatgaccgctggaagtatatttggggatcggacaaattctcgtcccaaaaagcttacagatctttcatgggccagatgcagactcatcctatctacaaactagtttggaaaagtaagtgtcagcctaagcatagagtcttctattggctgtggcttaagaacaggctaaacaccagaaatatgctgagaaggagaaacatggagctagattcctattcttgcgaaaactgtctttggcaaagagaggagaccctttatcatcttttcctcagatgcaacttcgcgaaagcctgctggaactcaattggcattaccccacccagaatttccaaccctgaagaggcatctgtaaacctcaaacaccagctcaacgttcccttctctatggagatcactattcttatgacttggagcatctggaaaagccgaaacgagtggctgttttcaaacagagatccctccgtgctccgctgcactcaggaatttagtagagaattgcgactaatcattcacagagcacggggagaattcgacacctcaatcccgaactggctaaatttgtggcaaatatagaaatagctcttcttttttctttctttctctcttctttttattgattgtaaaaggaacagggcctaacctttaatattcgctttctaataaaatgcgcagtaggggtttccccctcctgatccttcaaaaaaaaagtaagactcggaacgtgtgaccaactgctgtcttgcattcggagttgggcgcctgacctaacgatcttaactgcatacagttttatcatggacctaccagagtttggtgctccgtgctccatgtcagcatgccttttacatgtatataagactatgtacaacggctccca

SEQ ID NO: 9462 - DNA, 9354 bp, Zea Mays
cgtactccacctcatcaacctcaccacctcctccctctacacactgacttcacatctccatctctctctccactcccccgcttttgcatgcgtcgcggcagctccctgccccgagacgatcgacgaccacgacgacggtgggggaggtcagagagagagagagatatgagcccgtccgccgcctgcgttaaagcgttgctgttcgactgatcatcctccaccaccgagctgagtgcgcgtcggcgaaatggggaccaaagttaacataatcgtggggtcccatgtgtgggctgaagatcccgatacttgctgggtcgacggagaggtggttaagatcaatggcgaagaggctgagatccaggcgaccaatggaaaaaagattgttgcgaatttgtcgaaactatatcccaaagatatggaagcagctgccggtggagttgatgacatgacaaagctctcctatctccatgaaccaggagtgctgcagaatctggcgatcagatatgagcttaacgaaatctatacatatactggcaacattctcattgctgtaaatcctttccaaaggctgccacatttatatgatccgcatatgatgcaccagtacaagggtgctccatttggagagttgagtccgcatgtttttgctgtggcagatgttgcatacagagctatggttaatgagaataagagtaatgccattcttgttagtggtgagagtggtgctggaaaaacagaaacaacaaaaatgcttatgagatatcttgcctatttgggtggccgagctgcaactgaaggaagaacagtagagcaacaagttctcgagtcaaatccagttcttgaagcttttggcaacgcaaaaactgtaaggaataataattctagtcggtttggtaagtttgttgagattcagtttgacaagcatgggaggatctcaggcgctgctatcagaacttaccttctagaaagatcacgtgtatgccaagtatctgacccagagcgcaattaccactgcttttatctcctttgtgccgcaccacaagaggacgtcgataagtacaaattaggaaatcctaagacttttcactatctcaatcaatcaaactgctatgagttggtcggtgtaagtgatgcccatgaatatttagctaccagaagagcaatggatattgttggtataagtactcaagaacaggatgctatttttagggttgttgctgccatccttcatattggcaatattgaattttccaaggggaaagaagccgattcctctgtcttgaaagatgaaaaatctaagttccatcttgaaacaactgctgagcttcttatgtgtaaccctggagccttggaagatgctctttgtaagcgtgtcatggtaacgccagaggaggttataaaaaggagccttgatccttacaatgcaaccattagcagggatggtctagcgaagacgatatactctcgcttgtttgactggcttgtcgataaaattaatagttccattgggcaagatgctagttctaaatgtcttattggtgtgctggacatctatggtttcgagagcttcaaggcgaacagtttcgaacaattctgcattaactatacaaatgagaaactgcaacaacacttcaatcagcacgttttcaaaatggaacaagaggagtacactaaagaacaaattgattggagttatattgagtttgttgacaatcaagatgttcttgaccttatcgagaagaaacctggtggtgttatcgcacttcttgatgaggcatgtatgttccccaaatccacacacgagacgtttgcccagaagctataccagacttttcaaaagcacaagcggtttgtgaagccgaagctatctcgtaccgattttacaatctgtcactacgccggagaggtgctgtaccagtctgatcagttccttgacaaaaacaaagactacgttgtggcggagcaccaggaactgctgagcgcttctaaatgctcgtttatctccggattgtttccgcctccgccagaggagacgtccaaatcgtccaagttctcttccattggagctcgctttaagcaacaacttcaagcccttatggacacattgaactccacagagcctcactacattagatgtgtgaagccaaacaatgtcctgaaaccagcgatctttgagaacgtcaatgtcatgcagcagttgcgctgtggtggtgtgcttgaggccatcaggatcagttgtgccgggtacccgacgcgtcgcacattctacgagtttctgcatcgtttcggaatacttgcgcctgaggccctcgaagggaatagcgatgagaaggctgcgtgcaagaggatcttggaaaagaagggtcttttaggctttcagataggtaaaacaaaagttttcctgagggccggccagatggctgagctagatgccaggaggactgaagtgctcagtgccgcggcaaagacgatccaggggaagatgcggacacacatcatgcggaagaagttcctttccttgaggaaggcgtccgtgtgtgtccaggcgatatggagaggaagactggcttgtaagctgtacgacaacatgcggagggaagcggccgccatcaaagttcagaaaaaccagcgcaggcaccaggcgaggagatcctacaagctccgctacgcttctgtgctcgtagtgcagactgcgctgcgagcgatggcggcgcggaacgagttcagattcaagaagcagtctacgggagcagttacaattcaggctcgctacaggtgctatagggctcataagtaccacaagaagctgaaatgcgcagccattgttgcacagtgcagatggagaggaaggatcgcgaggaaagagctgaagaaactcaagatggaagcaagagaaacgggtgcgctcaaggaagcgaaggacaaactcgaaaagaaagtggaagagctcacatggcgcgtgcagttagagaaacgactaaggacagacctggaagaagcaaaagctcaagaggtgtcgaaactgcagaactctatggaagcattacaggctaaactggacgagacaaacacaaagctcgctaaggagcgagaagctgctaagactatcgaagaagcgcctcctgtggtgcaggaaactcaggtcctcgtccaagacaccgaaaagatcgattccttgacagcagaggttcaagaccttaagacttcattacaatcagagaaagaaagggctggcgatttggaaaagaaacactctgaagagcaacaggcgaatgaagaaaagcaaaagaaactggatgagactgaaataaagatgcgccagtttcaggactacctgagaaggttagaagagaaactcgctaatgtagagtctgaaaataaagtgctccgtcagcaagctgtctcgatggctccaagcaaaatcctttccggccgctccaagtccaatctgcaaagaaactccgaaaatgttcaagtgtcaagcaatgatccaaaaacagctccagaatccaacagcacgtcctcacctaagaaggagtacgatatcgatgacaagccacagaagtcgctcaatgaaaagcagcaggagaaccaagatctattgatcaggtgcatcgcgcagcacttgggctatgctgggaacaggccagtcgctgcttgtatcatatacaaatgccttctccattggaggtcgtttgaagtagaacggacaagtgttttcgatcgcatcattcagaccattgggcatgcgattgagacacaagacaacaacgaagtcctagcatactggctttcaaatgcttcgacgctgctgctgctgcttcaacggacattgaaggcgagtggatccaccggtatggctccacagcgtcgacggtcgtcttctgctacactcttcggacgaatgacgcagagcttccgaggagcgccacagggtgtaaatctttctctcataaatggaagcatggttactggggtcgaaactctgagacaggtcgaggccaagtacccggctttgctgttcaaacagcagctcacagcgtacgtggagaagatatatggaatgatcagggataatctgaagaaagagatatctcccctgcttggcttatgcattcaggccccgagaacatcaagggcaagcttaatgaaagggtcttcgcgttcaaacactaacactgctgcccagcaagctttgattgctcactggcaaggaattgtgaagagcctagggaattttctgaacatactgaaagtgaacaatgttcctcctttcttggtgcgaaaagtattcactcagatattctcatttatcaatgtacaactatttaatagtttactactgagaagggagtgttgttccttcagtaatggcgagtatgtaaaggcaggattagccgagcttgaacattggtgctatagggctactgatgagtatgcaggttcagcctgggatgagcttaaacatattagacaagctattggtttcctggtaattcatcaaaagccaaagaaaacattggatgaaataagtcacgacctttgtccggtacttagtatacaacagctatacaggattagtactatgtactgggatgacaagtatggaacgcatagtgtctccccagaggtaatatcaaacatgagagtgttaatgacagaagactccaacaatcctataagcaattcattcctcctggacgatgactcgagcataccattctctgtcgatgacatatccaaatcgatgcagcagattgacatatctgacatcgagccacctccattgatccgagagaactctggctttgtattcttgttgccgccacctgaatagatgtgtggcatgatggtcaattttgtcaatgattgcaagaacctaagaatggttattgggcgacaatctatgcagagctagatttacttatgcccaatggaatggagtgaatggcttcgtcgtaggtagatgttgatcatctacaccatggcaaatgtaacaaatccgctaggtttttatggcatgcctggactcacctagtgttgatccacctctagtcaagtagttgtgcaccccatagtgctactgttttcctttttgtttccattcagctttgcctttgattattccaatgctttggtaccctagttcaaagtatagtttagaaggtcttagtaaaaccagtagaaattccttccactggttgtttttagttctagagctttttgttctgagttcgctagagctgggtaataggatgtttactttcctccctcgttaatggttcagttctttggtgacatctttgtattattactgatcttgtgtatacattacattgaacacgatgcctacaatgttatagatggctattccgaataatgaaattattatgcttgtgtatttccctttctattttaaatgtatgttctgttctttctagacgcaagaggtcaactgcttttatttgtgacactgttttacttcggggatagtttcataccttgaaaaagtccattttagctctttagactatcaacagcttatccatccacatactcatattcaaactttactctgcgaacaatacagtctacaatgtaaaatagtacaaaacagtgttttaggtggtcacacgggtgaattattagcagccttggaactccactctctctcacaacactcttacgcttgactcaaggagatcagaagagggtgggcacaacacaagcaagtaggcgttgctagcttctctcggtggacacaggaatacaggatgctcacaacacaggcacacacttgtttcatgacggcactgcacaccagaaccaacacaaactctacttttctctcgacactgcacactaactctagacacaagcacaatactaccactgtcgctttgcatacaggcttcagcttatatgcacacacgcactgcccacgattgcatgcatgtagccactaatcacatgcatgctgttacaccgccattgtcagatactccacatgaggaactccatcctggtgagcgtggaagaagcgtgcgtcacactaatgtttgagtcgcaggtcttgagcgggtgtaactaagtgcagccatgttgttgctgtcatgtctgggtgtaagtctctggcgtgttgggttgtgttcttcggtcaccagttggtgggccatgttcctaagtagtcgcatatatgctgttgccttgggggtagggagaaccatgtatgaactttgctctgaatcaatacagtctgtctctagttcctcccccattctcgtctcctacctctgctccctctctactatcttctccttccattagcagtagctaacaattggtatcagagggccttcgttcctcagccatcgcatccatggtgtctccttcactggttgatgctcaactcactcaggcgttggagcaccagatccatacaatcctcgctgagctcgacaagcggttcacgacgatcgactccaagtgggaagcgcgagtcgaggcggcgcaccaagcagtggtgggcgccgtcgtggagtggcgaccccgggtggatgcctccatcgagcatcttcaacagcaccaagcagatgaagatgttgtcggcgggttcggtgatgtgggcgttgtcccagatccagtggaggaggaggtacctgtcgacacgcccaccaagtgtttgatgggagccctcaaccgcgaaacctatcctcgacaagggcttcaagcacagccgtccagcctagtgtgcccactcatggagttatttgagtttgtaacaatctcgtcgcgcggcttcgccactatattactccgcagctgcgcatcgccaatttggtattatgcagcacatatctgcgccatattgggactgttattcttccgaactctgttaccgtctatgaactgtggcgagctccaccagctggatctccagggagcccctgcgaccttggccatggccgacctccacttctcccttggcaggcgctgccctcctctggtccgagctcgagcaggtgagctcgccccatggcctcggctcctagcctccaggctcggctacgaggacaccacgctcgccctcaccctccgcctcccgggctccgactccggccgttcctcctcgctcgccgcgccctccgctgcgccgtcacccaaggcgcgggtggtggggtggccgccggtgaggtcgtaccgcaagaacgcgctcgccgactccagcaaggccaaccgcgcagccaatttcgtgaaggtggtcgtctcccgccgctcctcggcctctgctcctcccgcgcccggagtctactggcgtgctggacgttgctttcccaccgccttcaacgacgactccatcgattccaacgacaccgagggcttctacgcgtgggcaaacgccgaggacacggaggcagccctgccaccatcctcgccgctgccccggacgctctcgagcctcatccaccacacgttagctggggacgtcgtccatgccgccttcgacctagtctgccacactgcagttcccctgcgcggcagcggcggccaccacgacgccaagcagctggttccggacaccaccttctcagcattcttccacaagtccgtcgtcgcgctcgcctccaccaaaaacatcgtcggcctccacagcatactacatcgccaactcggccaccttcgcccgagagcgcctcccagatcacggttgggtcagcttcgtggtgaacgcgcaggcgttgtgggaggaaataggggaacggaaatcgcagcaaccgattctttggagcatctcaactctctccggaatgtgcttcaagcaagtggtgaacaggttgtttctcgtggatttggaagaccttatgtgttcattgcagagatgctaaaaagagttagacgtacatcggaagccaaagattcagctcgagtggcactgaaatcaccatggtggacgcttggctgcagttacgaagaggatgatgaactaccttcattgttagatagatgtctgctattgttgatttgggaagattgcacttatcacatgtctgctagtgcaatttcacatctaacggacttggaagatctatatttcagcagatcagctaataatggagtgttcatttgtctacagtgctatggtgttcatagaagcgttgggacacatgtttcaaaggtgctgtcagtcactctagatcaatggacagatgatgagatcaactccataatagaagttggtggaaactcttatgccaatgctatatacgaagcacttctgccggaggactatgagaagccgcatccaaattctagccaagaagagagagctgaattcatcagatcgaagtatgagttgcaagaatttgtgaagccaagcctcgtttccagctataagggctccttaggggaaaccagttctcaaaaacatacaggtaattccgtgttcctttctgctagtttcagcggtgaggctggaatgcttgagagtattggaatactaaaagttaaggtgataagagggactaaattggctgtaagagacctgatgagtagtaacccctacgttgtgctgaacctaggacagcagaaagcaaaaacttttgtgagtaaatgtaatcggaatcctgtttggaatgaagagtttaagctgtcagtttcccagcagtgcgggcctctgaagcttcaagtgttcgaccacgacatgctgtcaaaggacgattcagaagcaagaattctggtttcagaaaaagattgtcggtggtacagttcaagaccttggaacacatgctccttcacttagggcatcaggattctggatgtgctcagattctgcatcgacttgagggcaactcgagttttaaggagggaatgttataccgccattgtcaaatactccacatgaggaactccatcctggtgagcatggaagaagcgtgcgtcacactaatgtttgagtcgcaggtcttgagcgggtgtaactaagtgcagccatgttgttgctgtcatgtctgggtgtaagtctctggcgtgttgggttgtgttcttcggtcaccagttggtgggccatgttcctaagtagtcgcatatatgttgttgccttgggggtagggagaaccatgtatgaactttgctttgaatcaatatagtctgtctctagttcctcccccattctcgtctcctacctctgctccctctctactatcttctcattccattagcagtagctaacacgcgaccaccactcgcacacacaacgtggacacacacgttgtctgcctctgggtgcagtggcagagcaacataaaattaatgccactctataaaacttgaaagtcacattaaaaactatctaag

SEQ ID NO: 9463 - DNA, 2112 bp, Zea Mays
gacacggactggattctgttggttttggtctgcgttatcatggtttcgtacaaatggctcagtcggaacttctctgtgtcatcaaatgatgccaagaggttgcttcaggactttgtcaacaaacatggaactgacctccaagtgatttacagtgtgtcggggtggttgaagagcaatccccaaaactattgtgtaaagctcatttcaggcccaaaacttgaagaagcaaggcaaattttcaaagattcttgttcagttcagatctacagtatccaggcctgtattccaaaagatacagctgtactttggaatcctgaatttgtgcaggcagaggagcttttcaaccagccttttgattatgagaactgtttgagagataataggttttgtggtgttttgaattcttttgtcaagcgaacatccaatggaaagcatgtgagttcattgccaccaaagcccttgaatagtgctgcagccgccgcgcagtctaagcctagtgttactccaaaggagcagtttgttactgctcgacggcaagatttgcctgtaagttcaaagcagggagcagacactaagtccgagaaggataattccacagtattagataaggctggcaatggtcctgttgtcaaagaacaatcagttgatgcccatgcaagcaaaagtaaagctcaaaatggaaaggccatgcctagtaatggtggatcactggctaacatgtggggccgtgcatcagcaaaacctaagcctccaagtaccactaattctacagctgtagcaagtgttgcagctactgctgatgcacaaatttgtgcaaaggaagaagcagatggaaatagcagcgatgatgaacatgggataaagtacaagaggggatccactaatgcaaataacagaaagagaagagcggtatttgattattcggatgatgaggaagatgacaatattgtaagcattgcatctcctgagctaccaaaacagcataccccagaccctgttgttggaattgctgaagacgctgaagtaaatcaaaagaacttggaaactgaacaccatgtaccaaacaatgggaaaggttcctcaacgggggtggattctgacttcacatctgaatgtaaaatcaaaacgatcgatcctatgaacgattctgggattactttaaaagaaaagagcagtgatcctccaatcaatgacaagaagcaggattctgctgctgagcctgcctccacctcaccaaagaggagaaaggttttgaagacacgcatagatgagaggggaagggaagttaccgaggttgtctgggagaatgaagcttctgcagatgacaaggcagagcagaatgtcaacactattgatgcgactgcaagcggggcgactgtcccaagcaaaccgaagcccgcaacaaacgctgacaaaagcaaagctccaagcaaaacagcagcaggcaacaagaaagctgcgaaggctggagccaagcaagggagcattatgtcgttcttcaagaaagcatgagccagcggggggtgcgcatgcaccaaaatgagacaggacttggttaagcaaactggcagtggcagttatacctgaacattgtcagtcaggccggcgagcaagaagggctgctccaagcaggcgaccgttagctgtatcgtttgttttagctagcgtagcgatggttgagtcaagcagcagagagcacgcattctagctgaggtagtactatcttgctgaagatgtacacgtacacatatacaataactgttgtctactgtgctgtctagaagagtaaaggtccaaggtggaagggcggaacagtttgagtacctgtgtctggttggtatggaccccactggaagagagtgcacacaccatcatggtcttggagggtgcgagctgggcaccggtggcgtagcaagccagcaaacggccgacagcaacgtagggagggagttggagagccagagccaccccatcgtatcggtatcgcgactcgtcaacacatgtttgctgttggtcctacaagatgacgattcatataccagcttggagttggagagccagagccacccctgcggccgaccgaagccagcggctaagcagctaaatgcctga

SEQ ID NO: 9464 - DNA, 2824 bp, Zea Mays
cacatatgtgtttgtggctattttcttcatttagggatttgggattttggagtacatcacttgttaccctgttcctgtgtatgatccatctactggtatctacggcatggacttctacgtcgtccttgagcgtgctgggtaccgtgtcgcccgtcgccgcaggtgcaagtcccgtgttgggatccagcatagggtcactaaggaagacgccatgaagtggttccaggtcaaagagttgttactgcttctactccgaggccgagcccaccgggaccggtcacgccggcggaatgcagaacaggttggtccgttggtgcagccggaagatgccgacacacccgccagggaaacgaacgcccagatatgtctcgctgatgtatggggaccaccgtggcgtggccttcgtcctccgcggcctgtaaggcgggacccgctgtgtttgtgccagggaaatagagagccgccgaggcgggagcgggaaaaccgccgcctggtggctcatccgcggctccacgcccaaaaccccaaattccctatccctatcccgcgcgccctgttcttcgtctatctctctcccgactcggaaggaaaccctaggcgccacgctagggttctcgaaccttcgctccccaccccccgattcggaagccctagcctggaaggttccgggaccttctggcgcgggaggatggcggtcgtggaccagtcgctgctgccccagatccatgccctcttctccgacccgcttcgcgtggtttcgtacaaatggctcagtcggaacttctctgtgtcatcaaatgatgccaagaggttgcttcaggactttgtcaacaaacatggaactgacctccaagtgatttacagtgtgtcggggtggttgaagagcaatccccaaaactattgtgtaaagctcatttcaggcccaaaacttgaagaagcaaggcaaattttcaaagattcttgttcagttcagatctacagtatccaggcctgtattccaaaagatacagctgtactttggaatcctgaatttgtgcaggcagaggagcttttcaaccagccttttgattatgagaactgtttgagagataataggttttgtggtgttttgaattcttttgtcaagcgaacatccaatggaaagcatgtgagttcattgccaccaaagcccttgaatagtgctgcagccgccgcgcagtctaagcctagtgttactccaaaggagcagtttgttactgctcgacggcaagatttgcctgtaagttcaaagcagggagcagacactaagtccgagaaggataattccacagtattagataaggctggcaatggtcctgttgtcaaagaacaatcagttgatgcccatgcaagcaaaagtaaagctcaaaatggaaaggccatgcctagtaatggtggatcactggctaacatgtggggccgtgcatcagcaaaacctaagcctccaagtaccactaattctacagctgtagcaagtgttgcagctactgctgatgcacaaatttgtgcaaaggaagaagcagatggaaatagcagcgatgatgaacatgggataaagtacaagaggggatccactaatgcaaataacagaaagagaagagcggtatttgattattcggatgatgaggaagatgacaatattgtaagcattgcatctcctgagctaccaaaacagcataccccagaccctgttgttggaattgctgaagacgctgaagtaaatcaaaagaacttggaaactgaacaccatgtaccaaacaatgggaaaggttcctcaacgggggtggattctgacttcacatctgaatgtaaaatcaaaacgatcgatcctatgaacgattctgggattactttaaaagaaaagagcagtgatcctccaatcaatgacaagaagcaggattctgctgctgagcctgcctccacctcaccaaagaggagaaaggttttgaagacacgcatagatgagaggggaagggaagttaccgaggttgtctgggagaatgaagcttctgcagatgacaaggcagagcagaatgtcaacactattgatgcgactgcaagcggggcgactgtcccaagcaaaccgaagcccgcaacaaacgctgacaaaagcaaagctccaagcaaaacagcagcaggcaacaagaaagctgcgaaggctggagccaagcaagggagcattatgtcgttcttcaagaaagcatgagccagcggggggtgcgcatgcaccaaaatgagacaggacttggttaagcaaactggcagtggcagttatacctgaacattgtcagtcaggccggcgagcaagaagggctgctccaagcaggcgaccgttagctgtatcgtttgttttagctagcgtagcgatggttgagtcaagcagcagagagcacgcattctagctgaggtagtactatcttgctgaagatgtacacgtacacatatacaataactgttgtctactgtgctgtctagaagagtaaaggtccaaggtggaagggcggaacagtttgagtacctgtgtctggttggtatggaccccactggaagagagtgcacacaccatcatggtcttggagggtgcgagctgggcaccggtggcgtagcaagccagcaaacggccgacagcaacgtagggagggagttggagagccagagccaccccatcgtatcggtatcgcgactcgtcaacacatgtttgctgttggtcctacaagatgacgattcatataccagcttggagttggagagccagagccacccctgcggccgaccgaagccagcggctaagcagctaaatgcctga

SEQ ID NO: 9465 - DNA, 1604 bp, Zea Mays
aattttcgggggccgtttcttggtttttcctctttctcctccctcctcctcctcctccttcctccttcctctcgctcgctcgctcccctcccttcccccgctccctctcctcctcctcccttcattcctacctccgctcgcgccactctcctccgaccgaggggcagggaacggtgcccacccgcccgcccgtccgaccgccatggtctcctggcggcgcagcgcgtcctggctgtcgtcggcgtcgcgctcctcgctcggcaccgccgtcggcggggaggccaaggtcacgccggaggcggatccggcggcgcagcacgacgaggccgacgaggagcgctggtcgcgcctgctgccggagctgctcacggagatcatgcgccgcgtcgacgccggcgccgagcgctggccgccgcgccgggacgtcgtggtctgcgcctgcgtgtgccgccggtggcgcgacgccgcggtctcggtcgtccgcccgccgctcgagtgcggcaggatcaccttcccgtcgtcgctcaagcagcctggaccaagggatgcgccgatgcactgttttatccggagggacaaaaaaaattcaaccttttctctctatctcagcttaacgcaggcctaacggataaagggaagtttcttttggctgctcgaaggttcagacaaggagcacatacagaatatatcatctcttatgactatgatgatctgcacccaagaagcagttcatatgttggaaagttgagatctgacttcttggggacaaagttcatcatctatgatagccaggcgccatatgacggtgccaaaccttcgaggacccgatccactcgccgctttgcaagcaagcagataagcccacaggtttcaggcggcaatttcgaagttggacaagtgacctacaggttcaacttcatgaaatcaagagggccgagacggatgcagtgcaatatccagtgccctgtaggccagggcagcgcttcggatccgtccaaggagaaaacaccctcgccgagttccttggacctgaagaacaaggctccaagatggcacgaccatcttcagtgttggtgcttaaatttccacggtcgggtgaccgtcgcctccgtgaagaacttccagctcgtcgccacagctggctccggcggtccatggggcgtcggagacgaggagacggtgatcctgcagttcgggaagatcgaggacgatgcgtttacgatggactaccggcagcctctgtccgccttccaggcgttcgccatctgcctgaccagctttggcacgaagctggcctgtgaataaatggttgccggtttaccaactatgttggggatcagattgtagggggtagtctgaactagttgccctgagcacctcagatgggagaaaactggcgataagaaacagggcggacgttgtccctataagctttgactccttgtaatcgcctaaatgattgatttatatatatatgatgtgcgcctatgttgttgaagagatgacgatgacttatagttgtaaatggcactccctttcgtttggtgacattcactcatcactcataatgcctcattccgttgtaatgtgctgttgaacttccc

SEQ ID NO: 9466 - DNA, 1407 bp, Zea Mays
tataatatcaagtatgcaatatatatttggtctcaaagtacaagttcaaccaccttctgcaataggctaaccaactataaggataacaaaatgtagcatgtcctctgttcgtatcattgtctgcttgatcaccaccctttttgctactgatttctttgaagtcaaggctgtgaaagaaattgagcctgcacttaagaagcagctcatcatctccaccaccctgatgactgttggtattgctgtaatcagctggttggcccttctagctaagttcaccatcttcaactttggtactcagaaggatgtctccaactagggcttgttcttctgtgttgcaattggtccatggctggtctgattattggttttgtcacagaatactacactagcaatgcatacaatcctgtgcaagacgttgcagattcctgcagaactggtgctgtcactaatgtcattttgggtcttgctcttggatacaattgccgctcttggtatgctgagcacaatcgcaactggtcttgctattgatgcttatgctcccatcagtgacaatgctggtggtattgctgagaactgatgctgttgatgctgctggcaacaccactgccgctattggaaagggatttgccattggttcagctgctcttgtgtctctggcgctttttggtgcctttgtcagcagagctggagtcaaggttgtcgatgtcctctcccccaaggttttcattggtttgattgttggagccatgcttccctattggttctctgccatgaccgtgaagagtgttggaagtgctgccctaaagatggtggaggaggtccgcagacagttcaacaccattcctgggttgatggagggaactgccaagcctgactatgcaacctattggaagatctccactgatgcttccatcaaggagatgattcctcctggtgctctggtcatgctcactcccctcattgttggaaccctcttcggtgttgagactctctatggtgttcttgctggtgccctggtttctggagtgcaaccgtcgttttctcttaacagaaaagaactataaaaacgtcgccgctgtcaaaacccagaaattacgaggcgcgaaatggaaagcttccagcagattaacgatcggctagatttgattcattccgcccgcccactacctctcacggtcacggccaatccggccaacccagagatcacgtgtcagtgctattttgtgtacaagtactacttaatatatgtttgaaaacttttttaagtgatttccaaacttgaacgggaatcattcttattcttttaaatgtctgatagtagttattgtttgtgtgacattgtactgttttgtttcttaaacaaacaccattctacaaattttgcatcgtccctgtagtgcgcccgta

SEQ ID NO: 9467 - DNA, 2128 bp, Zea Mays
atgtcctctgttcgtatcattgtctgcttgatcaccaccctttttgctactgatttctttgaagtcaaggctgtgaaagaaattgagcctgcacttaagaagcagctcatcatctccaccaccctgatgactgttggtattgctgtaatcagctggttggcccttctagctaagttcaccatcttcaactttggtactcagaaggatgtctccaactagggcttgttcttctgtgttgcaattggtccatggctggtctgattattggttttgtcacagaatactacactagcaatgcatacaatttcaaagcctacaagtctcttatgttttttcttctcatcgtttctttgtgatggtgttttaataatcctaacatgtttattctgtggtagtcctgtgcaagacgttgcagattcctgcagaactggtgctgtcactaatgtcattttgggtcttgctcttggatacaagtcggttatcatcccgattttcgctatcgctgttatcatctatgttagtttctccattgctgcaatgtacgacatcgcagttgccgctcttggtatgctgagcacaatcgcaactggtcttgctattgatgcttatgctcccatcagtgacaatgctggtggtattgctgagaactgatgctgttgatgctgctggcaacaccactgccgctattggaaagggatttgccattggttcagctgctcttgtgtctctggcgctttttggtgcctttgtcagcaaagctggagtcaaggttgtcgatgtcctctcccccaaggttttcattggtttgattgttggagccatgcttccctattggttctctgccatgaccatgaagagtgttggaagtgctgccctaaagatggtggaggaggtccgcagacagttcaacaccattcctgggttgatggagggaactgccaagcctgactatgcaacctattggaagatctccactgatgcttccatcaaggagatgattcctcctggtgctctggtcatgctcactcccctcattgttggaaccctcttcggttttgagactctctatggtgttcttgctggtgccctggtttctggagtgcaaccgtcgttttctcgcggatgcgattttttatttcattgcattggatacgacttgcgtccgctttctcacccaatcaggcggccctccgcctgcgcacgcctcgtgttttccgtctcgccaccgtgatgtcgcctctgctgcttcgtcgcgtcgtcgcctctctgctgctccacggatccctgaagtgctgctgctccggcgccacgggcggcgccctctggcagccggctgccaggggcgcgtggaggatgtagattggtcctggtggcggcgacagcggagggccagcaactgcgagcggtaccgtgctcctgcggtggcttcgtatgcagggaccggaggtctacagtagcgcgcatctagccggctcagcatcgtggatctaaccagaggaggccacggctgttgctcctccctcggcaatggcgagggttcgagacaggacgaagcacttcaaaggggtcgcaatgctctcacatggatacatcgagaaaatgggaaccactcgaaaacgtcgctcactctggctgaggtaatggaaaatcactacgcatccaaaatcagcactttcaatctttagaaaatagcactggttattggagtcattttttgaccgatggagttatcctttgattcagtaagtattttttcctaaaaaacaaatcaaccatgtggcacctgaaccaccatcagagattgcagaggagcacgatggtttagagagtgttttagtgcctatgcaggggattgtggttaatgggaaaagtacttcagagctattgagtggctctgtatcattgaggtcagctgaggtggttggaacacctgttggacgaattgtgaagtgtgaggagtttctgaaggctgcaggacctgttatgcactgtgtccttgcttggagccatcacctctctgtctccggtttccttggcatgatgactgttggtattgctgtaatcattgtctgcttgatcacccactcctttttagctctgttcgtatcattgtctgcttgatcaccac

SEQ ID NO: 9468 - DNA, 3130 bp, Zea Mays
atgtcctctgttcgtatcattgtctgcttgatcaccaccctttttgctactgatttctttgaagtcaaggctgtgaaagaaattgagcctgcacttaagaagcagctcatcatctccaccaccctgatgactgttggtattgctgtaatcagctggttggcccttctagctaagttcaccatcttcaactttggtactcagaaggatgtctccaactagggcttgttcttctgtgttgcaattggtccatggctggtctgattattggttttgtcacagaatactacactagcaatgcatacaatcctgtgcaagacgttgcagattcctgcagaactggtgctgtcactaatgtcattttgggtcttgctcttggatacaagtcggttatcatcccgattttcgctatcgctgttatcatctatgttagtttctccattgctgcaatgtacgacatcgcagttgccgctcttggtatgctgagcacaatcgcaactggtcttgctattgatgcttatgctcccatcagtgacaatgctggtggtattgctgagaactgatgctgttgatgctgctggcaacaccactgccgctattggaaagggatttgccattggttcagctgctcttgtgtctctggcgctttttggtgcctttgtcagcaaagctggagtcaaggttgtcgatgtcctctcccccaaggttttcattggtttgattgttggagccatgcttccctattggttctctgccatgaccatgaagagtgttggaagtgctgccctaaagatggtggaggaggtccgcagacagttcaacaccattcctgggttgatggagggaactgccaagcctgactatgcaacctattggaagatctccactgatgcttccatcaaggagatgattcctcctggtgctctggtcatgctcactcccctcattgttggaaccctcttcggttttgagactctctatggtgttcttgctggtgccctggtttctggagtgcaaccgtcgttttctcgcggatgcgattttttatttcattgcattggatacgacttgcgtccgctttctcacccaatcaggcggccctccgcctgcgcacgcctcgtgttttccgtctcgccaccgtgatgtcgcctctgctgcttcgtcgcgtcgtcgcctctctgctgctccacggatccctgaagtgctgctgctccggcgccacgggcggcgccctctggcagccggctgccaggggcgcgtggaggatgtagattggtcctggtggcggcgacagcggagggccagcaactgcgagcggtaccgtgctcctgcggtggcttcgtatgcagggaccggaggtctacagtagcgcgcatctagccggctcagcatcgtggatctaaccagaggaggccacggctgttgctcctccctcggcaatggcgagggttcgagacaggacgaagcacttcaaaggggtcgcaatgctctcacatggatacatcgagaaaatgggaaccactcgaaaacgtcgctcactctggctgaggtaatggaaaatcactacgcatccaaaatcagcactttcaatctttagaaaatagcactggttattggagtcattttttgaccgatggagttatcctttgattcatgcctatgcaggggattgtggttaatgggaaaagtacttcagagctattgagtggctctgtatcattgaggtcagctgaggtggttggaacacctgttggacgaattgtgaagtgtgaggagtttctgaaggctgcaggacctgttatgctggttggcccttctagctaagttcaccatcttcaactttggtactcagaaggatgtctccaactggggcttgttcttctgtgttgcaattggtccatgggctggtctgattattggttttgtcacagaatactacactagcaatgcatacaagttcaaagcctacaagtctcttatgttttttcttctcatcgtttctttgtgatggtgttttaataatcctaacatgtttattctatggtagtcctgtgcaagacgttgcagattcctgcagaactggtgctgtcactaatgtcattttgggtcttgctcttggatacaagtcggttatcatcccgattttcgctatcgctgttatcatctatgttagtttctccattgctgcaatgtacgacatcgcagttgccgctcttggtatgctgagcacaatcgcaactggtcttgctattgatgcttatgctcccatcagtgacaatgctggtggtattgctgagaactgatgctgttgatgctgctggcaacaccactgccgctattggaaagggatttgccattggttcagctgctcttgtgtctctggcgctttttggtgcctttgtcagcagagctggagtcaaggttgtcgatgtcctctcccccaaggttttcattggtttgattgttggagccatgcttccctattggttctctgccatgaccgtgaagagtgttggaagtgctgccctaaagatggtggaggaggtccgcagacagttcaacaccattcctgggttgatggagggaactgccaagcctgactatgcaacctattggaagatctccactgatgcttccatcaaggagatgattcctcctggtgctctggtcatgctcactcccctcattgttggaaccctcttcggtgttgagactctctatggtgttcttgctggtgccctggtttctggagtgcaaccgtcgttttctcttaacagaaaagaactataaaaacgtcgccgctgtcaaaacccagaaattacgaggcgcgaaatggaaagcttccagcagattaacgatcggctagatttgattcattccgcccgcccactacctctcacggtcacggccaatccggccaacccagagatcacgtgtcagtgctattttgtgtacaagtactacttaatatatgtttgaaaacttttttaagtgatttccaaacttgaacgggaatcattcttattcttttaaatgtctgatagtagttattgtttgtgtgacattgtactgttttgtttcttaaacaaacaccattctacaaattttgcatcgtccctgtagtgcgcccgta

SEQ ID NO: 9469 - DNA, 1072 bp, Zea Mays
atgccgttaggtatgttagtatgttcaaacgtggctatagtgactgtggcacttactgcacaatggccttgggcggctgacatcattgctgtttgtacctcgttgttggatacgttgccagcagtcacaacacctactgaaagggcagatgacgatgatgagatgcccatggatgtcaatattaaaattaatcttgatgttgatttggaaagacagataactgcagcaattgattcaaagctacttcaacatttggtgaatgccctcttcagaggtacattaagcacaaatgattctgatctgtctggaccatcagatgctgaagttgatgctgtaggatctatttgtgcttttcttcatgttacgttcaatacatttcctctagagcgaattatgactgtcctggcataccggactgaaattgttcctgcactatggaagttcataaaacgttgccatgcaagccgaagatggccattttttttgaagtttgcatcttcattacctgctgattctcctggttggctccttcccatgtctgtattctgtcccatatacaagcacatgttgaagatcattgataccggggagttctatgaacaggagaaacccctttcccttaaagatttgaagtccttggttctcattttaaaacagacgccaggtgaagctctgatattgggtgggtgggcattatggcaacttctgtgggttattccatcctcttctactcagaaagtgtcacccaacccttcaggccttaaaaagttgtcagtggagaatgtcaagactagagctagggttgggttatctgaacttctcacacagttgcaagactggaacagccgactaccattcactgctgcaagtgatttctattctcaagaagctacgagcgaaaattttgtgtctcaagcaatacttggtaatactcgagcatcagagatcataaagcttgctccttttttggctccatttaccagtcgagtcaaaatattcactcggttcaaaataagaagaagtcgacttttggaagatgcttttgatcagctaagtttgctttctgaagaag

SEQ ID NO: 9470 - DNA, 2179 bp, Zea Mays
gactcctctttcccctccccgagcgtgcacgtctcgtcatcgccctactcgctcgccccatcccggagtctccccggctcccaaaccctagcgcctcccggacctcgcaggtgagggaggcggcgatgttcttctccggtgacccatcggcgcggcggcgggtcgacctcggcgggcggagcagcaaggagcgggaccgcaaggtgctgctcgagcagacgcgcgaggagcggcgccggcgccagggcctccgcctccagaacacctccgccacgaagatccagagggaagaaggctttggaattggcccgctcagaggttcggaagaatttttgctcaacttttggggagcattgcgagaggatagagtggaacatctttggcactaattctgactttcttcggcaattactgttcttcttcaatgcaaatgaagacaatgacatagctatactttgtcatgtctgcaatttgctgctgcaatatgttaaacaaggcggagatgttgtaactctcttcactggtgtgaatggctcctcgctgcaacctcttgttgctcaccgagtaaaaaaatttgccctcatctgtgtgcaagcagtctatcaaaagaggcatgattggggcagccaacttttaacaacacctggaaccacatcagtgccttctgtgtcattactggaaactgtaggttgcttgataaatccaaaatttctttggaactgcaaagtagttggttatcttcagcagagaaagatctattgcttatttcgtggcattatcgtatctgtaccgcaaaatgtcagaaattctggtcattttgatagtgcatctgtgctggagcaagtgcttatgcttgttgcttcgcatgttggccatcatccctgttgttgtctgaaagtggatccaagatggagtttctcgtctcagcttctgtccatcccttttctatggcatcgtttaccacaactcaagaaggttttctccgttaacgggctcaacaaatattatatccatcaaatagcttgccttttgcccagtcttgttgatgtccttccaaacgatatatcagctaatcatccaggatatgcgtgcgtccttgcaaatgttcttgaagctgcaacctggattttgtctgatgcaaagttagcttctgattcagcggctgacatcattgctgtttgtacctcgttgttggatacgttgccagcagtcacaacacctactgaaagggcagatgacgatgatgagatgcccatggatgtcaatattaaaattaatcttgatgttgatttggaaagacagataactgcagcaattgattcaaagctacttcaacatttggtgaatgccctcttcagaggtacattaagcacaaatgattctgatctgtctggaccatcagatgctgaagttgatgctgtaggatctatttgtgcttttcttcatgttacgttcaatacatttcctctagagcgaattatgactgtcctggcataccggactgaaattgttcctgcactatggaagttcataaaacgttgccatgcaagccgaagatggccattttttttgaagtttgcatcttcattacctgctgattctcctggttggctccttcccatgtctgtattctgtcccatatacaagcacatgttgaagatcattgataccggggagttctatgaacaggagaaacccctttcccttaaagatttgaagtccttggttctcattttaaaacaggcattatggcaacttctgtgggttattccatcctcttctactcagaaagtgtcacccaacccttcaggccttaaaaagttgtcagtggagaatgtcaagactagagctagggttgggttatctgaacttctcacacagttgcaagactggaacagccgactaccattcactgctgcaagtgatttctattctcaagaagctacgagcgaaaattttgtgtctcaagcaatacttggtaatactcgagcatcagagatcataaagcttgctccttttttggctccatttaccagtcgagtcaaaatattcacttcccaattaacgtgttctagacaatcaacatcacattctgcattgacaagacagcggttcaaaataagaagaagtcgacttttggaagatgcttttgatcagctaagtttgctttctgaagaag

SEQ ID NO: 9471 - DNA, 4834 bp, Zea Mays
tattactccaatcaagattgagaacttcgattgatctctgagagagtggtgtccggttcgagtttagtgcctggttcaacaacttcaaccaagggacgcatctaccacgagacgtatggttgccaaatgaatataaatgacatggagattgtgctttctatcatgaaaaatgaaggctatgatgaaattgtccctgatcctgagagtgcagagataatatttatcaacacctgtgccatccgggacaatgcagagcagaaagtctggcagcgtctcaactacttttggtttttgaaaagggaatggaaagctaatgttgctgaaggtagagcaaaatctatgcgtcctccaaagattgctgtcctggggtgcatggcagaacgactgaaggagaaaatactcgattctgataagatggttgatgttgtttgtggacctgatgcatatagggatttgcctaggttgcttcaggaagtcgattacggccacaagggcatgaacacacttctatcactcgaggaaacttatgctgatatcaccccagtaaggatctctgacaattcaattacggcatttgtgtcaatcatgagaggttgcaataatatgtgctcattctgcatagttcccttcactagaggtagggaaaggtctcgcccagtgtcttctattgtccgtgaggttggtgagctatggaaagttggtgtgaaggaggtaatgcttcttggtcagaatgtaaacagctataatgacacttctgaagtagaagagttggagcctggcaaaaattggcaactcagtgaaggattttccagcatgtgcaaggtgaagaatatggggctgcgttttgctgatctcctggatcgattatctttggaataccctgagatgcggttcaggtttacctcaccacacccaaaggatttcccagatgagctactgtatttgatgcgggataggtataacatctgcaatcttattcacttaccagcacaaacaggcagtacagcggcgctggaacgaatgcggaggggttacactcgagaagcatacttagaacttgtccacaaaattcgtgatgtcattcctgatgttgggctaagcagtgatttcataactgccaccgccggttggagactgcagcagtgcagcaggcgagcaggactgcaggagaaggggcagggtgctgtagctgccggtgtagccgccggcttttgtggagagacagaagacgagcacgccgagacccttagccttgtgagggctgttggatacgacatggcctacatgtttgcatacagcatgagagagaagacccacgctcaccggaactacgaggacgatgtacccgaaggtgtgaaacagaggcggctcatggaactgatcaacactttccgcgagaccacgaagaagaactacgactctcaagtcggcacagtgcagctcgttctcgtggaggggcccaacaagcgtgctcccaaaacggaagtgatagggaagactgatcggggccacaaggtgtcgtttgcccgcgtccctgtcccgcacacgttcgaaggcgaagaagcacgtgagccggcagtcggtgacttcgtcgagccaaatttctgtgcggtgttggtcctcccggaacaaattctgtgcagtgtcgcgaaaagcagcatacgcgcaaattcaaaaccacagattcacagcactacgctgcaaatcaaaacaaaactgaacgactcgagggagccctcgactgtcgaccatctccagccgtctatccgcggtcggacggtccaaacacgcatcaaatcaaacggacgaaaatatccccaatcccctaaaccccgttcgttgcccaccaacgccaccctctgtcatccaccaccatccatggccatggcgtcctccccggcctgccacttccgccacccgccccgcctccgcctcctcctcccgctgtccacctcggccccccacccgtggctctactcctggtcgcacccgcgccagcgcggccgactccgcgcgccgcccgccgcgctcgacctccgtccggagccgtccccgtcgtccgactccgacgatgaggacgccgtcggtgccagccgctcctccggccgctccaccatgtccctcatcctcagccgcctccgccgcgccggctactccggcgaggacccgcgtgccgccgccccaccgcacccgccgcgggggtcggtcgaggacgtcttccgcgccgacgatggcgtgctccccaacgcgcgcggcgggttcgacgccgacgacgaggagcgggcgctcggggacgcccgcttcccgtgggagcgccccatgccgccgcccgaggccgcgccgcggtccgcgcggtcgcccacgtggatggcggagctgacgctccccgccgcggagctcaggcggctgcggcacgccgccatcaggatcaagtccaggaccaaggtgggcggggccggggtcacgcgcgagatcgtggagaagattaaggagaaatggaagacggaggaggtggtcagggtcaaggtctctggcacgccggcgctcaatatgcgcctcttccacgagatactcgagagaaaaacaggaggattagtaatatggagatcagggacttctgtttctctgtaccggggagtagattatgatgaaccagaacccactaagaaatcaaagaagaattcacagtctcttgctatggatttcccaattaaggggtcttctaatccttccttactaccaactgagacagcgaacagtgtacgagacagcaatgtagctttagtttctaatgctgcgaaagaggaactagttgtacaagcaccagaaatcaagtatgaagatgaaattgacaaactgttggatgaacttggcccaagatacactgactggcctggatctgacccgttaccagtagatgcagatttacttcctgcaaacatgccaggttacaagccccctttcagagttctgccatatggtgttcggccatctcttagccgaagggacactaccaatttacgccgtcttgctcggggactgcctcctcactttgctctcggacgaagcagacaactccaaggcttagctaatgctatggtaaagttgtgggagaaaagttctattgctaaaattgctttgaagagaggagtacagcttaccaccagtgagaggatggctgaagatattaaaaaattaacaggtggtgtgatgctttcaaggaacaatgaatttatagtcttctacagagggaaggatttcttgtcctcagaacttgcagaggtgctactagagagggaaagattagcaaagtcacttcaagatgaagaagaagcacggcgaaaggcagcgtcttatttttcaagtgctgagacatatgcacagcccactgtagctggtactctaggagagactctggaggctaactctaaatatggaactaaacatgatgagaatcatgcagacaaaatggcaagaactattgaagctgcaagacatgctgacctcgtaagaaagctagagtggaagctttcacttgcacagaaaaagatggagaaagccgaaagggtactaggaaaggttgagacagccctgaggccaaccgaagattccagacctcctgaaacaataacagatgaagagagattcatgttccggaagcttggtctaaggatgaaggcatttctgctccttggaagaagaggagtttttgacggcacaattgagaacatgcacttgcactggaagtacagggagctggtgaagatactagtgaaagcgaagtcttttgcagacgtgaagaggatagcactgtcgctggaagccgagagcgggggaatcctagtttcagtcgacaaagtctccaaaggctatgccattgttgtgttccgagggaagaactacagacgcccttcctcgctcagacctagaaatctcctgtcaaagcggaaggctttggccagatccatcgagctccagagacatcaggccctgagtcgtcatttcgcaaagctaaacaggaaggtggagcggcttaaggcagaactggtccagatggaagacgtgaaggagcaaggagacgaggagctgtacgccaaactggatgccgcctattcgagcgacgacgaagacatggaggatgaggacgacgaggcctacctcaagcgctttgacaatgaggtcgccggtgctaccgccgacgacgatggcagcgacgactacacctccgccgccgacgaggccgattaccccgactcagacgacgaagctggtgattgctccgaagacgaaggcgaggacgacgaagatgaggcggctgccggagtctctgacgctggcttccacggcgaagtagtaggtttcagttccgacaccgacagacgaaaccacgacgtaaatgagtactagaacagtgctggttgtttgatgcatcggcgtcagcgcttcacgtggggttcgtcaggcttcgctggctggaatgcgcgtggtgtaggtggaaggccctacgctgcttggcggtgccggtgctgctgggggcgcatgaacgatgaatcctgcggctgacgccctcgtttccggcctcgggcccaatgcatcgagccaggaaggtgtccgctcctcaccgcgagagcaggcagttcgactttgcgcgtaccgtacgcaaccttccgtgttcctttgcatggtgactggtgaggtaatgccaaaacatcacagagcggtgagcactgcactttgtacgaaacgcgcaggacaatccactgtccatacccataagacataaaatacgtactccttctgtccacataaattagttattttaggtttgttctaa

SEQ ID NO: 9472 - DNA, 1985 bp, Zea Mays
aatccctaacctcccttgcctcccccgacttcgctcccgaatggctcgccccgcatccaccgcgcgcaaaccgtcctcgctctcgttcagtccgtctccccctctctccatccaaagcatgtgcgacgccgccgccactctccttcatggccttcgtgtgtccctccttccctgcccgctgcccctgcctacggccgcgtcctgcccggcgcttgtccacgccagacgcccacaccagagaccaccgccggtcagccacacgctcgagaataggcggcggcgcaggtcctcctccatctctatcatggatcagaaggccaatgaagctattttggaagtgttagaccttcgatgtttgggtctagaaggtgaagctgatcagttgctgctggatgagcttaacctgaatcatcatattattggaggagagcttctagaattgtcaaaaaatgaagtgcctcctgaagatattgttttccaccgtttatatttgaacaagactggcccagttaatcgtaaggcaaagcggaaggactcagttcttgatgaaggaaaagtgtgaggagcttgttaccactcaataggaaaattgttttagaggaggactagaccaggcgaatggcttgccatggaaacagtagcagttgcagatgaggatatactatcaaggctatgaaaatggctactgctaggaatctagatggacagattgacatggtgaaggtgcttgtcttaaagaacaagacaaacttgccctcaccaactcttcagtaaacctttggtggtagagccacaacaggcaatggttatgggttcacctttagaggatgcaagacatttggcccagagctacaatgggacgtgctgcgatcaagatgtaggtatcaaagtacttgagcctgagcgggttagtgttgatatgctacgtgagtttgcacaggaagtttatataatgaagtgagtgatgagctttacttatgcttggactaagaaaattgtgtaacagtcacttcatgatacaacattttagaatgatgttccatcatttatttatgactgcccaagcaaattggattcgttgtaatgacttctcatgtgggaagttacatgatgctaatttacgatttttgtgtttcatatttctgcaatttgagtttactaaccatgggtttaaggaatgatttattgtcactttctccaaccatgtttactcctaattctatagaaagatttgtcacaaaaatgatgtgcaatttttcggtgcatgcacgagacctcctgttttgtgtattgttacaggtatatagtcgttttctatttacacagtgccgcttagattctcttgcatttgtactttggagcatcacttgtattagctctttatttcttttccatttattattatcagaattcttgcatggaggcagtatttaagacttcctttacaatagccgaggaatttttcagctcctggatgtgattagagttgcatcttatgtgtccaagggagtgaattacttccatcagattaatattgttcatatggacttgaagactacaaactttcttatggatgattagagtcgatgttgaggctggagctcggtggggacacggacaggtctgcgaagctgacggagcggccatgcgaggtggactgtgcttactacatccacacaggctcctgcgaccgtgatcgtgctgcaccggtgagcgctcccttcatgtcgtttcatccctctgttctgtgctgctctgttttgttctgtgctaagcactcctgttgtcctggcacctaacaatgactgacgagttggattatagcttgttggtgaatgacgagtgtgttgttgcttaaagtagaagatttttagcgagtgatgattgttgttaagggcatggaagtgaaagttatgaaatattggtgagtgatgattgttgttaagggcatggaagtgaaagttatgaaatattggtgtcttttg

SEQ ID NO: 9473 - DNA, 7434 bp, Zea Mays
gccgaccgcacctccgccggaccgcctttatgccaaaaggcccctccccaccccgcgaatcattccagcgcccctaccttccgtccattccgttccagtccacctccattcccacggagaggcagccaggcagcaccagcagctcgctcgctcgctcgcgagctggtccacagcgccccggattagaccgtcgcggcggacgacgaggaagcagactcgtcctcgtccccgtccttccccgcctcccacccaccccggcggtcgacgaccaccgctcccacgcttctcggccgcgggccctaaaccctcccgatccatggaggccgccgcgcccgatggggccgcgcaggcgtccccgccccccgcggaggccgaccgcccgcccgagcctcgccccccgccgctgccagccgcggggacgcacgatccgcacttcctgagctcgatcataggggacgcggcgcccccgcccccgccgccgccgctcgggcagaagcggaagcgggggaggccgcccaagaggaaggacggcgcggccgtggccgcggggccggtggtgccggcgccggcgccggcgctcgcccgggccgcccggagaaggcaggacgaggaggaggtcgtctgcttcatctgcttcgacgggggaaacctcgtcgtctgcgataggaggggttgccccaaggtctaccatccggcgtgcatcaagcgtgacgaggcattcttccagtcccggagcaagtggaactgcggctggcacatatgcagcagctgcgaaaaggcagtgcactacatgtgctacacttgtacatactccctctgcaaagtgtgcatcaagcaagatctgaaagggaagctttcattaacattggaagaactcactactgccaagaatagatggaatgttcctagcacttctgctaggaaagaaaaagaggagtcgtctgatgacctgtatgatgctaataatgatgatgatgctggttctgactgctcctcaggaaaacgaaggcgaactaattcaaggaaaaagggtcaaaaacgccgaaaggtaaatagagattgtagcattcttgaaaaaaaggtcgagcttccacttagaaatactgagagcattccggtggaagtgccaaatgaacgggtgccatatccggtacacacaaaagtaccaaatggacgagtacccatgccagtagacacaaaagtaccaaatgaaccagtgtccttggcagcaaacacaaaatgggcatcaccagagctattggagtttataggacacatgagaaatggcgatcaatctttcatttctcaatttgatgttcagactcttctgcttgattatatcaagaagaataaccttcgtgatcctcaaaggaaaagccagattatttgtgactcgagacttcacttcttgttcaggaaagcacgagttgctcactttgagatgttaaagcttttggaaatgcattttcttacgaatgagacttcaacagtaactaatagtagccaagtgactatcaatctcaattcagctcatgtagataccaatggacacaatgacacggctgcaaaagtttcccctgataagaggaggaggatctatagaaagatggaaagagatacacaagttaatcttgaggattatgcagcaattgacatgcataacataaatttgatttacatgaggcgcagcctaatggaggatttagttgatgatgtcaaattctcagataaaattcacggtggttttgtgaggataaaaatttctgatgtttgtcaaaaacaagacatataccgtctcgtaaaagttattggaacacataaggttccagaaaagtatagtattggaaagaagatgacaaatgttgcacttgagatattgaatttaaacaaaaaggagattattacaatggatacaatatctaatcatgattttacagaggaggagtgcaaacgtttaaggcagagcatgaagtgtgatttaattagcagactaaaagtgggtgatatcctagagaaagccaagatattgcaatattggtttgaaaatgaaaagcagaggcttgggcatcttcgtgaccgtgcaagtgaaactgggcgcagaaaggaacttagagaatatgtagaaaagctgcagcttctcaacgattctgaggaaagaactcgcaggattattgaaattctggaattgcatgttgactcacatatggatcctaattatgagtctgctgaagaaacagatgagaaaggaactgttggaaagtcggtaaatcagacaagaccagatacaaccatatcacgaaggatatcgagatatcttagcactgtgcaaaaccatcctaaaaaagtttctgattctagccaccttccaaaaagcttgtccacagaaagtgcaatatgtggatcaggagcaagaagtttggagaacagcacagcaaacagaactatgtatggagctggaccactttcatcttctgtagtaacaatgacaaacgacacagagccagagaaagtctggcactacaaggatccttctgggaatgttcagggtccatttactcttttgcaactttcaaattggacaagttacttcccacgtgatctgagagtatggcttacatttgagagtgaagagagatcattgctgttgactgaagtgctttcaaaacagcagaaagattttactcaggctgcatcacatacaagtagcaaggcaacactggttggcactggacatacaaggaacaaccctagtgtggatcagaccaatgctttctcccctgttggtcatagcgtggttagttcttctggaatacctgttcagtataataagtattctgttccagaaagggaaagtgtgtactctccagatgatagcttgtcgctgtcaactagttcggttccaccaaaggatgcttatactgtgaatagccaagcacactgccagaataagcattctgttttcattcaatctcctgggagttcatatgggcacacagacttgaaccatgatggaatacagggaggatgctctggtgaatcaaaccaccatcacagcagtagagccctatggagtcctacagtggcacatgtgagttgtggacgtggtaacgtggaatctcatcagaatcagcatgtttcctggtcagaaagtcaacatgaatctaaaaatggttcacaaggaggatttgttaaagatctgaattcaaggcaggatctatcgaaaaacctacctgctcaacgtattgggaaagatgtttccagtcctttgtttgcttggagtccggccgagtcgaggacagcttcaagtcaacaggaagggtcttgcttaagttcaacaactaacccaagctttctcgatgaacttcattcttctattgcttctgcaaagcctaagagctgcgctccagcaacccccattgaagacagaggttctagttcaccatcagatatgctaagtcatgaagaaagagttccaatctgcagtccacaatcagcccctttagcatctgcttctgatatgtgcaagatggaggagatcatgaatcagcaaagaacacttgtggtggatacatcgaatgcttcagttaaccagtctcctgaatcaagggcttttcctgtatcctctcctgataaccaagatattgaccgcgagtttcctagtccagttccaagatctgagaataaggacattgctgtggacagctcagaattagcaccagcgtcacctgaaaatattactacgaatttgcctgtttcagatacatgcaagatggaggaggtagtgagtcaacaacaagtaattggggctgttgtatcgaattcttcagataaccattctcctcaatctaaagtttcccctgtatcttctaataatgaagatacgaaacataaataccccagttcaaccccaaggcccgagaataagaatcctgcggtggatagtttactttcaacgtcagctgctcctgaaaatctaacgacaacttcaacccatgattctgatacatgcaaaatggaggtagtgaatcagccaaaaacatttgaagcggatgcatcaaatgctccacttcatcaacttcctcattctcacagtttcctggtaccttctgacaatcaagatattgagtgtgaatgtccaggtccaactccaagatctgacagtgaggaagctcttatgaacaactcagcgacaactgcatcagcctctgatacaagcaaaatggaggagtttgtgaatcagcaaaaaacccttgaagcagattcatcaaatgctccacttaatcaatctcctcattctcacattttctcagtaccttctgacaagcaagatattgagcgtgaatgtccaggcccaactcaaagatctgacactaaggaacctcttatgaacaactccgtgttaacatcaggaccatctgaaattcagacgacagcctctgcagcctctgatacatgcaaaatggaggagtcagtggatcagccaaaagcgcttgaagcagatgcatcaaatgctccacttaatcatcatcctcattctcacattttccgtgtatcttctgataatcaagacaatcagtgtgaacatcctagcccaaatccaaaatctgacagtaaggaacctcttgtggacaactcagtattaacatcagtggtgcctggaatgctagcgacaacttctgcctctgataaatgcaaaatggaggagtttgcgaatcagcaaaaagcacttgaagtggatgcatcgaatgcttcatttaatcagcctcacattttcgctgtatcttccgataatcaagatatggagcgtgaacgtcctagcccaactccaaggtctgaatgcaaggaatcacttacggagaactcagtattaacatccttggcgcctgaaattctagcaagatcttctgcctctgcttctgataaatgcaaaacggaggagtttgtgaatcagcaaaaaccaattgaagcggatgcatcaaatgcttcacttaatcagcctcatgtttttgctgtaccttccgataatcaagatatagagcgtgagtgtcctagtccaactccaaggtctgaatgcaaggaatcttttatggagaactcagtattaacatcagcggtgcctgaaattgcaagatcttctgtatccgcttctgatacatgcaaaatggaggagtttgtgaatcagcaaagaccaattgaagtggatgcatcgaatgcttcacttaatcagcctcctcgttgtcacattttcactgcttcttccaataatcaagatattgagcgtgaatgtcctagctcaactccaaggtctgacagtaaggaaccttttgtggacaacttagtgttaacatcagcagtgcctggaaatctactgacaagttctgcagttgcctctgatacatgcaagatggagatcttgaataagaaaataacacttgaagcagatgcatcaaatgctccacttaatcagcctcctctctctagcgttttcgcttcatcttctggtgatgaccaagataatgtgtgtggacgtcctagtccaaatccaagacctgagggtgagcagcctctcatgggtaactcagggttaatatcaacagtgcctcgaaatctaacttctacttctgcatctgcttccgacatatgcaaaatggagatcttgaatgagaaaagaacacttgaagcaaacccatcaaatggtttgattactcaatctcctcaacccaaggttttccttgtaccatctcctgatatcctagagtgtgaattttctagtgaaacacctaggcatgagtttaaggaacctgttgcggacagctctgggttaacttcagcagcacatgaaaatttagggactaagccacatgtccactcaccagatgcctttgtaccaccaaagtctggtgctctaactggggaattaggtgacacgaaatcagattttaaaggtgaagaaactattcaaaaagagcaatattttggaagtgaatctattgccgctacaagagagaatttgttaattgatccttcctctggtgttgagtcgatagatgtgtcagatgtactggattctttaatggaagaaaggagtggaacttcgtacatgccaggatcaatagaggacttcctagccgaagaagaaccacaatactctagccctatcgcattatctccttggggtgaacctagttactaccaaggtgatgctgttgattctgcgctatggggtactcaagatttgatcaatgatatgtggtcattgctttcaccaagacctatgctccaaccttcatctggttagtcagtatgctgatgattagcatttttcacaactcttccactaattctattgttgaaccatctgtaatctctccaccaggtattggaactgaggggaaggaaacttttgatatcaacgaggtggctgtgacccatgttagtagtgattattttcaaaaaggatcaatgtttggggaggaaaatgtgaaccaggcaaacttgagtgctgctgcagactggatgctgcctgagcaggtactggtgttgcaatatttgattgtcattgtcatttatttcctgtgtacttttcacatggcaattgtggtttttcactatttcaggtcccatcaataccaaatggtatgtcaacatcgtcagtagatgagagcaccatagttttaggttctcagccatcaaccaatcagagcttagactggggtggtactacatggagtattggccagaatgccagcgtgtatagcaatgaaaaagcagagccctcgagtaaaagctattgggaagaaccaaggaagcaggaaaccgccaaatccagtgtttctatttcaggacaggccattggaaacaacaagggcttggaccctcgtgataatgctgctaatcggggcagccggctgagtcatcatcaccgtggcaggtactcccaaatcagtgaatcttggctacttagttcaagtcactctaggagtaggtctgatagatttggcagcggtgggtcatcaagatcaacttcaaaggggcaatctaggggctaatgtaaattgtcaagtgcaggagagaaatgatgcatcttgtagctaacctgcatccttgatctctgcagcaggaatagttttctttttaaaattctttgtcatatctttgcagtttgtataggctaattacagtttagtccactcagactgtagcaaggagcatatatgtttagcatagaggtatttgactgcccattgcccaaggagtagattcagctcttgggcatggtctgtatcatcctgacattctgttggatggagctccaattgtaccaccggcatctctgttgacaccgaaacgcctgatgcgttggaaacaattatatctgattgattggtttaacttcgtggaatccctattttcgaagatcacgaaacgacagag

SEQ ID NO: 9474 - DNA, 377 bp, Zea Mays
cttccacagcccaaaagattctgctttcgctcatggttaccacaacttcacccagaatcataaaaaaaaaatatccagtgtggcaactgaaccatcaggatgtctgtgccagcgttagcccaggtgcctgttggaagctggtttgggctgcatcaactgtccgcgcagaatttggaccgatatcgcagatggcgggggactggaaagaagatggttccttccgctgctcgtggtgtgcttgaatccagtagtggtacacattctggtggctttatgatgaaaagttgacgacttcaggctgttcagggagagcatggagtacaatgatatgtggtcatccaagttccacccgatcgtggagagatccctccgcctgc

SEQ ID NO: 9475 - DNA, 2413 bp, Zea Mays
atggcgcccgtaaagatgttaatccgcccagttggagcccgacagagcgggcgagtagtcgccggatcccgtgctggtgctgagcacgaccacgacccagtcgccctcgctcgcgatcccggcgccggagaactggctgtcgttgaggaaccggttgtactgcgacttggtgtagttagcgaggacgacgacggggacgaggcccagcacgcacgccggcatcacctggccgtcctcggtcaccgacgcgttgaggtggcagcggtccagggctcaacctataaaccagcaaaaagaggagctccacatcggacagcatccaggtcccaccgttcagtggacgtaagaaagacacccggatcctgcgctctccttaccctctccacttccgtttccggatcccgtttccagctccgatccaacccagcatctgtaccgcgccgcgcgagcacgtccggcgccggtgcggcaggcgaaatccgagagcactcctcccccgctacgccgcaccgcccatggccgcagctagccgcagatagagagaggcgcaggcgagggcgtgcagatccagatccggtgggcgggaaggacttgatcgcccccaccaccatggccggcgcggtgtcggcgctcttcctgctggacatgaagggccgcgttctcgtctggcgcgactaccgcggcgatgtctccgcgctccaggccgagcgcttcttcaccaagctcctcgacaaggagggcgattcggaagtgcactcgcctgtggtctacgacgacgctggcgtcacttacatgttcatccagcacaacaatgtcttcctcctcaccgccgctcgccagaactgtaacgcggccagcatcctcctcttcctccaccgtgtaatagatgtgtttaagcactacttcgaggagctggaggaagagtcgctcagagataacttcgtcgttgtgtatgagttgctcgatgagatgatggattttgggtacccacaatacacggaggcgaagatattgagtgagttcatcaagacagatgcatacaggatggaggtcacacagcgtccacccatggccgtgacaaatgctgtgtcatggaggagcgaggggatccggtacaagaagaatgaagtcttcttggatgtagtggagagtgttaacattctagttaacagcaatggccagattgtgagatcagatgtggttggggcactgaagatgcgaacatatttgagtggaatgccggagtgcaaacttggcttgaatgatagggttcttttggaggctcaaggcagagcaactaaaggcaaagcgatagacctcgatgatatcaaatttcatcagtgtgtacgtttggctagatttgagaatgatagaactatatcgttcatacctcctgatggatcttttgatctaatgacatacaggcttagcactcaggttctcttcctgatcaactgtggaatgctttatagaagatatggaatgttttcacttcattgttttcacatgcctgtctttatttgatgtccttaaggtaaaacctcttatctgggtcgaagcacagattgagaaacattctagaagccgtatagaactcatggtgaaggcaaggagtcagtttaaagaaagaagatgccacaaacccaaatataagaacttcaatggggtctgctgcatatgctcctgagagagatgcaatggtttggaaaataaaatcattccctggtggcaaggaatacatgtgcagagcagaatttagtcttcctagcataacagcggaagaaggggccccagaaaagaaggcgccgatacgggtgaaatttgagataccatatttcaccgtatcaggtattcaggtccgttatctgaagataattgaaaagagtggttatcaggcactcccctgggttagatatatcacaatggctggtgaatatgagctgagacttatatgagttctctcttctctggctgccggacgacttttgaagctgcaggacactaaagatacatatttgctatcgacacagcgaacagttttcatttggatgttggcctggaagtcttctgccgaccatacccctccccgtggtggggcttgctgttcatcttgttaggctcaccttaccctggttattgtaagttaccaatcaagtacagttttggaggaaaggatattcagttttcagttcacttgtattgttattgatttattttgtgggtaccaaactagatttgtttcgttctgtattacacggaaaacatgggctgatttgagttcaacaaaacattgccacatctggcgatgattctggggtgcgggttgaaacaaatttgcccttttttttactgtaaatgtcgtgaacaattccctttcagttccatcacgttcaaaattgctcttttctttctt

SEQ ID NO: 9476 - DNA, 1302 bp, Zea Mays
tctgttcgagcctctctgaacattaagcgtggtggagagagggatttctacatgtgctctctatcttctagggtgtggaatggatccagtttgtcccagttcggaaatcggaatggtgaacacatatgagatgagcttcccggatatgctttaatacaatcaggtattatcaagaaaataagaagaaaagaaacagatggctactttgagggcgacagtgggcatgctgctcggcgtcgaggacatgcacaggttcccggtgcgctccccgtggatggaccgcggcgacctcatccgcagtcccgccgcgcgatagatcgtgtccaactacttcaggtacccagagcacacgccgccattattggcacccctgctccgctcgttccattttgtttccactagccgtccaataatgttgccccgccatcgatggaccgagcagcatgttcgggccggtgcaggacgtgcgcatcccgtatcagcagaagcgcatgttcggcttcgtcaccttcgtgtacgctgagacggtgaaggtcatcctgagcaagggcaacccgcactttgtgtgcgacgctcgcgtgctcgtcaagccctacaaggagaagggcaaggtccccggtaggtttaggaagctgcagcacacgcaccatggcggagccgagttcgtcggttgcgcgtcgcccactggattgctggattccagggacccctacgccctcctgcttctttcaggtgcccagaatttctccaggttttctcctgggcatgaagccattgggctatgatgtgtgaggtgcacagagcaaaaaagggggagggcccccctccattcctctaatctgggagggactactaatatggctacatgatggccggtcccatcaaccgagcatagagaagctttgataaagaaaaaagaaatacctttggagaggtgtaatcttcttcagagtgggagaaggaggggacagtgaagacaacaacagagaagaaacaagtccagtttgttttttagctcttaggcctatgataagtatatgatagtaagtgagtgagtagtaggcataaataatagtagtagtagttaattagtagtcgtttattagtagctgctgccagtgtcaagaaggtgatgaaaaggcacactccagctctctcctatgctcgtttgtggcatggatggatctctcactgttgctatgatatgttgttttatttataatatcgtgtgtataaatatttcatgtttttcactttgtttgatttgcggtaccacatatataacgatttcatgtgttttcc

SEQ ID NO: 9477 - DNA, 1499 bp, Zea Mays
gtggagagagggatttctacatgtgctctctatcttctagggtgtggaatggatccagtttgtcccagttcggaaatcggaatggtgaacacatatgagatgagcttcccggatatgctttaatacaatcaggaaaggtgccatttttacccagcggcttcctcgccaccaaattaaaggttgcattttgtctccggtctcaccattcccattttattctctgcgtgttgctgtctgctccagggcgacagtgggcatgctgctcggcgtcgaggacatgcacaggttcccggtgcgctccccgtggatggaccgcggcgacctcatccgcagtcccgccgcgcgatagatcgtgtccaactacttcaggtacccagagcacacgccgccattattggcacccctgctccgctcgttccattttgtttccactagccgtccaataatgttgccccgccatcgatggaccgagcagcatgttcgggccggtgcaggacgtgcgcatcccgtatcagcagaagcgcatgttcggcttcgtcaccttcgtgtacgctgagacggtgaaggtcatcctgagcaagggcaacccgcactttgtgtgcgacgctcgcgtgctcgtcaagccctacaaggagaagggcaaggtccccggtaggtttaggaagctgcagcacacgcaccatggcggagccgagttcgtcggttgcgcgtcgcccactggattgctggattccagggacccctacgccctcctgcttctttcaggtgcccagaatttctccaggttttctcctgggcatgaagccattgggctatgatgtgtgaggtgcacagagcaaaaaagggggagggcccccctccattcctctaatctgggagtaagtgtcaacaacaaccttccttgtgcctgtctttctgatagtgctgtaaccattaataataagctagctgctgctcccatgaccatgatgcatgtatatgccagcatagatcctgaatcatgatggtcataatctgtgtgttaacgggctgttgtgcgcaggggactactaatatggctacatgatggccggtcccatcaaccgagcatagagaagctttgataaagaaaaaagaaatacctttggagaggtgtaatcttcttcagagtgggagaaggaggggacagtgaagacaacaacagagaagaaacaagtccagtttgttttttagctcttaggcctatgataagtatatgatagtaagtgagtgagtagtaggcataaataatagtagtagtagttaattagtagtcgtttattagtagctgctgccagtgtcaagaaggtgatgaaaaggcacactccagctctctcctatgctcgtttgtggcatggatggatctctcactgttgctatgatatgttgttttatttataatatcgtgtgtataaatatttcatgtttttcactttgtttgatttgcggtaccacatatataacgatttcatgtgttttcc

SEQ ID NO: 9478 - DNA, 1648 bp, Zea Mays
gcggcggaggaatctgcaccgccgaggagggagccgccattgccgtagatctccaggagcttcttgagggttagagacgggaggatgacagttagagtagtgatgaggtaccttgttaacaagctgggccttgaggacgattcacaggttaatgatactattgagatgcttgagagaatggctcaccgtggtgcctgcggctgcgagaagaatacaggagatggtgccggcatcatggtcgctctaccacatgacttcttcaaagaggtcgcaaaggatgctgggattgagctacccccactaggcgagtatgctgttgcaatgttttttatgccaacagatgaaaagcgtcgtaagaaaggcaaagctgagtttaagaaggttgcagaatcactgggacatgtaatactcgggtggcgtctggttccgactgacaactcagacttgggtgaatctgcactcgagactgagccagtcattgagcagcgtaggaggcttacctgctctataagcttcattgtattgttctacaaaggctttaatacaatcaggaaaggtgccatttttacccagcggcttcctcgccaccaaattaaaggttgcattttgtctccggtctcaccattcccattttattctctgcgtgttgctgtctgctccagggcgacagtgggcatgctgctcggcgtcgaggacatgcacaggttcccggtgcgctccccgtggatggaccgcggcgacctcatccgcagtcccgccgcgcgatagatcgtgtccaactacttcagcatgttcgggccggtgcaggacgtgcgcatcccgtatcagcagaagcgcatgttcggcttcgtcaccttcgtgtacgctgagacggtgaaggtcatcctgagcaagggcaacccgcactttgtgtgcgacgctcgcgtgctcgtcaagccctacaaggagaagggcaaggtccccggtaggtttaggaagctgcagcacacgcaccatggcggagccgagttcgtcggttgcgcgtcgcccactggattgctggattccagggacccctacgccctcctgcttctttcaggtgcccagaatttctccaggttttctcctgggcatgaagccattgggctatgatgtgtgaggtgcacagagcaaaaaagggggagggcccccctccattcctctaatctgggagggactactaatatggctacatgatggccggtcccatcaaccgagcatagagaagctttgataaagaaaaaagaaatacctttggagaggtgtaatcttcttcagagtgggagaaggaggggacagtgaagacaacaacagagaagaaacaagtccagtttgttttttagctcttaggcctatgataagtatatgatagtaagtgagtgagtagtaggcataaataatagtagtagtagttaattagtagtcgtttattagtagctgctgccagtgtcaagaaggtgatgaaaaggcacactccagctctctcctatgctcgtttgtggcatggatggatctctcactgttgctatgatatgttgttttatttataatatcgtgtgtataaatatttcatgtttttcactttgtttgatttgcggtaccacatatataacgatttcatgtgttttcc

SEQ ID NO: 9479 - DNA, 1534 bp, Zea Mays
atgatattatggttaaattcaaagttctgctcaggtatcccaacaataatgtacctgccatcgttgcttcatatctgaatgtggatccagctacaggcgattattatcctacagtattcttcaacgagttttggcttttgagggataaattaatagcgctcaatgagtctgtgaaggaattgcccttaaaccttgaagttggtcctattagcatgaccaagtggcagttttttttacagattgagcagtccttccaggttcatcgtagttatggaagtatgcttgaaggcgaggctgatgaactcaagagggttttccttgaaggaaatccttatcttcttggattgactatgattgtttctctattacactctctgtttgatttcctggccttcaaaaatgatattcagttctggaacaagaacaagtccatggaaggtctatcggcaaaatctgtggttctgaattttgtgtgtcaactaattgttttcctgtaccttcttgacaatgacacttcatggatgatccttgctagctctggaattggtgtttgcattgagttttggaagatcggaaaagcgatgcatattgaagtcgatagaagtggaaaaattcccatgttgaggttccgagatcgtgaatcatatgcacagaataagaccaaagagtacgatgctattgcaatgaagtacctcacctatgtcctcttcctccttgtgatcggtttctctatctattcactaaagtatgaaaagcacaagagctggtactcatggatactttcttctatgacaagttgtgtgtacatgtttggtttcatcatgatgtgcccccaattatttatcaactacaagctgaagtctgttgctcatatgccatggagacaaatgacctacaagttcctcaacactataattgatgacctttttgcattcgtcattaaaatgccaatgcttcatcgtctctcggttttcagagatgatgttatcttcttgatatacgtctaccagaggtggaaatatccggtcgacaagaagcgtgtcaacgagtttggcttcggaggcgaggaggaacccgcagcccaggagactttggaaggaagtgatccagcagctgcagcagcagcagccgagccaacggaggacaagaaaaccaagtgatctccaatcgttcgatcatccaaatgtagcacgccactcagcagcacctgccctcccacagcgggtgtgaaatttttcgctgaactggatgctggactcttgcggtcttgccttactgagatactgacgataagataagttgtgtgtgtaacaggggatacaatagtgtttctagggcagcgggcgaacaggcacactatcgcaattacgtttctagtttgtcttttagcagccattactaggcgatatgcttgtttatattgcttttttgtacaattttgtgcatcatttttcaaaatacataacggcgattcttagcttcctaataatgttgcaacgaatgcccataaatgagtgcataatttagcggggta

SEQ ID NO: 9480 - DNA, 1560 bp, Zea Mays
tccacttacaaccctcatccatttttatataaaaactgtgcatcatatgggaatcacaaggtatcccaacaataatgtacctgccatcgttgcttcatatctgaatgtggatccagctacaggcgattattatcctacagtattcttcaacgagttttggcttttgagggataaattaatagcgctcaatgagtctgtgaaggaattgcccttaaaccttgaagttggtcctattagcatgaccaagtggcagttttttttacagattgagcagtccttccaggttcatcgtagttatggaagtatgcttgaaggcgaggctgatgaactcaagagggttttccttgaaggaaatccttatcttcttggattgactatgattgtttctctattacactctctgtttgatttcctggccttcaaaaatgatattcagttctggaacaagaacaagtccatggaaggtctatcggcaaaatctgtggttctgaattttgtgtgtcaactaattgttttcctgtaccttcttgacaatgacacttcatggatgatccttgctagctctggaattggtgtttgcattgagttttggaagatcggaaaagcgatgcatattgaagtcgatagaagtggaaaaattcccatgttgaggttccgagatcgtgaatcatatgcacagaataagaccaaagagtacgatgctattgcaatgaagtacctcacctatgtcctcttcctccttgtgatcggtttctctatctattcactaaagtatgaaaagcacaagagctggtactcatggatactttcttctatgacaagttgtgtgtacatgtttggtttcatcatgatgtgcccccaattatttatcaactacaagctgaagtctgttgctcatatgccatggagacaaatgacctacaagttcctcaacactataattgatgacctttttgcattcgtcattaaaatgccaatgcttcatcgtctctcggttttcagagatgatgttatcttcttgatatacgtctaccagaggtggaaatatccggtcgacaagaagcgtgtcaacgagtttggcttcggaggcgaggaggaacccgcagcccaggagactttggaaggaagtgatccagcagctgcagcagcagcagccgagccaacggaggacaagaaaaccaagtgatctccaatcgttcgatcatccaaatgtagcacgccactcagcagcacctgccctcccacagcgggtgtgaaatttttcgctgaactggatgctggactcttgcggtcttgccttactgagatactgacgataagataagttgtgtgtgtaacaggggatacaatagtgtttctagggcagcgggcgaacaggcacactatcgcaattacgtttctagtttgtcttttagcagccattactaggcgatatgcttgtttatattgcttttttgtacaattttgtgcatcatttttcaaaatacataacggcgattcttagcttcctaataatgttgcaacgaatgcccataaatgagtgcataatttagcggggta

SEQ ID NO: 9481 - DNA, 2230 bp, Zea Mays
taaaaggcaaacaaaggaaaagggcttagcctcacgagacaaaagacgcccgccccggccggcgaccagtacctcgccattgctagtgctagccgccgtcgctggtgtcccctcctcccacttgcgccgcctgtccccgcgccctcgaaaccttttctcccaaaacagatttcgtcccggcgctctcctgcaaagggcggctagctgtcgccggtggatacgtttcaccttgcttgggttctgcttcttcctgcttttccaagagagggccagcagcagacgaagcgagcaaagcgcgcaggaaccgctcggtctggtgattttaaggggcgaggtcgtgttcttgggaggcggagagacacgagctctctcttcctgtcctctttcccgcggcttctctcttgtcttgctccaagagggcaaaactcgtcggggtagggaaatggcggaggtgaagccggaggagataagccatccgcccatggagcagctccaggggttcgagtactgcatcgactccaaccctccctggggcgaggcgatcatactgggcttccagcactacatactggcgctgggcacggcggtgatgatcccgacagtgttggttcccatgatgggcggcgacgatggggacagggtcagggtggtgcagacgctgctgttcgtgacggggataaacacgctgctgcagtccctcttcgggacccggctgccgacggtcatcggcggctcctacgcgttcgtcatcccgataatggccatcatccaggacccgtcgctttctgggatacccgacggtcatgagaggttcctcgagaccatgaaggccatacagggggcactgatagtgtcctccagcattcagatcattctgggctacagccagctgtggggtattttctccagattcttcagcccagtggggatgactccagtggttgcgctgctcggatttggcctcttcgaaagaggtttccctgtggttgggagatgcgttgagattggcctgccaatgctgatcctctttgtcgtgctgtctcagtatctgaagaacatacagataaaagaaatccccatactggaaaggttctcccttttcatctgtgtcgcgttggtatgggcgtacgctcagatcctcacttcaggtggagcctataagaacagcgccgaggtcacccagaacaactgccgcaccgacagagccaatctcatctcttctgccccatggattaagatcccctacccactgcaatggggtgcgccgaccttcaacgccggccagtcatttgggattgtgtctgctgttttggtctcgctggtagagcctcctacaaagccgctgctcgtcttgcgagtgcgactccacctccggctcacatcctcagcagaggcattgggtggcagggaatcggcatcctccttgacgggctctttggaacggggactggctccactgtctcagtggagaacgtcgggttgcttgggtcgacaaggatcgggagccgacgggtcatacagatctcagctggcttcatgatctttttctccatgctggggaaatttggagccttgttcgcttccatcccgttcaccatctttgcggccgtgtactgcgtcctgttcgggctagttgctgcggtggggctgtccttcctacagttcactaacatgaactccatgcgcaacctctttatcgtcggcgtctccatcttccttggcctgtccgtcccggaatactttttccgctacaccatggctgctcatcgtggtcctgcgcacacgaaagctggatggttcaacgactacatcaacaccatcttctcgtcgccgccgaccgtggggctgatggtggccgtgttcctggacaacacgctggaggtgaagcaagccggcatggaccgggggatgccgtggtggcagcggttccggacgttcaagggcgacagcaggaacgaggagttctaccgcctgccattcaacctcaaccgcttcttccctccggcctaaaagtcaagtcactcagactcagattgctgagcagaggcatagtgtagcttatttattgttccattcgttcatctctacttgttcgtgttgtagattattttggggaggttcagtaagtatacttactgcccaatccactaaatgtggtcgcctaccgttttttatatatttttttacatgctccgtccaaaataagtacacttttcaatttggggagtcg

SEQ ID NO: 9482 - DNA, 4565 bp, Zea Mays
caaattcaaaacctcaacgcccccacccaagctcgtggccccaccgcgcttagctcccagcagttcgagcctggagcatcctccacggctccgccgggtttctccttcgcgccgccgctaggcctcttctctcttgcgctggtacctggtagccacgtgcttgaggaaggctgcttgaggcagaggaagaggcggcagtgagggagacaaggagcgcggtgaccctggattcaccggatgcagcggcctcgaattcgagcagcgcgcatcactcacgacggagaagacgaagacgcggggtcgctttccacgattgccaaacgggccgctgttacggaggaggattaggagcacacgcggacacgccctcggctccctacccgaggaactgccactctctccgccgcgtccccagttcaattccccccaggctcccgaaaggcagggcaacccaaacggcatcggccgcccgacagaacgcggccggagcagttcgtcgcgccgcgcggcctatcaaaagttttcggacggagacgagactgggttctgaacccgacccgccgcagatagcctggccgcagtgatctctagcggggatcgagctgtgccggatggatcgagtggggctccaggcgttctgcaagcggcacggcctctctgccaggggctccaacgccgatctcattgcccgtcttgacgccgcgctcgggagggctgctggtgcggaggaggcggcggctggagtggcagcgaggaaggcttgtgtgaggcaaactggcggcgatgctgacgagacgaagaaggttacttttgtagaggtgggcggagatgtccctgtgaagctgtctaggaggaattcgctgggcgcacatgtccctgtgaggcggtccaggaggaattcgctgggcgcagatgtccttgtgaggcagtccagcagaaactcgctatgtgctgaggctcaagactgtgaactgaggtcccaggtcacctgttcgcctgttgttgccaagacaagggggaagtctgctcaagccggttctgtagaggtgggcgcagttgtccctttgaggcgttccaggagaaattcactgagagctgccgagtctgaagaagtagaagtggctgtttttgttgacaggaagcgcaagtgcaagaaccaggagaatgataagggtgttgttctcagcgctcaggttggagcttcgtccagagttacaagaagatcaagcttggcggtggctgctgctgtgttgcctcctcttgttgaaccgaagagagggaggggagaagcagctggcgttcagacttctactcaggtggaagtaccggctaggattacaagatctcgctcaatagcaccggttgtaatgtcacctactgtggttgagaacaagaggaggaagaatggagatgcacaaacaaatgtagagctgcctacggtttcagatgtgcctagaaatgatgctcctgtcaccaggtctttgagaaatagagttgtccaggttaacaacagtgtggtggacgcgaacaaaccggcaactaaagaacctgttaggggattgagacgaagatctgttgtctcagaattgcacgagaaagagaaagatgtggagaaacaattaattgtgaagcaacctgttaggcgctcatcacgtaaatctgttctacctgatatgcttgagaacaatatccaaagcggtaaatctcaagataatgagaaggaacagaaactaaaggaaccaattaggcgatcaaggagatctgttgccacagtgttgcttgaggaacaaaacagtggtcttcatgaggaaaaattgtcaaaacttactatgaggagatcaacacgtaaatctgttgcacttaatggtgttgaaaagacgagcatggatcacactgaaatagttgtgcagtccgaaactttaaagggaaggtcttcaaagaggagacggacaattgatccagtagaaatgatgcctgtcaaggaggcaaatgatgacatgattatcagggaagcaacaatagacacacacaaagctactcatgagtacaataagtctactagcagaattcaagaaagttgtcaggttaatgccacaagagaagagttctcttcaggtccattgcttgtaacagtaacaccgactaatgagatttacaccgtgcagagtatacatgaagtggtacctgggtcagaatctggtgacaatgcaaaggaaaatttagataagagtaaacagcctcaggaacatcatgacattcaagctgttgatagccatttatctgaaacaagaagtggggaattagatcaatcatcatgcattgcaggactagtaccacacaattgtgttgcctcagatgacaaagctttgatcagtggagatcgtgtagagcaaagccctgtatctggagaagggagagttggcttggaagcaaatgccattgagtctggagaaaagaacctaactggcatcatgtccactgctctctacaccaaaagtctgcaacatgatattgacatagtagctgaagagactgccaaaggaaagcatacatgaatctgtggaatatggtgcacctgcttctgcaacaactcatactgaaaatggatttggtgaatcaaaaggttgccatgtcaagtctgcactcgaaaatactcatgtgtcagaacctttttcccaccatgatactgaagaaaatatttccaaaattggtggttgcatgcatacatcccagcaagataatggaatggaagatgctatcgagaatcctttaattagtttatcaactcctggttgcaagcatgaaggtgctttgtctgaggaagcagtgcacacaatgaaggattatgctggaacatgctcatcaaatcccagggtacccatgcagttgcatgacgaccttgcattcccaggtcctgaaaaatcaggagatgaatcagtcaatattgaggttaaagtacaccatggttctaatctgtctcagttaggatcaactgatctcttggatgatactgaattgcttcaccagggccataactataaagatcgatccaatgaggatatgctagagcaggctgcttctgaaccctgcacaaatggggatgatatcgtggaggctgcggctgctaccaaatgcttagaaagtggagcgatgctggttccatccgaagagagatcaaatttgaacgataggcagcttacccccaagctggaaagcccagacatcatggaatctggccttaactgtgataaagatgctcgcaatactttggacaatggatctgttgtggctgttgctggtaagagaactccatctggttctggtcactatgaacacaatgtctaccaagtttcaggcatttgtgctacgtctgaagctgcaccagtcggagtggtagaaactggaatagctgtggaaacgtcatccctggtagatgaccaacctaatcctgtgctggatggtgatgaagttgagaagcacagcttaaactgtgaggcagacactggtcggattcttggtactggatctgttacgagcaacacaacccttgtgcccaaggacggtcacaccatttgttgccaggaactggagctaccaaatggcttatcctcgtttctatttcccgaagaatctggaatttgtcagtatgcgagtgtctcaggatcagggccttgcctgcagcacgtaaatgaaagcaccagtacgcaagcgacttacaatattgaaacgctcaatcagcagcatcacgaggagtacgaccaaaccgctcgtggtatcctggctagcagttttcctgaagctgtagggattgaacagtcaggtctggcccctgctgcagaagcaccagtgttggcagtgccagatgggcagcctaacagcaagctggagggcaacgaagtggatgagcacagctgtagctatgatgccgagttcctgaacagagaagcgtctaaccttcacaaagatctgtttagtgaagatagtcatcgaagtcatctaccttctctgagatctcctcaacgatctgcctattttcacaacggaaatgattcgggttcagtaggagtctgtcaaagcagcaggcgaggaggtgtagacggactccgcgctaagcggcagagtttcaaagtttccagcagcataaaaggaagctacgtcgccaagactagcgtccctcgtccgaagccaggggacagcctgagccagtctgcgatagcgctgcgcggggtcaggaagaacacgaccgctgttgaagttggtggccatcctgtgagtttgaagccaaacgctgttcgctcggtcgccaaggacccatcatccagcagaggaccacccagggatagcctgagccagtctgcgatagcgctgcctaaacacagaaaggacgccactgctgttaagagcaagactaataataaaccttggctataataaggcagcaggcttacatacatcactactccgatttcatactccactgtacaaacattgtaatttgatggttgtgtggttccggatttattttcagcacggaaagaaggaaaaaaaagaaggaaatcagaaaa

SEQ ID NO: 9483 - DNA, 5369 bp, Zea Mays
cggggaactcccaaattcaaaacctcaacgcccccacccaagctcgtggccccaccgcgcttagctcccagcagttcgagcctggagcatcctccacggctccgccgggtttctccttcgcgccgccgctaggcctcttctctcttgcgctggtacctggtagccacgtgcttgaggaaggctgcttgaggcagaggaagaggcggcagtgagggagacaaggagcgcggtgaccctggattcaccggatgcagcggcctcgaattcgagcagcgcgcatcactcacgacggagaagacgaagacgcggggtcgctttccacgattgccaaacgggccgctgttacggaggaggattaggagcacacgcggacacgccctcggctccctacccgaggaactgccactctctccgccgcgtccccagttcaattccccccaggctcccgaaaggcagggcaacccaaacggcatcggccgcccgacagaacgcggccggagcagttcgtcgcgccgcgcggcctatcaaaagttttcggacggagacgagactgggttctgaacccgacccgccgcagatagcctggccgcagtgatctctagcggggatcgagctgtgccggatggatcgagtggggctccaggcgttctgcaagcggcacggcctctctgccaggggctccaacgccgatctcattgcccgtcttgacgccgcgctcgggagggctgctggtgcggaggaggcggcggctggagtggcagcgaggaaggcttgtgtgaggcaaactggcggcgatgctgacgagacgaagaaggttacttttgtagaggtgggcggagatgtccctgtgaagctgtctaggaggaattcgctgggcgcacatgtccctgtgaggcggtccaggaggaattcgctgggcgcagatgtccttgtgaggcagtccagcagaaactcgctatgtgctgaggctcaagactgtgaactgaggtcccaggtcacctgttcgcctgttgttgccaagacaagggggaagtctgctcaagccggttctgtagaggtgggcgcagttgtccctttgaggcgttccaggagaaattcactgagagctgccgagtctgaagaagtagaagtggctgtttttgttgacaggaagcgcaagtgcaagaaccaggagaatgataagggtgttgttctcagcgctcaggttggagcttcgtccagagttacaagaagatcaagcttggcggtggctgctgctgtgttgcctcctcttgttgaaccgaagagagggaggggagaagcagctggcgttcagacttctactcaggtggaagtaccggctaggattacaagatctcgctcaatagcaccggttgtaatgtcacctactgtggttgagaacaagaggaggaagaatggagatgcacaaacaaatgtagagctgcctacggtttcagatgtgcctagaaatgatgctcctgtcaccaggtctttgagaaatagagttgtccaggttaacaacagtgtggtggacgcgaacaaaccggcaactaaagaacctgttaggggattgagacgaagatctgttgtctcagaattgcacgagaaagagaaagatgtggagaaacaattaattgtgaagcaacctgttaggcgctcatcacgtaaatctgttctacctgatatgcttgagaacaatatccaaagcggtaaatctcaagataatgagaaggaacagaaactaaaggaaccaattaggcgatcaaggagatctgttgccacagtgttgcttgaggaacaaaacagtggtcttcatgaggaaaaattgtcaaaacttactatgaggagatcaacacgtaaatctgttgcacttaatggtgttgaaaagacgagcatggatcacactgaaatagttgtgcagtccgaaactttaaagggaaggtcttcaaagaggagacggacaattgatccagtagaaatgatgcctgtcaaggaggcaaatgatgacatgattatcagggaagcaacaatagacacacacaaagctactcatgagtacaataagtctactagcagaattcaagaaagttgtcaggttaatgccacaagagaagagttctcttcaggtccattgcttgtaacagtaacaccgactaatgagatttacaccgtgcagagtatacatgaagtggtacctgggtcagaatctggtgacaatgcaaaggaaaatttagataagagtaaacagcctcaggaacatcatgacattcaagctgttgatagccatttatctgaaacaagaagtggggaattagatcaatcatcatgcattgcaggactagtaccacacaattgtgttgcctcagatgacaaagctttgatcagtggagatcgtgtagagcaaagccctgtatctggagaagggagagttggcttggaagcaaatgccattgagtctggagaaaagaacctaactggcatcatgtccactgctctctacaccaaaagtctgcaacatgatattgacatagtagctgaagagactgccaaaggtacaacctctgtttttaaggcgtcgcctaggcgtccgggcggtggtctaacgcctaggcgccttacccgcctacctcgcctaggcgccgcctaggcgtccaggcggtcctccaacgccttggaccgccttaccgctttaaaaaccatgggtacaaccgaatttatcctgtatccataactacatactgatttggaagataatgtctgttaaacatccaaataacgagttcatctgagccaatggtttagtacttccattttcaattttattggaaggtaaaaaacttccatataatttcttcagtgtgatttctaaagttttatacttaactgattttgatgcatgaatttctaaagtggatagtgagtttagttacagttttactattgggtttaagtgttatttgagaataacacatcaatgtgtctcaggtgacctcgaaaaaccttcactatgttcattagcacaaaagtgtaaacatcaatgtggtttgcttgaggaaatagtattgccctcaaggaacatgggatctttaccaaatgcagaagaatcaccatttggcctagagtctttgttctggcaggaaagcatacatgaatctgtggaatatggtgcacctgcttctgcaacaactcatactgaaaatggatttggtgaatcaaaaggttgccatgtcaagtctgcactcgaaaatactcatgtgtcagaacctttttcccaccatgatactgaagaaaatatttccaaaattggtggttgcatgcatacatcccagcaagataatggaatggaaggtatagacatttcattttttcccctcttctatagttttttttcttgatttccatgcattcttgcaaacccgtatcctgccatttaaatggtacccataagaactgttccttttttttaggattaccagaagctaaccttgatgaagaatgggttctgttagtattatttacaaacacttaaataacctactttatactattgcttttgaattaatgtttatttattcaaatgatgtgccagatgctatcgagaatcctttaattagtttatcaactcctggttgcaagcatgaaggtgctttgtctgaggaagcagtgcacacaatgaaggattatgctggaacatgctcatcaaatcccagggtacccatgcagttgcatgacgaccttgcattcccaggtcctgaaaaatcaggagatgaatcagtcaatattgaggttaaagtacaccatggttctaatctgtctcagttaggatcaactgatctcttggatgatactgaattgcttcaccagggccataactataaagatcgatccaatgaggatatgctagagcaggctgcttctgaaccctgcacaaatggggatgatatcgtggaggctgcggctgctaccaaatgcttagaaagtggagcgatgctggttccatccgaagagagatcaaatttgaacgataggcagcttacccccaagctggaaagcccagacatcatggaatctggccttaactgtgataaagatgctcgcaatactttggacaatggatctgttgtggctgttgctggtaagagaactccatctggttctggtcactatgaacacaatgtctaccaagtttcaggcatttgtgctacgtctgaagctgcaccagtcggagtggtagaaactggaatagctgtggaaacgtcatccctggtagatgaccaacctaatcctgtgctggatggtgatgaagttgagaagcacagcttaaactgtgaggcagacactggtcggattcttggtactggatctgttacgagcaacacaacccttgtgcccaaggacggtcacaccatttgttgccaggaactggagctaccaaatggcttatcctcgtttctatttcccgaagaatctggaatttgtcagtatgcgagtgtctcaggatcagggccttgcctgcagcacgtaaatgaaagcaccagtacgcaagcgacttacaatattgaaacgctcaatcagcagcatcacgaggagtacgaccaaaccgctcgtggtatcctggctagcagttttcctgaagctgtagggattgaacagtcaggtctggcccctgctgcagaagcaccagtgttggcagtgccagatgggcagcctaacagcaagctggagggcaacgaagtggatgagcacagctgtagctatgatgccgagttcctgaacagagaagcgtctaaccttcacaaagatctgtttagtgaagatagtcatcgaagtcatctaccttctctgagatctcctcaacgatctgcctattttcacaacggaaatgattcgggttcagtagacggactccgcgctaagcggcagagtttcaaagtttccagcagcataaaaggaagctacgtcgccaagactagcgtccctcgtccgaagccaggggacagcctgagccagtctgcgatagcgctgcgcggggtcaggaagaacacgaccgctgttgaagttggtggccatcctgtgagtttgaagccaaacgctgttcgctcggtcgccaaggacccatcatccagcagaggaccacccagggatagcctgagccagtctgcgatagcgctgcctaaacacagaaaggacgccactgctgttaagagcaagactaataataaaccttggctataataaggcagcaggcttacatacatcactactccgatttcatactccactgtacaaacattgtaatttgatggttgtgtggttccggatttattttcagcacggaaagaaggaaaaaaaagaaggaaatcagaaaa

SEQ ID NO: 9484 - DNA, 2677 bp, Zea Mays
gttcatttattcctttaaggatgctttgaccagtctagtatcttctgtcctgctttgaccagtcttgtatcttctctcctgatttatgccccaagagacctttaaattccacaatagcttctattgaggccactcatagttagagccatcgataaaaaaaactccaaagctcaagttgttcggtcaccaagttcgacctgccgccgcccttaccggagatcccaccgcacaacaacaattctaaaatattcttgtgtgctttggacaactcacgaaatcaaagttatctggttactatggtgcacgaggggcagctgaagaacactgaaccggatatcggcgtcaacatgggagatgatgagttaatctatctgccagacatagaagaatatgatatggatgctctcatgggagacgaggaccagttgaacactgatcaggctattttttgtgaggaacacaacctcgacaaggtgtcatcgtccaagcgtcccaaacgcttcaccgtgcagcagcttcagcaacttgaatcttcgttccaaaagtgtagccatccagatgatgaaatgcgccaggaactggctgccaaggttggtataagtgcaaggcaggttaagttttggtttcaaaaccgacgctctcagattaaggtgaggtcctgtggaactgagaacaacaaatatcggcgacaaaacgctgagctgctcgcaacgaacatggaactcaaggagcaactgaaaggaatgacatgcagtagatgcgatgccccaacaataatgcagaaatggcagttgatggatgaaaatgctaagcttagggaaatgtactcgctcgccagtgcagaactgaccaagctcatgcaggaagcaaatctccctccctctgtgatactagaggatatggcattagttacttccatgaacccattgtccagcaatgctagcagcagtcgtagcaccatcaaccaggatgagcttctctcatatgttgagtgtgctatcaaagagtttgagatgctagtaagggatggtacgccgttgtggctgccgaccatcggtggcgacgtgctcaacagtaaggagtatgcctgccagagattcccaagattacatgggacgatccgcccagaagggtttgttgtggaggccacaagggacactgccatagtcaagggatcagccccagacattgttgacatcctcactgatgtgccacgatggtacaaggcgttcccttgcattgtagcagcactaagggcctaccacgtcatctttagtggaccttttgcatctggcaacgtgctaattcaggagctcctgcagataaatgtagatctatctgtggaatcacctcgcccgcctcttcgcaacatgaaatttctaaggattaccaagcagaatgcaaatggggactttgttgtagtggatgtgtcaatcaatgatgtccaaggaattcatgaacaacaaggcagccaacataagcataccatgctaccctctggttgcctcattaaagacaagggcgatggctattgtcaggtcacatggattgtccatgcagagtacgaggaggcctccgtgccacccctcttccgacagttctaccagtctgggctggcattcggtgcaagccgttggcttgcatcactccaaaggcactgtgaatacatggttgttaagcattccatccaagttccaactggttgtgtctctggctcaggggtgctcaccttgtctgctctgggtagatggaacctcctagagctggcacagcggatgatggcgatcttctacaagactacatctgggctgcccaccgtggaaccaggcaacattgtcaccaggtggggtcgtggctgcatgggcactacaggcgagatgcttgagccagctgtgcgcatggtactagggaattactttggcgccatggatgggcagccatcgcccctccaagtgctaagcgccaccacaactgtgtggctgccaggaacgcctccggagagtgtttttaactacctgtgcaatgggcaacgccgtggcgagtgggatgccttcgtctgtgccggcgcagtgcaggagttgagctcagttgccacgtgcccccaccttcatggcaatgctgtttctgttctctgccctaatgtgaccaatgcagctaacaacgccatgctgttcctgcaacagacaagcatcgatgtctcgcgcgcgctagttgtgtacagcgttgttgaagagaccatgcttcgttccgtcctggatgttagcgacgacacttcaaacttagtcctcctgccatctggattcgccatcctcccagatggccatggcagggctcaccatgccgctgcttccaactcctccagcgctcttgccggactcaacggaactgcaggatgtcttctcaccgcagcctaccaggtaccggtgccattcaacaatctccgtcatccagatgtgcaagagacctacgagaatgctggaaagcggatctgccatgcgataaagaagatcatggatgctgttggggcacctattgttgtcccaatctaatgcgggtttatttgttacataaacatggcggtgataccatttgggtcaaggttggagcaaactttttactcttatttccgcagcagctttgtttctgaaagacgactccatgacttctgttatccaat

SEQ ID NO: 9485 - DNA, 806 bp, Zea Mays
ttaaaccttgtactattgaaaatgctcttaatctcattgaaaaatcgaggatcgaatccactgccatctctatccatatccgtagcgtgacgcgtccggaacacgtgttacgacggcgtagcttcagtgtagaagcctagaagggtaaaatgtcctccctttccctttccaatccccacgccgccacaacaatatcgcattgacatatcgttcatcggatccagtcctctcccgggatctcctccggctataaatttccggccccaattcacccaatccagatgcgcaaacatcgaatcgtctcgctagtggctgccctactcgtgctgcttgccctcgccgccgtttcctccacgcgcagcgcacaaaaggagtccgcggctgacaacgccgggatgttggcaggcggcatcaaggacgtgccggcgaacgagaacgacctccagctccaggagctcgcgcgcttcgccgtcaatgagcacaaccaaaaggccgatctgtcgtctccctgtgcaatttgctgcctgaagcgcaaaactaagttgcagaataaggagctgcttcggaacatgccagagcatgcaccctcgcgtattttcataaaatcagtgctcttaatgtaatatcttgaattgccgtgccatgtgtaataagtaatatcatgaataacagttgctattatgggttctaaatgtgtattaacagccatccatggcagagttctcatattactttgctgaagtctttgttggaatatacatgacagaattctcacattgccttgctgaagtctttgttggaatttt

SEQ ID NO: 9486 - DNA, 2248 bp, Zea Mays
tcttgcctacttatgagttttgagtcatctgtgtactttttagacaaccacaccagtcttgctttaataccctcacacaccaccattgtccgtccccaacctctgtctccacagcgatccgataccatgtccatgcttctacagttcctctttctcagcctcatcctactcgcagcgtccactacgggtggtgatggccagcagttcgcctactccggcttctccactaacgatctcgtcgtcgacggagctacaaccatcacatcaaacggcctcctcgagctcaccaacggaacggaccagcagacaggccacgccttctacccaaccccggtgcagttcacgaggtcgcccaacggaacggaacttcccgggcgccttgcctgggcagttcctcggcctcaccgacatccggaacgacggcaacgcgagcaaccacttcttcaccgtcgagctggacaccatcgagaacaaggagttcggcgacatcaacgccaaccacgccggcgccaacgtcaacggcctcagatccctcaactccagctccgctggctactacgctgacggggacgtcaacggcggcgagttccacttccacaacctgagcctgatcagccgtgaggctatgcaggtgtggatggactacgatgccacggcttcaagcatcacggtcaccatggctccgtcgaaggctgcgcggcctgcacggccgctgttcacagccacccacaacctcacaagcgtcgtcaccgacgctgcatacgttggcttctcctcggcgaccggcacgatcaacacgaggcattacgtgctcggctggagcttcgccatgaacggtccagctcccgccattgatgtttccaggctacccaagctcccacgcatgggcccgaagcctctatccaaggcactggagatcgttctgccgatagcaacggccgcgttcgtcctcgccgtgggcagcgccgcgttcctgctcgtccggaggcatctgaagtacgctgagctgcgggaagactgggagctcgagttcgggccgcaccgcttctcctacagggacctgttggatgcaacggaagggttcaaggacgagctcctgctcggcgtcggagggttcgggcgggtgtacaaggggacccttcccgtgtcgaaactggaggtggcggtgaaacgagtgtcccatgactcgaggcagggcatgaaggagttcatcgcggaggtcgtcagcatcgggcgcatccagcatcgcaacctcgtgcgtgttcttggctactgccggagaaggggcgagctgttcttggtgtacgagtacatgccgagcggaagtgtcgacaagtacttgtacggcaataatgaagggacgacgaggcccgtcctgagttgggagcacaggtggcgcgtcgtcaagggcatcgcgtcttgcttgctctacctccacgaggagtgggagcaggtggtcgtccaccgggatatcaagccgagcaatgtccttctggacagcgacatgaacgggcgactcggcgacttcggccttgccaggctgtacgaccacgacgctgacccacaaaccacgcacgtggtcggaaccatagggtaccttgctccggagctagggcacacgagcaaggcgacgcctcagacggacgtgttctctttcggcatgtttgttctcgagattacatgtggcaggaggcctgtcgtcgtcgtcgtcgtcggtgacgacgaaagctcacaggaggaaagccagtgcatgctggtggattgggtccttgagcgttgggcaagcagtggagcactgctggaaactgtggatgccaggcttggaggggactacaacgctgcggaggcttgtttggcactaaaactagggctgctatgctctcaccccttctccaagtcgaggcctaccgcacggcaggtcatgcagtaccttgacggtgaggtgccgctaccggagatggcgccaacggatatgagccttcacatgatggcgataatgcagaatgaaggattcgatgactacgtcgtcacgggatccacagcaagcattggtacaacatctgttgtttctggtggaagatgaggtatatactgctatatatgcatgtagacgtagcctgtagcatacgttttgggcgttccatcaccggagtatatgtaaggtttaccatcctaataaatatatgtgactttgtaataagttgtaacactagcaacactaccggaattcgactctttaccaaatgtc

SEQ ID NO: 9487 - DNA, 2842 bp, Zea Mays
aaaaaaagaacagaacgttcaatgtctatgaggattcaaagaacatgatgatgacagaggaagatgaaagaggcaaagaaattgaaaagattcatgttgatggtactaacaagtttgtcactgaagacaacatattctcagaagatgaaattaccaatttttagcatcatatattggagataattggaagtactcagatggctggaagccgttttactcaaaatggatcaagcagtactcagatatacgcacaaatgacgctgccatatgtttcaaaccagggtggatacatggatctgatgatggaacagatacgtaactcgcaaggagaatcagtgagtgaactaggcaatgaaatgcaaagtgccctatgcacacaaaatgaaaccatgaacaaaaacctactagtggccccatgtgagacatacacacaaatgattcttgaggaggactcaatgcttgcaaatgcagacatatccaaggttggatacatggatctgatgatggaacaaatatataactcgcaaggagaatcagtgagtgaagtaggcaatgaaatgcaaagtggcctatgcacacaaaatgaaacaatgaacaacaacctactaggagaaccatgtgagacatacacacagatgattcttgaggaggactccctgcttgcaagtgcagacatatccaaggagatatttggggaatgcaatgaagctgatacatctaaatatggggaagcagtataccacagggatctctttgagataatgcatgtacaacaactaactgaatgtgcgcaaaatgatgatggaaaagaaactaaaacatcgagtgctagtgcaaactttgatgatgcagatgctgaaacaacaaatgcaggagatgaagagttaacagaggatcagattgatgccttcattatgagtgagcagatagctacaacagaagggaacaatgcatcaatagacagcaaatacacacctcaagttgggatggaatttaagaccaggggagatgcagagcacttcttattcttctatggttttttggctggttttaaaccagcaatcacccacagtttcaggacttccaacaaaaaaagaagcaatgaagtaacaaaagtggagttgaaatgtaacaaacatggcaaaacaaaaaagacaaaccagcaggaacaagatatttgcatagaaaaaaagcgctgcgagaaaggcccaaaaaggaatacaaatgtccaagttaaaacagattgcagagtattcatggttataaaggaacatggacaaaaatgggtgatcgataagttagacttggaacataatcatgagctcagaccagcagacagcaacaacatgtttagtgggcataagtacatgacagatatggaaaaaggaattataagaacattgaaccacaacaacatacctacacggaagatgatagctatattgtcttatctgagaggaggaatgccagaggactttgaggacatagttaactattcactaactgtatctgaatttgagagggactggaagcaaatggttgaggactaccatctagaaaacaacaagtatttcagcaaaatgtgggaaacaagagccaggttcataccggtatatttcaaaaatgacttcttcccattcttgcaaagcacaggtagaagcgagggaacaaactcaaggtttaaagacaatgtgacttcgacttatagtgtgatcagcttcttgcgtgagtaccaaaggattgtggagcaagtgaatgtgtcggaggagtatgaggataatgaaagcaatcgtaaacgtccaaaagaactaatgtttggatatacaatagagaggcaagcacaagaagtctacaatagaaacatattcaagaaattccagttccagttgcaatcaacaccaaggctaagttacagcagaacatctaatctgcatactttcgaggtgtatccaaaatcaaaccaagaagaaaagccacataaattaaggaggtaccttgttatggctaacctaacatatggaatggaagagttcacttgtgtatgtggcaagtttgacaaggatggcattttatgctcccatatacttaaagtgatcattgaagaagggctcacgaaaatcccagagcaatacatactgaacaggtggaagaaaaaacagaaacaaatagatggaccactgttgcgtgcatcaatgccaacccacccagtgctaagacacaacctattgagccggaaagtagcattactcacatcagcagcagcaaaaacagagaaaactatggagtttatatgtgaagaattagacaaactacaagaaaaggtttgccaaatgctatcatctgaagaagatgtaatagcaggaccttcgacaggacgagagaaggaagacaatgctgcaaaacatacaggaccagtagttgaaaatctgcataaccctgaagcagttaaacagaaaggaaggccaaaaaaacctacaaggttaaagccactagtggaggaaatccacatcaagatgaagaaggcagagcaaaagaaaaacaagaaaacaagcaatgcagcagcaagcccacaaggaaaggagaagaagaagatgaaaagaacagcaccttgaagaattgctgctcccccctcctaacagaaccaccaacactcacactgaaaaaagatgcagaaaaaatagagagaaaaatgaagaacacttagtggagaaaggggaagggatggactgtgcaattatgatatattcatatagttggtgcaaacaggaaaaaaagtttgtttttctttcagttgagtcatgtaatcgcttgcaaaaacaaagtgttgaaaaacagatcatgc

SEQ ID NO: 9488 - DNA, 2564 bp, Zea Mays
gtgtgcgcctttggtaattggtattcgtcccgtggcgaagctcattctttatggagtgcctgaagaacaactgcaagagcaccaacaaagcctagtccagtacactgaggagcacaaggagcagatacctgatattgtaagacatatcttgtcagcaggtactgatatttcagaggctcggaaggtctcaaagaaggatgcaaatagcagcagcaacggcgatgcatacagggagagtttgtcttggttgcagtggctgatgttcaaaaatgaaccagcagcaatgcttgatgacctggagcgttccaatgcaggggagcgtgctgtctgtgggtctgtctgggggcacaatgacgttgcttatcgctgccggacttgcgagagtgaccccacatgtgcaatttgtgttccgtgcttccagaatggcaatcacaaggatcatgattactctatcatatatacagggggtggatgttgtgattgtggtgatgcgactgcttggaagcgcgagggcttctgctcaaagcacaagggtgctgagcagatcaagcctcttccagtggagcttgcgtgttctgtaggacctgtcctggatgtcctcttgcagttctggaaggagcggatatgcctgctggaaccacaccatgcaaagggtagtgatggtagctcgtgcaagaggattgccgaagagttgacaacttctatctctagcatgctgcttgagttctgcacacgcagtgaaaaccttcttagttttctgtccctaagaatccgcgagtttcctgatatgttagatgcattaataaggtcagacaggttgcttgacaagaaggttgccagaaaattgcatgagtttttattgaagcttatcagtgaccctgcttttaagtatgagtttgccaaggttttcatacactactaccctatcacatttggggaagttattaaaggctgtaatgattcactactggaagactatccactgatgacaactttttctgtgcaaatattcactgtgcctacattgactccaaggcttgtgcgcgaggttgatttgttgggtgtcctccttggatgcttgacagatctgtttctctcttgcatcggtgaggatggtcgtttacagacaaacaaatgggggaatttatttgatgcttctattcgattactggatgatacacgctatgtgttgagtcatgaagaggtgtctaagcatgttgcttatgggaggcctgatctaactaggtcatggattaaactcttatcacttgtgcaaggaatggatcctcagaagagagtgacaagtattcacgctgaagatgagaacgagcatctatctgcgccgtttgtgctggggcactatcttggaattgtccagaatcttctgatgaggggatcattttctcctcctgatcaacatgaatcaactgatgtgacagtttgctccactgcgataaaaggtgtggaaagtgctgaaaatcagcggcatgcaaaagttgggagggtctcccaggagagttctgtatccgatctaagtagcagagacagctctttgtgctgtggattgccatcacctgctgcctggttagttcttcaatgcctgaaagccattgaaagttggctctggctggaaaacgatatagctctgaggagcaaactgtcatcccttgatgctagcagcaatgattctcacaaacttatggctttgcttgaagacccgttgacttctcttacgggaaacagttcaaatacaaatatgtgtgtgatggacgtcaagataaatgaaggatcacaaacagattgtactgcagattattatgaggcatctagttctcctgttcaaggtcaaggccaagaagcgatgcctctggttagtaacagtacaggcaaagggaagatgcatggcagcagcaacagtacagttgtacagttgcaccctgaggatgccattacttatactctgactgatggtagcattttgtatgctcatccagattcaagaatcgaggaactaggaatactcaatacaagaggatggcctcatgttgtctttgatgtcagttcacaagaaacatctttccatatccctttgcaccgtatgctttcattactactgcggaaggctatgaagaaatgttttggagaggatggacattcagatgtgcaatccaatgagttctttcctcagatacttagaggttgtgagccctatggatttgcttcaattgttatggagcatccactgagagtgagagtattttgtgcacaagtgcgtgctggaatgtggcgcaagaacggtgatgcagctatcctgagtgcggaatggtaccgctctgtgcaatggtttgaacaaggtttggagtcagatctgtttctgcttcaatgctgtgctgccctatcttctccagagttatttgtgcggacaattcaagagcgatttggtttgtccagttatacagatttgggacttgcagagcaaaatgagtaagcccaaatctgcttgtatgtttctgtttctgctttgtattttttgttcaatttatggcattaccatccatgtattg

SEQ ID NO: 9489 - DNA, 2832 bp, Zea Mays
cagagaacgagtaaagcaactagctagctagctagtaataaggaagagaagaatcccaatctatcgctgctgcccttcgggtacgtacggcggttagcccgtggaacgacacatagtgagcgagcgatggttctcgctactgccgagagaggtggagaggagaaggtcgaccaccgcccggcggccgcggcggtcgtcgacgtcgagagcggcagcctgtactcgtcgtcgtcgtccgtggtggatcggcaggactcgctgttccgggaggcggtgacgggcggtcaccaccgtggcgcaggaggacactctcacgatcatgatagctggggcacgacgctgcggctggcgttccagtgcgtgggcatcatgtacggcgacctcggcacctcgccgctctatgtctactccaccaccttcgcccacggcggtgttggccaccccgacgacatcctgggggtgctctccctcatcatctacagcttcctgctcttcaccgtcgtcaagatcgtcttggtcgcgctccacgccaacgacgacggggatggaggaacgttcgcgctctactctttgatttcgaggtacgccgaggtgagtctgctcccgaaccaccaggccgaagacgagctggtctccggctacacttgcaccagccatggaaagccgccgtcagccgcactgcggagggctcactggctcaagcatttgctcgagacaagcaagtcggccaagatctctctcttcctgcttacaatcctggcaattgcgatggtcatcagcgatgctgttctaactcctccgatttcggtgctctcggctgtcagtggcttgaaggaaaaggtgccagatttgaccacagaccagaccgtgtggatcaccgtggcgattctggtactcctgttcgcgatccagcgctttggaaccgacaaagtcggctactcgttcgcgccgatcatcctgctgtggctgcttctgatcggaggagttgggctctacaacctagtcaaatacgatgctggtgtgctcagatcgttcaaccccaagtacatcgtcgactacttcaggaggaacaagaaggacggatgggtctcgcttggtgacatcctccttgtttttacaggaacagaagctctctttgcgaatctgggatacttcagcattaaatccattcagttcagctttagccttggattactgccatctgtattgcttacttacatcgggcaagcggcatacctaaggaagcaccccgaacattttgctgacacctttttcagatcaactccgagcgctctgttctggccgacgtttatcttggcaatcgcggcgtccatcataggaagccaggcaatgatctcgtgcgcgttcgcaactgtttcgcacttgcaaacgctcagctgcttcccgagggttcggatactgcacacgtccaagcggtaccacggacagctctacgttccccaggtcaacctgctgctttgcgtcgctgcttgcctggtgaccgtcagtttcaagacaaccaccatcatcggaaaggcccatgtgaatgtatatgcagagatctgtgtgatcctcgtgatgctcatcacgacgctactgatgacaatcgtgatgctcctggtgtggagagtcaacgtctggtggatcgcgctcttcttcgtcgtcttcgttcccaccgagtccatctacctatcctccgtgctgtacaagttcacccacggaccctacgtccccgtggccatgtcggcggtcctgatggcggcgatggtcgtctggcactacgtgcacgtcaaacggtacaagtacgagctgaggcacacgctgtcgccggccaaggccgagaagctgctcgccgagaagcgcgaccacctgaagagcgtccccggagtcgggctcttctacaccgagctggtgcagggcgtcccgcccatattcccgcacctcgtcgacaaggtcccggcgatccactcggtgctggtcttcgtctccatcaagcacctgcacgtcccccacgtcgacgcctccgagcgcttcctgttccggcaggtggtggagcccagggagttcagggtgttccgctgcgtggcgcggtacgggtaccgcgactccctcggcgacgaggcgcaggacttcgtcgccgcgctgctcgagagcctccagtgctacgtgcgagacgtcaacctctactcggtgcacgagatgcagaacgtcagctatccggtctctcgtgaccagagcttgtcccgggagaagccttccggaaggcacgccgtctatgctgaggagatgatcacgcccatccagtccttctccgagctgtcccatggtgccagcagcaatcgtctaccgcagtttcagcaggcatcaaagatgaatattgaggagttggccaggatcgaggaggaacagatggtgattcagagagaagcagagaaaggtgtggtgtacatacttggagagaccgaggtggtggccaggcctcagtcctcgctcattaagaagattgcggtcaactacatatactccttcctgaggaagaacttcatgcaaggggagaagatgctgtcgattccgcatggcaagctactgaaagttggaatctcgtatgagatctagagatcacgtaacgacttttcagatggatgtatggcaacaagcacatgcacacatcagctgggatctggacatgtttccgcatggattatttgtaaaatagttgtacaatgatgtaagtatgtaacgtgtgcgaggtatagttaacaaccaggatgctatgatgctgcacatacatggacctatttgatccacgtacgtgtgtggctagcattcgtg

SEQ ID NO: 9490 - DNA, 1060 bp, Zea Mays
atatatatttagtgacccatatagaagcccattagttcagcacagcacatcttcctcgcagcgccggcgctccatcttccgctccctcccccaccttcgatcggcacgcaggctcggcgtcgtcgtcagcggttcctcctcccgcctctcgccagtagcctcgcgccctcgccgactggcgaccctgccttgaaggggctggcaagatgatcggcgtagggaaggcgaagcagtacgccaacgtccttgacaagcccctcagccgtggcaggcaggaggtcagtttgagtgcatttgcattcttgttctctgagttggttcagtacaaccagactcaagttgacaacattactgagctggaacggaggctggaggatgctggttatgctgttggtgcaagggtgcttgaactactctgtcacagggagaagggaaatagacgagagacacgacttctgggcattttatcattcatccacagtactgtttggaaagtgttgtttggaaaggtggctgactcacttgaaaagggaacagaacacgaggatgaatacatgatcagtgaaaaggagcttcttgttaaccgtttcatttctgtgccaaaagacatgggagcattcaactgtggagcttttgttgcgggcattgtaaagggtgtattagataatgccggctttcctgccgtagttactgcacattttgtgccaattgaaggccagcaaaggccaagaacgacaatcctgataaagtttgctgaagagagaagcaagactgggctgagtttttatgtatgtacacaaaacctttgactagcctatttgtaaggtgaatcgttactggagtttggtgatttcttgtatttgagtagttcggtgatttcttgtatttgagttatgtaatagcagtgtgactgagaataaaagttatgtaggtgagatcgcaggtgcttcatcagtcttattgaaatccgaccgaaactgctgtattaatgcttttccttgcattcaccttgtattaaaggaatccttcatcttttgatttttcgtattttgtagcctgg

SEQ ID NO: 9491 - DNA, 853 bp, Zea Mays
ttggttgctgatctccgcatgctcttgcccagagtcacagaaggaactatatgaaaagcatcataatacagctgatgggcgtatcaggatatggtttgggttgagacagataatgaatgcaactgatcgtttactgcttgaaacaagagatattgcccagaagctaaatactggaatccatatgcatattgcagaaataccatatgaaaatcaacttatacttcggaccaaaggaattgatcatggcacagtgacatatttagacaaaattgatttcctgaggagtaatttactggctgcccattctgtttggttgaatgtacctgagataggctttttttcaaaggctggtgttaaggtttctcactgtcctgcatctgccatgcgtatgttggggtttgctcctattagagaaatgctggattctggtgtttgtgtctcccttggtacagatggagcaccgagcaataatagaatgagcattgtggatgagatgtacttagcgtccctaattaacaaaggtcgtgaggcatatatcagtggaacaacaaacccaactgctcttcccgctgagacggtgctgaagatggctactattaatggtgcaaaagcagttctgtgggacaatgaaataggttcgctggaggttggcaaaaaggcggacttggtggtggtgaatccatttacatggtccatggtccccttacatgacagcattgccaacattgtctactgcatgcggacagagaatattgagtctgttatgtgcaatggtcggtggatcatgaaggatcataaaatcatgaatctcaatgagacaacgagcagtccgaggttcccgagtgtgttttag

SEQ ID NO: 9492 - DNA, 905 bp, Zea Mays
ttggttgctgatctccgcatgctcttgcccagagtcacagaaggaactatatgaaaagcatcataatacagctgatgggcgtatcaggatatggtttgggttgagacagataatgaatgcaactgatcgtttactgcttgaaacaagagatattgcccagaagctaaatactggaatccatatgcatattgcagaaataccatatgaaaatcaacttatacttcggaccaaaggaattgatcatggcacagtgacatatttagacaaaattgatttcctgaggagtaatttactggctgcccattctgtttggttgaatgtacctgagataggctttttttcaaaggctggtgttaaggtttctcactgtcctgcatctgccatgcgtatgttggggtttgctcctattagagaaatgctggattctggtgtttgtgtctcccttggtacagatggagcaccgagcaataatagaatgagcattgtggatgagatgtacttagcgtccctaattaacaaaggtcgtgaggcatatatcagtggaacaacaaacccaactgctcttcccgctgagacggtgctgaagatggctactattaatggtgcaaaagcagttctgtgggacaatgaaataggttcgctggaggttggcaaaaaggcggacttggtggtggtgaatccatttacatggtccatggtccccttacatgacagcattgccaacattgtctactgcatgcggacagagaatattgagtctgttatgtgcaatggtcggtggatcatgaaggatcataaaatcatgaatctcaatgaggtgctcctgaatggttcgcctggtaatcatatttttcatcagagaggtcttcgccagggagatcctctttctcccatgttatttgtgt

SEQ ID NO: 9493 - DNA, 851 bp, Zea Mays
aaaagaactttgaacaagaaaaaaagattggttctcaggctggattctccttgtgtacccattggtcaaagcactcgtactgatgtgcttctaaaagctgaaaatgttgtccttgaggcaggcggctgtgttcttaggctagtaggactttataaatcagatcggggtcctcatgtttactggctgtcaaaaggaaccttggatgtgcgtcctgatcatatactcaatctgatacattatgaagatgcagcctctcttgtaatttccatcatgaaaaagagattacggagctgcatctttgtgggttgtgacaacgagcctctgtccaggctagagatcatggaccgtgtcaacagaagcaggaaatttgacacacagtttcatggcttcactgggactgatggtccgctggggaagaggatggacaactccaaaactcgggcaaagcttggatggcagcccaagtatccgagctttacagagttccttggtctcagcaatctctaactttcatgcgatgtcactaaatacctgttattaaagatgaatatactgatacataaaagagatgatgacagatttggaagtggaatgttgtttgcttataccgcagttttcgactatcttttgatttcttctgttagatcttgtaaagcattgcagcatggtgtggcatgtacctgtgttgccttctattcgcttctgttaactcatgaaagcattgacttcaatacctgttaattgtttccatggcttcaatctatcgaaccaactgtctctctcgatgttctctagaattgtaacaaaaattccaatggtactttttggataagaacaagttttgatgaaaa

SEQ ID NO: 9494 - DNA, 4816 bp, Zea Mays
ccttgatttgcagcagcccttgcttaaccttctggagcgtggcttacatctttgcgagatcagcccttatgttggtccacaaatccctcatcgatgaatctggtgattgttgagccggggctgcccctagtggtgtcgcccatggggatgggacggagatgccatcaacgaagatgatgtgacaaaatttggcgttgtacctggggatgggcacgccggcgtccagaaacgtcggctgggggcctctgcccacggccgagcaagaggaggatttctcctttctaatttttgtctgctttatttctcatccattgattacataaatagatcggctggccgcccctatctagctagagatccttatctccttaaaactctcctaaaaactctcaacaaactactaactgataaccttcttagataatctcaactaatctcctaaataatctcaactaatcttttaatcttatctttaactatccttatctaatcccccttggagggcccatggctgttgctgctgcagcccctccatgggtctccttaggccctaacaatataacttagatgaaatgacttaaccaattctacagaaataaattaattaccaattaattatttctattatgaataaacatatccttttaatcttatcctttctaaaagaaaatgtcattataataatcagaggtccaaacatctaataataaattaaaccactgattagactataatatttgtattgctatgaattctataccacttactaattctatgttaagaaaatcttctattatctatttagggggtttaaatgaacctataattataaacttttagataaattctaaaattcaacgtaaacaaatttaactatgaaattacttatcgagtgtttttattaccaacatatgtctaccaattttgtcatagttcatttcaatcccaaattctaaagaaatcgtaaaccaatatcatgtctaataataatccactaattcatcgcatatataccaaaaatcaatagttcacatacgcatgaattctgaatcacaacattctcatattacaacacaataattacaaattcataaactaattcaaaacacgctttgaaaaataaatcaaaattttgggttgtcttcaaccttggacgaacagacggtggtgaggcacgggggcacggtgcgggcacgacgcggtcgacgacggactgcgcgggcacgactaggttcagcggggctcgggcacgtctccagcaaccgaacgacgaacggcgaggcacgacggcgagttccggcggcgagcagggcgcggctccggcgacggcgcgggtaggggagagagacagggagcacgggtagggagggagagagaggagagctcggtcgagtccttttatagagagggagagggcgccagggggagagaaaacggtcggccggccattaatggaggcgaccattacctcaacgttgatggcagccatttcttcactaactaagagattaagtggggagggagtgggggaggtggcggcggctgttactggtgcagggaagaggaggggacgcgggcgcggcgcgcgcacggccaggcggcggcgctgggtggaaaaagagaaggggccgcggggccctgacgggtgcggcccgcgcgccatagagagagcggtgggggggaatgggagaggggtcggctgggccggttagtgggctggcggctagggtttgtgtttttttccttttcttttctattttaaaaatataaatatatattttttaaaataattcaaaaatcataataattataccgaaatttatttataactaaaatatttatttttggaccattatttctatattaatcaattggattttcgttaagaaagaaattctactaaacatccaaaaatcgaatatgagcaaacaaaaattattctagatgcaaataaaaatcaaaaattaggaagaaaatttattaccattaataatctaaatgcattattttagttgatggtttttatagtgttatatgaaagcactttggttttttgaaattaagcaatccagcttttccccgagcctgttggccaagatctttgtcatgaacttagcaaaactgtgaatcaggctaatggggcgaaaatcagcagcaccatgagcgccctccctttttggcaacaatgtgataaaggcagagttgaggaggcgaaggtttctgaagtgaaggatgaaagatcacatttggccacagtttctgaagacaactctgaaatccaacaagattccccgagcattttgtctactgtagacttactccatgcgtgagctgggatgccacaaagttccacatccaccaaaactggcaaggaaacaccagtggaatgagcaaaccgtgaccatttcttgaacttcaactcaaaatccgggcagtgaagcactcttccattatcaaacacccgtactgcagtatcctcatcttgaaaaactagcatgaaatcttctggccaggccttgtgaatggtgaaacttgattcaggcagatcatatatttgtgcaacttccaaaattacctcagaaggtgttactgatggccttgtacccacaacggtgacgaacaaagctgcccttagcctgatttcttcgcgtgcgatggcagggtagaattccatcacacatctgcgtcccggagcagccggaaccgtggtgctactatctaccgggtgcggatcacactggagatcagcacccacctccacctccaaagcaggctgcctgagagaggtgtgcttccgtgctcttatggtgagggcgcctccgtcgctttcttccacgcttggaaggggaggcttgatcctaaaaagaggcccttccctgaacagaggcccctgccgacataggggaggtgtgcactaccctatcctgtccagctgacaggggggtaattctcttccacacttgtttacgtttctccatcacttgtggctgaggcatgaccttgatgcgctgccaggaaggctctttatgcgtagcccgccacttgagacgttgccacaccggaacacgaaccggcagagcaacttgcatgggtgagtccaccggactaggtacaactggacagatagcaacccggtgaccagggagcctgcatatgatacagcgcgtggcctggcggcattgggatgcacgatgggttgtggcggcgaggcagttgaagcatctacctcggaggtccaaagggacttgacgacctgccacccatcatcactcgagcggacgttgctcgaggccttccactggcgacgccaggagggaatggaggccttgaccgcaatcccgggcgacttcggaagctcccgcaccgaacccgccggggagcgtccactgccgtcgtcctcaggagcgcgtccttgaaagttccaggcatggcggcaggcaactcatctccatacgacccaactagagggctgcatgaggatgagcctccgccaatccaagccgggctgacttctgcctaacgttggagcttggaccgtcccttagggagaatcggttccgcggacgaagacaaggaggaggtggagcacgacacctgaagggagggaggaaccgcatgggagcaagcggcagggtaggtggttgccggaacctgggcggcagacggcgagctgttggtggaatgaggggcgccgggtgaggtgggaggcaagggggtgggagacgagggggcgggagccttttttttgcagtgtgtgaactcaacatcatggtggaaactgtacaccctctctcctgaactcaacatcatggtggaaacttactgtacaccagtgactggaaggagcgtcattttcaggcaattgttgtataaaaagagtggagaacattgatggatggttcaagtgtccttgcaagtagcagcttcaaattggaatggaaaaggctctttcctattcacctcgagtactgctgtgtatgactgcagtgacaatggattctgcagtgaggattctccttgtgtacccattggtcaaagcactcgtactgatgtgcttctaaaagctgaaaatgttgtccttgaggcaggcggctgtgttcttaggctagtaggactttaaatcagatcggggtcctcatgtttactggctgtcaaaaggaaccttggatgtgcgtcctgatcatatactcaatctgatacattatgaagatgcagcctctcttgtaatttccatcatgaaaaagagattacggagctgcatctttgtgggttgtgacaacgagcctctgtccaggctagagatcatggaccgtgtcaacagaagcaggaaatttgacacacagtttcatggcttcactgggactgatggtccgctggggaagaggatggacaactccaaaactcgggcaaagcttggatggcagcccaagtatccgagctttacagagttccttggtctcagcaatctctaactttcatgcgatgtcactaaatacctgttattaaagatgaatatactgatacataaaagagatgatgacagatttggaagtggaatgttgtttgcttataccgcagttttcgactatcttttgatttcttctgttagatcttgtaaagcattgcagcatggtgtggcatgtacctgtgttgccttctattcgcttctgttaactcatgaaagcattgacttcaatacctgttaattgtttccatggcttcaatctatcgaaccaactgtctctctcgatgttctctagaattgtaacaaaaattccaatggtactttttggataagaacaagttttgatgaaaa

SEQ ID NO: 9495 - DNA, 1599 bp, Zea Mays
atttagctgattacctttaaattaggaaaccaggtaaaacttgtagcaactgaagcacttgcaggcgcgctttcctcaccactcttccgtcttccctgcatgcaacgaagaacgaaccaacaaaaggaagctccccacccccgcctcggtggtgccgccatcagtccatcacacatccccgtcccctcccgtttccctttcgctccgctccccctcgctcggtcactcctcactcctcagtcctcactaacaatccgcaccaggactcatcagggccgcgcgcgcgcgccggcagcgatgcggtgggacgcagccgaggccgaggcggccctcgagcggatctgggacctccacgaccgcctcagcgatgccatcctcgccgtctcccgcgcgcacctcctcctgcccgctcccccgccccctcccgtgccgtccgcgccctccgccaaaggggcccaccgcatcggcgtcggtaggaacgggtgcgtcttcgtcaaggacggcgccgccggcggcggaggtgaggcgctggccgccgccgcggaggccctggccgaggccaggagcctgcacgccattcgctccgcgctcgaggacgtcgaggaccacctcgagtttttacacactgttcaatcacaacagcgggctgagcgagatgctgcaattgctagactggagcaaagccgtctagtccttgctatgaggttagcagaacatcgaggaaagaagtataaagtaatcgatgaggccttggcatttgttggtgaagtgagtgacaagagtcaatttatctcacctgaggatgttcgtgctacccatagccgatcagaggataacgcagatgacaacaggggcagtggttcaaggataatgtcaaacgtgttatcttgcagtttatcattagccaagaattcatttcgactggacaagatcgggggcactctcggtaacgctgcagtgtttgcagaagagaatcgagtacaatcttcaatcagggagctcacaaccgaatgggaaaggaaaacttctggaggtttacctagccagaggctgaagaattattaagctcacgctgttggctgtacagaaagttttgaccaaagctcagttttgttggttttgttagggcactgatcattctttacaacggactggaccctgttccaggcaaaaggcaaccatggaactgtctgtccggttctttttggatggatttgaaggataccacttattctatctcaaattgtaaatggttttgtgcttagagatgcattgtttgcaaaccgcgttcaagctaacttgaactgccgttttcgtactgcctactttcttgccgtgctcttgaggaggtgtggtaaggttcatcgcttgtgtggcaagtttcgggattgttggggctacagtatgatcacatgacatgctttgagttgtgagtactgacgttatttgctttcttctgcctcgtgcttgatgatgcatcgctgctttgctttgttgattgcctgtctggtcatatttggttcagaagcttctttgtttttgtatgttcgtatgtgccctattgtttttccttttacagattgtaccagtacccagctt

SEQ ID NO: 9496 - DNA, 3328 bp, Zea Mays
agaggtgtctcggtccgacttggtacttggcggctccactgctcacgtcacgtgcccgcgttctctctccgactcccatgcctctccggcgagctagtctggtatccatcggcgagctagttttgtctccaccggcgagcacgcgtctgtaacctcctccacccccatcgaactccacctgctctccaatccgctagatctcggctccgtgcagctgtgctgattgtgaggaatttggtagcacctctatcagggttttaaaactagagtgctgccgccccagcatacataatatggacgaagaaaatgttgttgagctgctgcaacgttatcgccgtgaccgtcaagtattactcaactacattctttctggcaacttgatcaagaaagttgcaatgccacctggtgcaatctctttggatgatgtagatatagatcaagttagtgttgattatgtcctcaactgtgctaagaaaggtgaacctcttgaccttggagacgccatccgcctttttcatgatagccttgactatccatatgtgaataacactggagctgtggatgagttctatttgcttacaaaaccagaatattcaggaccagctccaacacgagaaccaccacctatcccagccactgcaccatcatcagttgtgataccaccaccggatgtggaaccagcaccaattattgtgtcatcgccagtcacagctaccaacttgccaaaatcacaaccatttgattctccgaccgagaaggagttaactatagatgacattgaagactttgaggatgatgaagatgaatttgatgggcgaagggcttctagaagacatcaaactgacgctagtgatctatcgttgctgttaccatcatttgaaacagataacagagtccatggatattcgaactaggcaaggattactcaacgctatggttggcaaagttggaaaacggatggacaatcttttgattccattggaactattatgctgcatatccagaactgaattttctgacatgaaagcataccttcgttggcagaagagacagttaaacatgctggaggaaggcctcataaaccatccagttgttggatttggggagttaggtcgaaaagtcaatgagataaggagcctttttagaaagattgaagaatccgagtccttgccaccatctgctgcagaggttcaacggacagaatgcttaagatcactgagagaagttgccacttctctatctgaaaggcctgcccggggtgatcttactggtgaggtttgtcactgggctgatggataccatctgaatgtagcattgtatgagaagatgcttggcagtgtttttgacatcttggatgagggaaaacttacagaggaggcagaggaaatccttgaactcttaaggtcaacttggcggacactaggaatcacagagactgttcatgatacatgctatgcatgggtattatttcgacagtttgttcttacaggtgagcaaggacttctgaaagtcgtgattgacaatttgaggaagatacctttgaaagaacagcgtggtccgcaagaaagattacacttgaaaagcctgcgtagttctgttgatgctgagggtagctatcaagacttcacatttttccagtctttcctgtctccaattcagaaatggacggacaagaaactaaatgactatcacctacatttctccgagggctccagcttgatggctgatgttgtgacagtggcaatgcttacaaggcggatccttggtgaagaaaatgacaaggtagcggagtctcctgacagagatcagattgaccgatacatcacttcttcagtcaaaaatactttcttgaagatggcacattctgtagagttcaaagcagacactacaaatgagcatgttttagcatctctagctgaggagacaaagaaactgctgaaaaaagatacagccatttttacacctgttttgacaaaatggcatccacaggcagcagttgtttctgcttccctcattcataaactttatggaaataaattgagaccatttcttgagcatgctgagcatcttacggaggatgtggtttctgtatttccggcagctgatgctttggagcaatacgtaatgtctgtgatggcctccgtcacgggagatgatggtttggatagcctatgcagacataaactagttccatatcagattgaaagtaaatctggtacattagttttacgctgggtaaatgggcaacttgagagaattgaaacttgggttaaaagggctgctgaccaagaggtttgggaccctatatcccctcaacaacgccatggaaattctattgtagaagtctatagaatcatagaagagactgcagatcaattttttgcatttaaggttcctatgcgagatggagaattaaatagtctatgccgtggtcttgacaaggcattccaagtttatacacagctggttactgcacccctagttgataaagaagatttagctccgcctattcctgttcttactcgatataaaaaggagcttggaatcaaggcttttgtaaaaaaagaggtccaagaagttagaacagttgatgagaggaaagctagcgaaattactcagcttacaatgccaaagctttgtgttcgtcttaacagtctatattacggtatcagccagttgagtaagttggaggacagcattaatgagaggtgggctcggaagaaaagtgaaaacactaacatcagacgaaaaagtgaaaagtcaaagagtgccgtccctaatcagaagaatcaatttgatggcagcagaaaagaaatcaatactgctattgatcggacaaaggttatattctgggacctgcagcagccatttgttgagaatttatacagaaatggtgttgctcaagctcgattggacaccataactgaagtgcttgatttggtccttaatcaactttgtgatgtcattgtggaacaactgagggatcgtgtggttacagggcttctgcaagcatgcctggatggcttccttcgtgtgatactggatggaggttctacacgtgtcttctctccaaatgatgcagctttattggaggaagatcttgaaaccctgaaggaattttttgtttctggtggagatggactgcctcgtggaactgttgaaaacttagtctcgcgtgtacgtcctgtaataaatctgatcaagcaagagacccgcgtgctcattgatgacctacgagaagttactcaaggtggcaagagcaaatttggagcggactccaaaaccctccttagggtcctgtgtcacagaaatgattcagaggcatcac

SEQ ID NO: 9497 - DNA, 3487 bp, Zea Mays
cagtgggctcgttgcttcggcgtccgttgcttaatttcgggtgcacgcgggtctggcaggaatgggacgctggatggttacgtggatggctgtgtggtgttgctttgctcgctaatttggttggatcaggagtgtcctgggagctatgctgtgctgattgtgaggaatttggtagcacctctatcagggttttaaaactagagtgctgccgccccagcatacataatatggacgaagaaaatgttgttgagctgctgcaacgttatcgccgtgaccgtcaagtattactcaactacattctttctggcaacttgatcaagaaagttgcaatgccacctggtgcaatctctttggatgatgtagatatagatcaagttagtgttgattatgtcctcaactgtgctaagaaaggtgaacctcttgaccttggagacgccatccgcctttttcatgatagccttgactatccatatgtgaataacactggagctgtggatgagttctatttgcttacaaaaccagaatattcaggaccagctccaacacgagaaccaccacctatcccagccactgcaccatcatcagttgtgataccaccaccggatgtggaaccagcaccaattattgtgtcatcgccagtcacagctaccaacttgccaaaatcacaaccatttgattctccgaccgagaaggagttaactatagatgacattgaagactttgaggatgatgaagatgaatttgatgggcgaagggcttctagaagacatcaaactgacgctagtgatctatcgttgctgttaccatcatttgaaacaggtatcacagacaatgatcttcgtgaggcagcatatgagatccttgttgctgctgctggtgcttcggggggccttatagttcctcagaaagaaaagaaaaaagagaagagacacagattgatgaggaaactcggtcgtagtaagagtgaaagtgtggatatcaacactcaacggcaacctggtttagttggtttgcttgaaaccatgcgagctcaacttgagataacagagtccatggatattcgaactaggcaaggattactcaacgctatggttggcaaagttggaaaacggatggacaatcttttgattccattggaactattatgctgcatatccagaactgaattttctgacatgaaagcataccttcgttggcagaagagacagttaaacatgctggaggaaggcctcataaaccatccagttgttggatttggggagttaggtcgaaaagtcaatgagataaggagcctttttagaaagattgaagaatccgagtccttgccaccatctgctgcagaggttcaacggacagaatgcttaagatcactgagagaagttgccacttctctatctgaaaggcctgcccggggtgatcttactggtgaggtttgtcactgggctgatggataccatctgaatgtagcattgtatgagaagatgcttggcagtgtttttgacatcttggatgagggaaaacttacagaggaggcagaggaaatccttgaactcttaaggtcaacttggcggacactaggaatcacagagactgttcatgatacatgctatgcatgggtattatttcgacagtttgttcttacaggtgagcaaggacttctgaaagtcgtgattgacaatttgaggaagatacctttgaaagaacagcgtggtccgcaagaaagattacacttgaaaagcctgcgtagttctgttgatgctgagggtagctatcaagacttcacatttttccagtctttcctgtctccaattcagaaatggacggacaagaaactaaatgactatcacctacatttctccgagggctccagcttgatggctgatgttgtgacagtggcaatgcttacaaggcggatccttggtgaagaaaatgacaaggtagcggagtctcctgacagagatcagattgaccgatacatcacttcttcagtcaaaaatactttcttgaagatggcacattctgtagagttcaaagcagacactacaaatgagcatgttttagcatctctagctgaggagacaaagaaactgctgaaaaaagatacagccatttttacacctgttttgacaaaatggcatccacaggcagcagttgtttctgcttccctcattcataaactttatggaaataaattgagaccatttcttgagcatgctgagcatcttacggaggatgtggtttctgtatttccggcagctgatgctttggagcaatacgtaatgtctgtgatggcctccgtcacgggagatgatggtttggatagcctatgcagacataaactagttccatatcagattgaaagtaaatctggtacattagttttacgctgggtaaatgggcaacttgagagaattgaaacttgggttaaaagggctgctgaccaagaggtttgggaccctatatcccctcaacaacgccatggaaattctattgtagaagtctatagaatcatagaagagactgcagatcaattttttgcatttaaggttcctatgcgagatggagaattaaatagtctatgccgtggtcttgacaaggcattccaagtttatacacagctggttactgcacccctagttgataaagaagatttagctccgcctattcctgttcttactcgatataaaaaggagcttggaatcaaggcttttgtaaaaaaagaggtccaagaagttagaacagttgatgagaggaaagctagcgaaattactcagcttacaatgccaaagctttgtgttcgtcttaacagtctatattacggtatcagccagttgagtaagttggaggacagcattaatgagaggtgggctcggaagaaaagtgaaaacactaacatcagacgaaaaagtgaaaagtcaaagagtgccgtccctaatcagaagaatcaatttgatggcagcagaaaagaaatcaatactgctattgatcgtctctgtgaatttactgggacaaaggttatattctgggacctgcagcagccatttgttgagaatttatacagaaatggtgttgctcaagctcgattggacaccataactgaagtgcttgatttggtccttaatcaactttgtgatgtcattgtggaacaactgagggatcgtgtggttacagggcttctgcaagcatgcctggatggcttccttcgtgtgatactggatggaggttctacacgtgtcttctctccaaatgatgcagctttattggaggaagatcttgaaaccctgaagcaagttatgtcatgctggagtaggaagggtctattggcgcatattccacacggaaagcttgccatgccattcctgttggcgtggcaaaacagaattgccatgccacctggactggcatggctaggataaatctgaggaaaatcatatctttttcataaaccgttggctggagatgttttgttacaaaaattgtaacacta

SEQ ID NO: 9498 - DNA, 3578 bp, Zea Mays
agaggtgtctcggtccgacttggtacttggcggctccactgctcacgtcacgtgcccgcgttctctctccgactcccatgcctctccggcgagctagtctggtatccatcggcgagctagttttgtctccaccggcgagcacgcgtctgtaacctcctccacccccatcgaactccacctgctctccaatccgctagatctcggctccgtgcagctgtgctgattgtgaggaatttggtagcacctctatcagggttttaaaactagagtgctgccgccccagcatacataatatggacgaagaaaatgttgttgagctgctgcaacgttatcgccgtgaccgtcaagtattactcaactacattctttctggcaacttgatcaagaaagttgcaatgccacctggtgcaatctctttggatgatgtagatatagatcaagttagtgttgattatgtcctcaactgtgctaagaaaggtgaacctcttgaccttggagacgccatccgcctttttcatgatagccttgactatccatatgtgaataacactggagctgtggatgagttctatttgcttacaaaaccagaatattcaggaccagctccaacacgagaaccaccacctatcccagccactgcaccatcatcagttgtgataccaccaccggatgtggaaccagcaccaattattgtgtcatcgccagtcacagctaccaacttgccaaaatcacaaccatttgattctccgaccgagaaggagttaactatagatgacattgaagactttgaggatgatgaagatgaatttgatgggcgaagggcttctagaagacatcaaactgacgctagtgatctatcgttgctgttaccatcatttgaaacaggtatcacagacaatgatcttcgtgaggcagcatatgagatccttgttgctgctgctggtgcttcggggggccttatagttcctcagaaagaaaagaaaaaagagaagagacacagattgatgaggaaactcggtcgtagtaagagtgaaagtgtggatatcaacactcaacggcaacctggtttagttggtttgcttgaaaccatgcgagctcaacttgagataacagagtccatggatattcgaactaggcaaggattactcaacgctatggttggcaaagttggaaaacggatggacaatcttttgattccattggaactattatgctgcatatccagaactgaattttctgacatgaaagcataccttcgttggcagaagagacagttaaacatgctggaggaaggcctcataaaccatccagttgttggatttggggagttaggtcgaaaagtcaatgagataaggagcctttttagaaagattgaagaatccgagtccttgccaccatctgctgcagaggttcaacggacagaatgcttaagatcactgagagaagttgccacttctctatctgaaaggcctgcccggggtgatcttactggtgaggtttgtcactgggctgatggataccatctgaatgtagcattgtatgagaagatgcttggcagtgtttttgacatcttggatgagggaaaacttacagaggaggcagaggaaatccttgaactcttaaggtcaacttggcggacactaggaatcacagagactgttcatgatacatgctatgcatgggtattatttcgacagtttgttcttacaggtgagcaaggacttctgaaagtcgtgattgacaatttgaggaagatacctttgaaagaacagcgtggtccgcaagaaagattacacttgaaaagcctgcgtagttctgttgatgctgagggtagctatcaagacttcacatttttccagtctttcctgtctccaattcagaaatggacggacaagaaactaaatgactatcacctacatttctccgagggctccagcttgatggctgatgttgtgacagtggcaatgcttacaaggcggatccttggtgaagaaaatgacaaggtagcggagtctcctgacagagatcagattgaccgatacatcacttcttcagtcaaaaatactttcttgaagatggcacattctgtagagttcaaagcagacactacaaatgagcatgttttagcatctctagctgaggagacaaagaaactgctgaaaaaagatacagccatttttacacctgttttgacaaaatggcatccacaggcagcagttgtttctgcttccctcattcataaactttatggaaataaattgagaccatttcttgagcatgctgagcatcttacggaggatgtggtttctgtatttccggcagctgatgctttggagcaatacgtaatgtctgtgatggcctccgtcacgggagatgatggtttggatagcctatgcagacataaactagttccatatcagattgaaagtaaatctggtacattagttttacgctgggtaaatgggcaacttgagagaattgaaacttgggttaaaagggctgctgaccaagaggtttgggaccctatatcccctcaacaacgccatggaaattctattgtagaagtctatagaatcatagaagagactgcagatcaattttttgcatttaaggttcctatgcgagatggagaattaaatagtctatgccgtggtcttgacaaggcattccaagtttatacacagctggttactgcacccctagttgataaagaagatttagctccgcctattcctgttcttactcgatataaaaaggagcttggaatcaaggcttttgtaaaaaaagaggtccaagaagttagaacagttgatgagaggaaagctagcgaaattactcagcttacaatgccaaagctttgtgttcgtcttaacagtctatattacggtatcagccagttgagtaagttggaggacagcattaatgagaggtgggctcggaagaaaagtgaaaacactaacatcagacgaaaaagtgaaaagtcaaagagtgccgtccctaatcagaagaatcaatttgatggcagcagaaaagaaatcaatactgctattgatcgtctctgtgaatttactgggacaaaggttatattctgggacctgcagcagccatttgttgagaatttatacagaaatggtgttgctcaagctcgattggacaccataactgaagtgcttgatttgcttattttcaggtccttaatcaactttgtgatgtcattgtggaacaactgagggatcgtgtggttacagggcttctgcaagcatgcctggatggcttccttcgtgtgatactggatggaggttctacacgtgtcttctctccaaatgatgcagctttattggaggaagatcttgaaaccctgaaggaattttttgtttctggtggagatggactgcctcgtggaactgttgaaaacttagtctcgcgtgtacgtcctgtaataaatctgatcaagcaagagacccgcgtgctcattgatgacctacgagaagttactcaaggtggcaagagcaaatttggagcggactccaaaaccctccttagggtcctgtgtcacagaaatgattcagaggcatcac

SEQ ID NO: 9499 - DNA, 965 bp, Zea Mays
cgccgcgcgcacacaagcacaagtggtttgtgacttgtcaagtgttcttccggaaaaaaaaaaagaaacacaaatggacgctcctgcggcggcggcccagggttgcggcggcaagcacatcgtgctcgtccacggcgcgtgcctgggcggctggtcctggttcaaggtggccccggcgctgcgggaggtgcccacgttccgggactacacggggccgctgctggagctcctggcgtcgctgccggacggggatcgcgtggtgctcgtgggccacagcctcggcggcttgagcgtcgcgctggccgccgagacgttcccggacaaggtcgccgccgtggtgttcctctgcgccttcatgcccgactgcgcggcgcggccgtcgcacgtgctggagaaggacgtgaccctcatgacatctctgcttcggccgagttccatgttcgtggaggacctggtgctccagcaaccctacaccaaggaaaggtacggctcggcgcgcaaggtctacgtcgtgtgcacggaggaccacgccatcgcggaggggttccagcgctggatggtggagaacagccccgtggacgaggtcagggagatcgtggcggaccacctcgtgatgctctccaggcccagcgacctggtgcgctgcctcgctgacatcgccgacaagtacgcttgacgacgctacgctcttcagcgcaattcgcccgcgtgctgttctcattttgccgcatttcagtttaatatttccccgctgtttccgaatcgagattggccagaattctcgacgcacggtgtgaaatcgtgtataataataataataatgctattgatgttttctaatatatagcaggtattttgtaacacttggttttaaggataaaactgaatccattagtacgtgtgctcaaaatgcttactcatacgtacataaagcatacttggacttccggcattaagcaaatctg

SEQ ID NO: 9500 - DNA, 988 bp, Zea Mays
atgaggataagaacaagcgtgcacactgccgcgttctgccagccccgccccgcaacccgcagccgccccacgccgcaacccgcagccgccctggcaaccgcccgcatccgtggcttccatccggaaatctcggtcgcgatagcatcccgcaaccgccataatccccccaatctcgcgctcccctgtgctctgcggcctccacatttcacgcagccgatctctgctccctgcgccgtgttcgttcgcgaggttggggccgatgatggcggcggcggggcggactccgatttctgcggcggccaagtcggagacacaggcgacgcccggagaggcgctagcggaggcagccgggtcccacggctggctgcgcgagtacgtggaccgcctcgcgtcctcggcctcctccctctccgggcggtggagcgcgcggtggagccagggacaccacagccgcagccagagcaaccttgcgagattggggccagaacaatagctctatttgctatggaaccacctagacggcgtctatctccagcgagagcgataccgtcgaggcgcctatccgcgccggacacaacgtccgcagtgatgggcaacctccagggcctgaacggtgccaccgtaggcttctcggcggccggcggcccggaggaggcgactgaagaggaggacatgcggggctgcaagggatgcgctcgccggtggccgaagtcggggctaagctggggttgtgcacggtcgagaagatggaggcgagagcctagacttttcaacgaaggttatggatttggcagcaggggaactcctggagattgtgcctcttggaaaaggcttctttcttgccaactatcctatttcaattttggattgaccattatcgtttgtgttcctttgtcctccctcttttacctcttgtagttacacaagaacaacttgattgtgctaaagaggcaatcgaatctacagttctgatgaacttggaatcaag

SEQ ID NO: 9501 - DNA, 6382 bp, Zea Mays
ggacgacgcaccacccagccccagcccctgcccctgcccctgcccctgcaaccccgctccaccgcgcccgatctctatcgtcgacaccaccgcctccggcgaggccttttccgctcttgaggtttccacaggttcattccctgctcaatcgggcgccccatttggcaccctctgcccccccacagacccgtagggttgcatttcaggaaacagcgtgtctcttttctggacttgggaatctgagaggatactgtgcagtttaatggcacacactgctgactatatgcacatataatgatgcatgggcaaaccatgcttctctggtctagtggctattgagctgtgctctatgggaggtattgctgaatgtggtgtgagcattgacactaaagcttcaccacgtcgagcagccatagagaaagctcaggacgagctcaggcaggaatatgatgttcgtgaagaacgaaggagagagcttgaatttctggagaagggaggcaatcccttggatttcaaacttggccatgtagcttcccttagtgtacagtccacttctgtgacagaacagatagctgaacaaaatgtgataagtgaggccaaaggtagttctgcatttgctacatcacctcatggggattctgttgaaagtaacgacaagccaggaaattcattgtgccgtgaaggcaatacagccgataatattacgcttttggatggagatgccagcagcatgggtgtggataaaattgtgaaacgtggaacaaagagaactaattcagctcaagctgagcagttcctgcactgtgatggtcagaacaatgcaaaagaagaagattctgggttgtaccgtcttggtccaaagagccaagcgtatgcacgacgtaggtcaaagcctatcagagagaatgcatatagtgtatctgttaggtatccaccaattcctccattaagttctcagcaaaaagatgtgacaggattaatcccagaaaccaagactgaggataatggtgtttcatccattggtgattcaaaaccgactagtcctaactctaaaaatttggtgacaaatgcatcattactgaatgataaggtggaaatggagacagaaaatgttcaagcaattcctgaaggcaatcaagcaccgaaaaatgagttatcaaacagcaacaatggtagtcctgctattgagatttcaccaaacagtgtgccggataattctcgtcttactgtaagtgatcagatggttactgcatttgtttctgtggaatccccagatgctatttcaaaagtagctgcttcaaggatagtttgttctctcccatatatatccaatgaaatattgaaagaagcacaaactcttgagaaggcaggtaataacccatctatggtaagtgtggttgacgttcatgcatatggtatggataacaatggtgcagcaccttactctgctgtgaaaagtgctagtttgaatgaaaatgaagttgatccaattcatgaatatgctgccaaagctgttactgaacatccagaccaaaatgagaatcttgtaccagtgaatgcagatgaaatggctgatgaaggcttgaataagatcctacctgatgacaaggatgacaagaaagattgtcaactggaagttagtagtgggcctgtcattttgaatgacagttctactcctgtctatcctgaatttagcaattccttttatgcaagagatggaacagaagtttctaacaatgcagtagattcaaaaaataacgcagaacagcttgcttcttctaatcagggaaaagggaacatggaggaatgcaaagattctgacggaaacaatgcaagtgaattgagtgttgcccaaaagctagtgtctgttattgtgccccctgcttcagacgcaggcgatgtgagtaattttgtagaaaatgatgttgataaatctagcagagatcaggagaaggtagcaaagaaggaatatgaagattctgtcgtggcaaagaaggatcacgaagatgctatcctcagaagggcacggtatatagaggcaaatattaagagggctggtgaatggtctctctgcaatatttctttagagaagaagcagaagagccactgggattttgttctggaggagatggtctggatggcaaatgacttcacacaggagcgtttgtggaaaaatacagttgcagcacagatgtcccattggatttcttctagaggtcgagcggtatttgaagaagcaagcattcagagaaagcagaaatctgttgctagagttctagccaatggtattatgaacttttggtgttcagtccatactttacgagctagtggtggtattcctaaaccaataaaaatcgagcaaccgaatgagctagaggaaaataagcttggtgggttcaaatccggaaaagcggatgaggagtgtttggagcaagaaaagtcgcgccagtctcctattcagagctttgcacttaggtttcttgagtataacattaatgcatctgaatttctgccattagccgaagcaccatcaactcctgacaggctaaatgattttggcattttgaaagcaaatctcttttatggcgtagcacccggtgcaatgcaggcatacagggagtctatggaccgtctccttatttataataacaagaaaattggtgacactgtactcaaggatgattatgagccatcaacatatgcatctgtcacagatgtccctatggagaatgcatatggagatgacgaaagtgaggcacacacctacttattgcctggagcttataatggtggtttggcatcaaaaaatagtcacaaaaagaagcaccatttgcctcagaggatgaatggcgcaaggtcatatgaaattggtgttgacagtccttacgaaccactgtatttggaaagtaaatcaggaaaccagcaactcttatcgaatggcaaacaaacagacttcctctccattcctataaaacgcatccgcacagcagctaggcagcgggttgtgagtccatttcctgctggtgcttctgggacccctcaattcacaaataaaacggacgcatctagtggagatacaaactcctgtcaagatgatcaaagttcattacatggagggtcattttctaggaagaatgcagatatagagtccactgttgattttgacaggcaattgttgtatgatggtagtgaggtgtcgacaaaatctaaaaagaagaaaaagactaagcacccagggtacaaggcactaccaaatgtgtccgaatcttgttcgttgagggctcctggaaagggcaattatgatcatagatctcagatcgatatgatagctcagtatgagcagaaggattatattaaaaagagacaggagacaaatgggaattttggtgttattgatttatcaacagtggttaatggcctacatgctgctaagaagcctaaattgttgaatcaagcaccagatatttcactggaagctcttaaaccaattggtccaatggcctctcttgctgcatcacaaatgagcaacatggcaaatcctacgagggttataaaaatcagcacccgtggaagaaaaagtaaaggactcaagatgcgagctggtcattcaggtcctggaagtccatggtcaagttttgaggatcaggctcttgttgtccttgtccatgatatgggtgaaaactgggaattggttagtgatgcccttaacagcatcatccaattgaagtgcatatacagaaggcctaatgagtgtaaggaacgccataaacttctcaccgatagaagttgtggcgacggtgctgacagcgctgatgactcaggctcatctcaacactatccttctgcattgcctgggattccaaagggtagtgcaaggcaactgtttcagcgccttcaaggaccgtttgaggaagggactctcaagacacacttcgagaaaataatattgcttggtcaaaaattgcatcaaactcgtagaaaggatgagatccatgagctgaggcaaaaaaatccacttcatacttctcatggttttgcactttctcaagcatgtccagggaacttatctggtgtcattttgacgccacttgacctttgcgatggaccttcgaactcggatgcacttacaggatccaatacaagtgggttaggtctttcaaacaataactgctctgttggtcctactcttcctacatcaaatatgaacttaagattaccaggttctcctggtatggttttgggaagcaattcaccattgcctttgaatgctccctctagggatgttcagaggtatggtgtgcctagaccaacctcgatacagggtgacgagcaatcaagaattcattataaccagatggtaaatggcagaaaccttcagcaacctggagttcctgttcctggtgtgttgccatctggtgttgatcggggtgcccgaatgatgccacctgcccatggtgttggaatcatggctggactaaatcgaggtacacctattactaggccaggttttccaaggcttggttctcttggaaacatgtcacccaccgatggtcaaggcttaaaaaatactgtaaacgttcatcctggtgccatactgggacctggaagtactatgttgaggccacgtgacccaatgcagatgtttagacctggccagaattcagaggagcatagacagatgatgatgccagagtttcagttacaagtctcgcaaggaaataatcatgctgtgcatttcagcggtccaccatattccaacactggggcatcttcacctgttcaatctttacctgcccagcagtcccaaccacatcagatgccacaacaatcacacatgtatggaaacacacaccttcttcatacccaaggaacaaaccagtcaaatccacagcaacagcaggcttatgctatgcgcttggccaaagagaggcatatgcaacagatgatgccccaacaacagcgtccattatctgttgccagtgcagtgtcagctgtacagaatggctcaccgatgcaacagcagagccaaggatctgcaacttgcgtaatcccagctacacagacacaacataagcagcaatatcctgcacaaaatgcacaagataactcaatgcttccccatcagccttcagccaccactacacataaacagaagaagcaacagggccagcagcagcctagacaaaatcaacagcaacgaaatcaaggcagtcaacaagctaagcttatgaagagtttaggccgagggaacatgatgcagcagagtcctgtggatgttattcaagcaagtggcatatcaacaagctgtaaagatcaagttcctgataagaatatgatgcaacagggtccagggcattttgttgtaagtaaaggatcaatcccattgatacctcaacctgggaatcaaccaaatgtatacacttctcagatgcctccgtctccaatgcagacaccggatattagtaatcagggtgcagtcaagggttcttccaaccatgccttgttaacttcccagcaaggttcactccatacgccttcacagttggcacagcagcagcagcagcaactacggttcatgaatccgtcacagaataatatgcaaaggttgataatgcaacagaatcggcatgtgaacacagatggcaggattgagttacctgctgaccaagtacagcataaccaggtaatgtcatctgcctcacttgcaagaagtacagattcaggcagcccaggaatctcatctataagccagcggaaacaagagtcatctcatgacccaagtgcaattacctcaacctcgcagctagctagctcacctcaagacacctttgttggaagtgatagggtgttgccatcatccagccaaagcatgccgcaaaggcaaatgtccggtggtgtgcctgtacatggatatggcattggtggccaggtgcagctacaacagtctcggcagcaactccagtctcagcagcagcagcagcagcagcagaggcctgttgtccaaggtggtgtatatgctcacccctcaaattcaggacaaggatgatgctgaaccatactgggcctgcatttctgaagagcctcccttccccttgtaaagttacctgtacaggcgtccgtgctgtggaagatgtgtgcggatgatagtgctctttattcccaactttgagctaactgtagcctcctcggtgtcagttgcaggcctcaacagctgaaccagcgacggttctagatcatcggctaaacaatgctatccctcaggcccttgtgacatggacacgattgccactttctacaaccttgttgttgtgaaaagatgtctccccaaagagacacctcttcaagtgatctcatctaccacaagacatcttttcaagcaagg

SEQ ID NO: 9502 - DNA, 1741 bp, Zea Mays
cggatcaccagatccgctcccttccccccgtcagcagtagaggcgcgagaagttgtggaagacccgtctcccttcccataaacacgacagaggaaacacacgagacactggatatatggttggacctctggcctctttctcatcttcattccatatgaggggtacatgttctatatatagagacgcgatagccctcagggctatattcgatatttgcccacgtaacccttcattagggtttctcaacacaggggaccggaggtgggacccatccatggagccatagcaataccgacggttccacagctttccttcgccgcaccgctttgcttcctcgcaaagcatcagatcgtggtcgagtcgccgtcaacgacgcggcgctggtaccgcagcatccttcgcccccgcccccgtccccgtcaccgtattcgcatcgtccggcaaacggcgaccagcgcaaacaccttccacaagccattgctttagtttgttccctcttgctataaaatatgcccgctcctgcactactactactactaccagcgatagtggccggcatcatccgtctcgtctctcctctcctctcctttttccccctccctgcacagcgccgctcaccgtcaccggaccacagcagcgatcgatggctgaggtacacaatgagcggcccgtggggatggtgggcgacgtccgggacgcaccggtgggccgcgagaacgacctcgaggccatcgagctcgcgcgcttcgcggtcgccgagcacaacagcaagaccaacgcgatgctggaattcgagaggctggtgaaggtgaggcaccaggtcgtggccgggaccctgcaccacttcaccgtcgaggtgaaggaggccggcggcggcgaaaagaagctgtacgaggccaaggtgtgggagaaggcgtgggagaacttcaagcagctgcagagcttcgagctcgtcggagacgccgcggtcgcctgaggcttttcgctggaggctggagcacaacaatgaaagaatttaactgtcatcccactggaaaagtatgatataatgaataaaccagcgtcttacccacatgtattgtaccctaatgagatatttgaccactgtaatagaatgagatgtgctaaggaatctgaaagccttcttgctttttgttgccaacttgccatacatgatacatccgccaacaggtctcagctatccaagaaagcagaaggatagataacataaaactggagagcaactggaatgtacaaacggtactatctgcgaaagcaatagctgctaatagaacctaacttgagaacattacagtcaactagtcaaacgaccttaacctctgggacattataagctacatcggcagctttggcggctatatgatacatgagaactgctacagagttaagctgaacctacagttgtcctgctattcctactcatcaactctgaagctatataacggcggagctagtcttcattgtcataatcctcgtcctcctccaatctatggtttgttgacagagcaaactggacagggtccatctccatcttgttcatgtcagccagttcccaagcaccaaagaagtccttgagttttgctccttcccttaaccgtggaacagatggtccaggtgctgcagtggctgcagcgcaactagttgctggagctgacagctggggttcgggtggcactgtaacctcatcctcttcatcggttggatctaaattcaagtcaat

SEQ ID NO: 9503 - DNA, 3565 bp, Zea Mays
cccacgcggttttcgtgtttgctgccgccgcggtttccattgcttctcccgtcgctagggcgttcgtgaatacgtgatccatcgtctccatctccgtctggtgtggtgtgttggtttgagagactcgaggtgtgggcgtcgcttcgtctggaatcggctctcccatttgttagatagatccttcatatctccccacgtctgggcgtcgcttcgtcggctgcgacctgcgagacgccggcgccgccggcgacggtggacgaaggcgatcaaggattaggcgatccgatccgatccgaaccaattctccattcttcgattccttccttgggtgggcggctcccctcagattccttccacatggctcgttccccgccgccgccacccccttccccggcgcaagggaacgggaacgggagtgggagcgggagcctcaccgccagagacgccctcgcctacatcaaggccatcaaggacaacttccaggataagcggcacatgtacgaacagttcctccaggtcatgcgtgattttaagagcaacaggctcgacagcgccggcgtgatcgcccgtgtcaagaccctcttccacggctacccggacctagtcctcggcatcagcgccttcctgcccaaggggcatgccatcaggcctcaggacctcagcgaggacaaggagcccgtcgattatcccagggccatcaaccttgtcaacaggattaagatacgattccagcaggaggaacatgtctacaagtcattcctgggaatcctcagtatgtaccgcatggataacaaacccattcaagatgtttacgacgaggtcaccttgctgttccacggccatccagatttactcgaggagttcactcatttcttgcctgatacgcccatacctcctccggaggcaggcactacctctaaagttaggaatgatgacaagaatgctataacgcattctgccatgagagctcagacagttcaggtgaatcaacaaattatagaattttcaattctagttgattcttcaattgctataatttatactctcctccaacaatgtaggccatatcatttttaggacagtctccacaattgcgataacactaagttaatcttaaatttcctttgtatgtgaatctattgatgacacttttgtacactgaactggtaaataggttggcaaattgttgttcaaatgttacatactttgacttattcaaataaaatatttgttacttttttgaacagagagattataaaaggaacaggaagaatgacgaatatgaaaacgaagatttggattcagaacaatctggtctcaaatctcaaagaaaggtggagggtactggtgatgatacaccagggattgctaccatgtcctcattcaattgtaatgagggggacaacgatcctgaggaagagtctaaagttaggaatgatgacaagaatgctataatgcattctgccatgagagctcagacagttcagagggagagagctcttccatcagctgctgattcggactccagtgttgatcgccttgatcttgagcatgatattcaaaaagggtgtattgagaaggacaaagtccgtaatgcctgccatggtcagcatagaagatattataaaaggaataggaagaatgacaaatatgaaaacgaagatttggatgcagaacaatctgttcccaaatctcaaagaaaggtggagggtaccggtgatgatacaccaggggttgctaccatgtcgtcattcaattgtaacgagggggacagcgatcctgagaaagagtctaaagttaggaatgatgacaagaatgctataatgcattctgccatgagagctcagacagttcagagggatagagctcttccatcagctgctgattcagactccagtgttgatcgccttgatcttgagcatgatattcaaaaagggtgtattgagaaggacaaagtccgtaatgcctgccacggtcagcatagaagggattataaaagaaataggaagaatgacgaatatgaaaatgaagatttggatgcagaacgatctggtcccaaatctcaaagaaaggtggagggtactggtgatgattcaccggggattgctgccatgtcctcattcaattgtaacgagggggacagcgatcctgagaaagagagatataatgaaagggaaaaatttgaaagagtattgaccttcaattctaaggaaggagcagctcatgaagctagtacattccctagcaaagagaagtataacttatgcaaaccaatatcagagcttgatctgtcaaattgtcagtggtgcactccaagttaccgacttttgcctaaaaacgtttgagctggacgtgctgttggaatctgttagtgttacaattaagcgtgttggggagttggtggaaagtatggaaggcaactcactgaaacctgatagctctatccacctcaatgaacatttgactagtttgaatatgaggtgcattgagtggctatatggtgaccatggacttgatgttgtggatgttcttcaaaaaaatgctggtgtgacattaccagttattttaaccaggctgaaacaaaagcaggaggagtggtcaatgtgccagtcagattttaataaagtttgggctgaagtatattcaaaaaattatcgcaagtctcttgactatcgcagtttctattccaaacaacaagacacaagaatctgaacacaaaagattaacgaaatcagtgagaagaatagaaaggggatgatgtgttacttgctattgctgctgggaataggtggccactagtaggcaagaagcagaggactgctggaaagcgttgggctctgaagaagcacaggcacccgcccgcctgggctaccgccgcccttgcttgtgtcgagggcctccaagaaccgcaccacctcgtccatgtcagggcgcttctccgggctcgcgtcccagcacttgtgcatgatgttcgccatcgggcaggcttgggcagcagcgagaggccgcaggttctgcacacacagaatgtcacacatcagtatgtggacgattaccagcagtgaatccaggagaagagtagaaagtgggatgatgtgttacttgctattgctgctgggaataggtagccagtagtaggcaaggaggtctcgtcctctgttctgatttctcgtttgaaggtctcgtccttgacatggatccgccggcacccatgctgtcacttcaagttgttaagtcttcatcgcaacaacttttactcaaggattcatcacaacagattacaccgatgcctccttcatttgcagttgttgcatcatcacatctgctgccagccatgcctcctacaacagatgctgtttctttagcaccccacccaggacaatcaagagacttgtcaaaaagattactctgaagaagaagatgaatgccaagtcaggctgatttgagcggtgttccagttgcagttgcttattgtatctgttaagcaacagatgttgctattgtactcttctaatctaactaggtctgtacccgtgcgttgccacgggagtaaaaatttagcgtg

SEQ ID NO: 9504 - DNA, 3824 bp, Zea Mays
caggcgtttccctagttgcgctgttgccttctcctgtgtatcgttgatctactcgcgttccatccactgcatccggctgccatggtgaggaagaaaaggactggccctggagagagttctggggagacttctggagcgcctggtcagggctcctcacagcgtcctcaggcaacacaacagggtgcccgaggtggaggacaacaccaggtgcgtggtggatatccgggccatggagtgccgccttcagagcacccaggtggtgggccgcctgagtatcaaccacgtggctatcagggacgtggcgttccacctttacttcctggtggtgggccgcctgagcctcaaccgcgtggctaccagggacatggtggataccagggccgtggcgggccaccttcacagcatcctggtggtgggccatcacctgggtctcagcctcgtggctaccagggacgtggtggtctgcgtcccagagggggagtgccgcagccataccgtggcgggcatgtgggaggtagtgttggaccaattgttccttcaggtccgtctagaccagttcccgagctgcaccaagccccagatgtccaacatcaagcccctgtggtggcagcaccatcaccaccgggagctggctcgtcctcgcagcctgggatggccgaggtgagcactggacaagtccagcaacttgtgattcatgaccaaagttcagccagccaagttagtcaggtagcaccagcatcaagcaaagctgttagattcccattgcgccctggcaagggtacgcatgggtccaggtgcatcgtgaaggcaaatcatttctttgctgagctgcctgataaagacctccaccaatacgatgtatcaataacacctgtggttccttcacgtggtgtcaatcgtgctgtcatgaaagagcttgtaaaccttcatagacactcccatttggatgggcgtctgcctgcatatgatggaaggaagagtctttatacagctggagcattgccatttacttcgaagacattcgaaattactctgcaagatgaagaaaacagtcttggtggaggacaaagacaccaaaggggccagagggtctttcaggtggtgatcaaatttgctgctcgcgctgatctccaccatttggctatgtttctagctgggaggcaaccagatgctcctcaagaggctattcaagtacttgacattgtactacgtgaatttcctactgccaggtattgtcctgttggtagatcattttattctcccaatttagggagacgccagcaacttggtgaaggtttggaaacttggcgtggtttctatcaaagcataaggcccacacagatgggtctttctctgaatattgatatgtcctctactgcatttattgagcccctccctgtgattgattttgttgctcagcttcttgacagagatatctcagttagaccattgtctgattctgatcgtgtgaagattaaaaaagccctacgaggtgtgaaagtcgaggtcacacaccgtggaaacatgcgtaggaagtatcggatatctggcctcacttcacaagcaacaagggagttatcattccctattgatgatcgtggtactgttaagactgtggtgcaatacttcctggagacttatggctttaatattcagcacaccactttaccttgtttgcaagtgggcaatcagcaaagaataaattatctgcctatggaggtctgtaagatagttgagggacagcgttactcaaaacgactcaatgagaaacagatcactgctctactgaaggtgacttgccagcgtccccaagagcgtgagaaagccatcttgcagactgtgcatcacaatgcctactccgaggatccttatgcccaggaatttggtataaagattgatgagcgtcttgcatccgttgaagctcgtgttctgcctcctccaaggctgaaataccatgatagtggcagagagagggatgtattgccaagagttgggcagtggaatatgatgaataagaaaatggtcaatggtggtagagttagcagctgggcatgcattaacttctcacgaaatgtgcaagatggtgctgctaggagtttctgtcatgatctcgctttgatgtgccaagtatcaggaatggattttgcacttgaacctgtgctgccccctgtctatgcgaggcctgaacatgttgaaagagcactaaagagactttatcaagatgccatgagcatactcaggcctcagggccgagagcttgacttgctgatggtaatactgcctgacaataatggctctctttacggggatcttaaaaggatatgtgagactgatcttggattggtctcccaatgctgtctgactaaacatgttttcaaggcgaacaagcatcagtatcttgcaaatgttgccctgaaaataaatgttaaggttgggggaaggaatactgtacttgttgatgctttggcaaggagaatcccccttgtcagtgacgtagctactattatctttggtgctgatgtgacccatccccatcctggggaagattctagtccttccattgcagctgtggttgcttctcaagactggcctgaggttacgaagtatgcaggattagtgagtgctcaaacccatcgccaagaattgatacaggatcttttcaacgtacggcaagatccccaaaggggggctgtctctggtggcatgattagggaacttctcatttctttctggagggcgactggacaaaaacccaagaggatcatattctacagggatggtgtcagtgagggacagttctaccaagttctgttgtacgaacttgatgccattagaaaggcctgtgcatcattggagtctgattaccagcctccagttacctttgtcgtggtccagaagcgtcatcacaccaggttgtttgttaataatcacaatgatcagcgtgctgccgatagaagtggcaacatactgccgggcactgtggtggactcgaagatttgccatccaaccgagtttgatttctacctgtgcagccatgctggcattcagggaacaagccgtcctgcccattatcatgttctgtgggatgagaacaaatttacggctgatgggttgcaaactctcaccaacaacttgtgttacacgtatgccaggtgcacacgctcagtatcaatcgttcctcctgcatactatgctcatctggcagccttccgagctcggttttacatggagccagatacaagtgacagcggatctgtggcgagcggtgctacgacaagccgtggccctccaccaggggcgcgcaacaccagggctggtgctgcgaatgttgctgtgaggccattacctgctctcaaggaaaacgtgaagcgcgtcatgttctactgctaagattgacgctgcgctgatgctgtgagcaagcaattatcgttatggtggtgatgctaggacaccgttatgcaccggtaactttaataccttttgtactgtaactacttgtatggcattggaaactgtttgcgatatactcctattaagatgggcttgtcgtggattagattgcactattggaagccatcaatccagttctcatctgaaaattatgtaggtacgtacggtattacaacctctctctatctccctcccaatacagtacagaaaggacgcaattcttgatttcagatagacagtatctgttaggcaggtacttgttgcttgactgttcttcatatagatcgttggtaaagtatcggttacaatcctgagtatgtcacggagaatcaaggagatgtaggtcattaaatcaacgagattgctactggaaa

SEQ ID NO: 9505 - DNA, 1690 bp, Zea Mays
ccgactcgataaacccttctctcgtccgcctccgcgcctcactccctctcctcctctgcttcgtcttccccacccgcggcgcgcagcacacccaaaaccgtaaccctagattgcaagaggacatgaccagcaagtttgggctcgccggcggcatcccggagcggcgggtgagaccgatctgggacgcagtcgactcacgccagtacaagcccgcgctcaagctctgcaccgcgctcctcgccaagcaccctacatccccctacgcgctcgccctcaaggctcttattctggagaggatgggaaagcctgatgaagcattgagcggggccctgaatgctaaggagctattgtattcagacaacatttttcattttgatgatcttacacttagcactctacagatagtatttcaaaggcttgaccgattggatcttgctacttcatgctatgagtatgcctgtacaaagtatccaagtaacttggaattaatgatggggctttttaattgctatgttcgagagtactcatacgtgaaacaacagcagctctcaaaatgtacaaaactgtaggagaagaaaggtttttgctttgggctgtttgcagcattcagctgcaggtgcattttagcagtggtggtgtgaaattattggcactagccgaagcattgctgaagaagcacataaattctcatagtttacatgagccagaagcactttctctctatgtttcaattttggagcaagagaaaaagtatgacactgctttggaagttctttctggagacttgggatctcttcttggaagggaggaggacaagcttcgtttgcagggatgtcttcttgctcaagcgagtagctatctgtctgcttctgaaatataccagaaggttctggagtcttggatgtttgctggagcatgatgtgaatctccctaaaccatccactggcgaacacacttgtccttcttgctctgttgattcagcattatccaacaagacttctcttgacaaggagctggttgaatctcgccttacaagtgcgttgtcatttgtgcaaagtctacaagaaaataactcaagcgattgtgtcagaggacctcatctggcaaaaattgaaattgaacggcagcggtgcctcaatggaaacccagataatatcaagcttatggaagctttggtgcagtacctccacagatttggtcatttgtcttgctcagcatctgatgttgaaatttaccttcacatgctatccaacaatgagatatctgagctgctagatgaaattactagatcttttgatgcatcatcaatttcagttaacacactgggttcaacaattactcttttcaaggtccaggaacttttgggaacttcattcacaaaaccaacttcagaacttgagggcattgcaaaaagaatggttgataccttttacaaaaacctgcctctatcaaattacttggatcctcaggaaagcatgtacggtgaagagcttctgtcaatggccagcagtatccttgtgcagctatactggcgcaccagggatttaggatacctacttgaagcaattttgatactggagtttggattgactgttcgcaagtatgtctggcaatacaaggttactctggtccatctgtactcttacctgggggcacttcctttagcacataaatggtaatttctcctttg

SEQ ID NO: 9506 - DNA, 1816 bp, Zea Mays
ccgactcgataaacccttctctcgtccgcctccgcgcctcactccctctcctcctctgcttcgtcttccccacccgcggcgcgcagcacacccaaaaccgtaaccctagattgcaagaggacatgaccagcaagtttgggctcgccggcggcatcccggagcggcgggtgagaccgatctgggacgcagtcgactcacgccagtacaagcccgcgctcaagctctgcaccgcgctcctcgccaagcaccctacatccccctacgcgctcgccctcaaggctcttattctggagaggatgggaaagcctgatgaagcattgagcggggccctgaatgctaaggagctattgtattcagacaacatttttcattttgatgatcttacacttagcactctacagatagtatttcaaaggcttgaccgattggatcttgctacttcatgctatgagtatgcctgtacaaagtatccaagtaacttggaattaatgatggggctttttaattgctatgttcgagagtactcatacgtgaaacaacagcagacagctctcaaaatgtacaaaactgtaggagaagaaaggtttttgctttgggctgtttgcagcattcagctgcaggtgcattttagcagtggtggtgtgaaattattggcactagccgaagcattgctgaagaagcacataaattctcatagtttacatgagccagaagcactttctctctatgtttcaattttggagcaagagaaaaagtatgacactgctttggaagttctttctggagacttgggatctcttcttggaagggaggaggacaagcttcgtttgcagtcgctcttcgcatccgagtcgtcttcgtcggggtcgtcggagtcgtcctcggcctcctcggatgtgaagctagatctatggtggcatggcgagcgggacggcaatctcgtgggacggtgcctgcacggtcgtgcgggtgagatacatggccaatgtgggcggcgggagtggcacggcaggggctgggaggctgcttcatgctcgggcgtgggagggggcggggcatccaggggtgtggacgccttccttgctcttatagttgctacaaacatatcattatccaacaagacttctcttgacaaggagctggttgaatctcgccttacaagtgcgttgtcatttgtgcaaagtctacaagaaaataactcaagcgattgtgtcagaggacctcatctggcaaaaattgaaattgaacggcagcggtgcctcaatggaaacccagataatatcaagcttatggaagctttggtgcagtacctccacagatttggtcatttgtcttgctcagcatctgatgttgaaatttaccttcacatgctatccaacaatgagatatctgagctgctagatgaaattactagatcttttgatgcatcatcaatttcagttaacacactgggttcaacaattactcttttcaaggtccaggaacttttgggaacttcattcacaaaaccaacttcagaacttgagggcattgcaaaaagaatggttgataccttttacaaaaacctgcctctatcaaattacttggatcctcaggaaagcatgtacggtgaagagcttctgtcaatggccagcagtatccttgtgcagctatactggcgcaccagggatttaggatacctacttgaagcaattttgatactggagtttggattgactgttcgcaagtatgtctggcaatacaaggttactctggtccatctgtactcttacctgggggcacttcctttagcacataaatggtaatttctcctttg

SEQ ID NO: 9507 - DNA, 2154 bp, Zea Mays
cttggctaggcttcaagtcctcgccgtcgccgagatagttgaaaaggacccaaacaaggctgtaccattgttttgggcagctataaacagtggtgaccggatagagagcgcattgaaggatatggccaatgtactaaaacaagcaaaccggtctgaagaagccattgaggcaataagatcctttcgtgatcgatgtccctatgaagctcaggagtcacttgacaatattcttctagatctatacaagaaatgtggtaggacagatgagcagattgaaatgctgacattaaagctgcgaattgttgatgaggagctagcttctggtcggtggaaaacaaaactgtctaaatctcatggaagagtagtctacctttctctcagagatgaaaaagcaaggctattggggaaccttgcttgggcctatatgcagtccgaaaattatgaggaagcggagatgctctataggcaagctcttgctatagaagctgactacaacaaagagtgtaacttggccatctgtttgatgaagactggaaagttggctgaagctaaatatctgattcatgctataccttacaactgtaatgatgaaagtcatgttaagtctctctcccgggctactgaaatgcttagggaatttgacttgcaatccctcccctctcccataactcaggcgaagtccaaagaaccacggaattttgttgctgatgatgtggagatgcttgtagatctacagccacaaacactatcaactccttttagtgaactgaaatataaagaagcacatatttcagtttcacaaaatgcagagaagcatgagaactgcaattcatgccttccatctcccataactcaattgagacgggaagaaccacacactatggttactgctgatgccgaaaagaatgaaggctttgcagagttccaagatctttctcgactgttcaatgatgctgccacgcctcattcagtacttgagaaactacgaaagaggctagttaaagaggcaccaaaagtcagtattcatgatcaaattcagactcctccaactgaaagcttgccaaactctgaaagaaacctagatgctagtgagacttccgtgcaagaagggaagctattgaccaaaggtgttagaaaaacatggtctgacatggtggatgaagaggaacagcaattgggtgatgacaaaccatgggctgacatggtggcgaaggatgaccagcaattgggtgatggcaagtcaacacatggtgttggaattactgaacaaaacgagagcagtaagcatgcaagtaagctggagtatagaacaccatcgtcctctcaagaaagcaggacccatcaaagaccagtcatgggtggtcaactgcaaggttcttcagcaggttcatggagacgcagtgactccaaaatctacatggataagaacgtgaactgggatcttgtgaggactgctccgacatggagcaggcataaggtacatgaccacaacaatcgagtttggcaaaggcttcacacaattcatccccgtgagagagcctcaggcacgaagcaagtaccacggagaagcaacacatctcagcgcgctctttttcctgactggaaatcaaaaggtgaaggatatggccatggctatgttccgtttgatgataacgaacacactcagtgttccagtcacattgaggccgccactcatcgctggcataataatgaggcaagtacagggtcatggaggccacagaaccgtctgcgggtcttccaggaaatcacaaatgagatcaaccaaaatgttgtgtaactatgtccttgttccttgctgtcgatggaagttctcctttccagcaacatgttgtttgcactacaaatgggatctgtgaaatagttcagcaataaacagtttttcgcttcagttgcttctgtttttgagattcagcatagctacagaaaactatgtgaatatcttcactgcccaccgttcatactactggcacgttggtggatcgtgatatctgtatatattttctttatcactagtgtgccaaagtatctgtaaaaaaaaactggtggcctgtctatcaatttctcagagtggtctgagaatcttttccttccctgatttcacatcacctccacaatgtggcttaccatgaaact

SEQ ID NO: 9508 - DNA, 2400 bp, Zea Mays
gccagcgcgacgcgaggggcacgtcgcctgcagccgcggctgtataatatcactgatagtgtgattccgctgcagtctgaacctgcacttgataataatccctccaagagtgcaaacgctagggaccagattctttctggtacggagaatgtgactacaggcaatgcacgcggcggcagctccttgaaatcgcaaaaaggcccgccagagaaggctagctctgtcggaaaacctggagaacaaccttttccctaccatcaaaatgtgtatgcaccacagccacaaccactctatcctggaggctacatgaacccttcaggacaatgggaggaatatccccattatgtgagtatggaggggctccattccgtatctcccggaatctacaatgacaaccagtccctcatgctatctcctggatatgcaaacaatccccaaatgatgtatggagcatattctcctgtttccaccgttggggatggccaacaatacctccctatgcattttcccttctcaagtccttactatcaaccaccagcttctcctagcatgggatattcaagctctgcgactggaatatcccaaggagaccctatgctgcagcaagagtacttccttcctgatggtcttctatattcacccacacaagggtatcatcaaccattcagctcattcgacagagcaccaacacaactaaataatgctcctgggttgtttggtcaagggaatctaccactggcttctggaatgcaccatggatcgatgtatggtcctggatcctacaagggacgccagcaaggtagcaaatttggtggcagtactacaagttggagttctgctggccgcagatttggtactatcgacttgagtggcaatcaacaaaggggcagcatgccatttggtagtcacaatggctctctggagttcatgaatgagcaaaaccgtggaccacgcgctacaaaaccgaagatacaaggcacagagaacacctcaggagatgagagaagcgagaaaattgttcctctgattgatagcgaactgtacaatcgctctgattttataactgagtacaaggatgccaaattctttgtaataaagtcctacaccgaggaccatgtacataggagcattaagtataaagtttgggccagcacagccagcgggaacaggaagctggattctgcttaccatgcagccaaagagaaagaagagcattgccctattttcttgtttttctcagttaatgggagtggccaattctgtggcgtggctgagatgattggacctgtcgatttcgacagaagtgttgattactggcagcaggataagtggagtggccagttccctgtgaagtggcacataattaaagatgtaccgaacaaccttctgcggcacatcattcttgagaacaatgacagtaaacctgtcacaaatagcagggacacacaggaggtgaagctggaacagggcctccagatgctaacaatcttcaagaaccatgaggctgagacaacgatcgtggaagatttcgacttctatgagcagcgggagaaagccttgcaggagaacagacgtcaacagcagcctcccaccacctatcctcagaagctggtggataccaacgctcaaggtcctgtggccgatatatcagatgcatttgccaaggccgtccagttgaaggatactgcgaacagcgggacgaccccgaaagctgagggtgcctcagctgaaaatggatccgctgccacagccaaggttgaagggagtgcaaacctgaacacaggccctgtggagtagagtccgtttcccttctttctgctaatttggagcagcagatgaattgcatgctgcaatgtgaatgccggaaaagtggaaagtgcaggttgatcgtgttaaatatggtcgtggctgcgtcagttgtacaacatcataggctttgttttatctccatttatgttatataagttcaatatcatagttccaaaattattgttcccagttctcttctttcctgctttattttgcttccgacttccgtggtcctcgtgtcgcaccatgaatgatcgttccattttagcgggtttataggcataagaagctgcagaattatgctgcgatgaagttgcattttctgcagttgaatgtgatactgtcgagtcttgcactgtctgtaatttcagagatcctctagtgtatcttcgtcttgttactctcagcatgtacaatctgcagtagttctcttggtcacattgctccaaatccctaacacttgcacattacaaatgaaatgtagaactctctaataccttcaggtaaagccgttgttgcagcagcaaacctaaaatcacctgcaactgttacacatgttaaagaaacgttcaatagtaatcatgacctgct

SEQ ID NO: 9509 - DNA, 687 bp, Zea Mays
ggtttccatacacccattcgagtacttggagggtaggtggtgtattggcgatgtctcgtgcatttggcaatcgtttactgaagccatatgtggtggcggaacctgaaattcaggaagaacagttcagtgatgagctggaatgcctggttctcgctagtgacgggctttgggatgttgtggaaaatgaggaagccgtttcccttggcaaatcagaggacacgccagagtctgcagctcggaaattgacagagatcgcttattctcgtggcagcgctgacaatatcacgtgtatcgtggttcaatttcaccatgacaaaaccggatgagccatgtggcggccaatttcagttgtaccctgcttcaggctattattatcctgcaagccgggtggtggggcttctctcagatttatcgctcttgtagcaacttccaagaactcgtccattgattcttttgttgtcttgtaggaaacatttgttccaacaggtgtaatagatattttcaatgggttaatttctaataaaactatgtttacaattactgtttagtggaaattggttatcctcttgcctttgatactagatgataagatgatttgcaaccagtatgcaatgggccgttaccgtgtatccctattctcgaacggagcaatcgactcagccctgtttgtctggatctaggagctaa

SEQ ID NO: 9510 - DNA, 2424 bp, Zea Mays
ctagaaatcctaatgattcagcagcacacctgtccgcctagccgcctacgcgtacacagaaaacaatttttttgtccacacacgcgcgcgctccgagccgcagatccgagctagcgcggcgcatccgacggccacgacagcgcagtgccgtcctccgccgccaccgcttggcgattgtccgcaccccaccagtccaccacctcccccacgagcgaaaaccacggtccacggaccacggctatgttccactccaggtggaggctgcagccccggtttcgcaagccgcgccgtggtttgcttgcccacaggcggccaaaccgcaccctccttcccgctcatctcgctttggatcgattggtttcgtaactggtgagggactgagggtctcggagtggattgatttgggattctgttcgaagatttgcggaggggggcaatggcgaccgcggggaaggtgatcaagtgcaaagctgcggtggcatgggaggccggcaagccactgtcgatcgaggaggtggaggtagcgcctccgcaggccatggaggtgcgcgtcaagatcctcttcacctcgctctgccacaccgacgtctacttctgggaggccaaggggcagactcccgtgttccctcggatctttggccacgaggctggaggtatacaaaggcacgtacagctagggttgtgtagaatcattttagatctgttatctgaggcaaatttgcttattctagccgcctgaaatttcttgattttgccagtatcatagagagtgttggagagggtgtgactgacgtagctccgggcgaccatgtccttcctgtgttcactggggagtgcaaggagtgtgcccactgcaagtcggcagagagcaacatgtgtgatctgctcaggatcaacaccgaccgcggtgtgatgattgccgatggcaagtcgcggttttcaatcaatgggaagcctatctaccactttgttgggacttccaccttcagcgagtacaccgtcatgcatgtgggttgtgttgcaaagatcaaccctcaggctccccttgataaagtttgcgtccttagctgtggtatttctaccggtcttggtgcatcaattaatgttgcaaaacctccgaagggttcgacagtggctgttttcggtttaggagccgttggtcttgccgctgcagaaggtgcaaggattgctggagcgtcaaggatcattggtgtcgacctgaaccccagcagattcgaagaaggtacagtacacacacatatgtatatatgtatgatgtatcccttcgatcgaaggcatgccttggtcgaataactgagtagtcattttattacgttattttgacaagtcagtagttcatccatttgtcccattttttcagctaggaagtttggttacactggccttggtctaataactgagtagtcattttattacgttgtttcgacaagtcagtagctcatccatctgtcccatttttttcagctaggaagtttggttacactggacttggtctaataactgagtagtcattttattacgttgtttcgacaagtcattagctcatccatctgtcccatttttcagctaggaagttcggttgcactgaatttgtgaacccaaaagaccacaacaagccagtgcaggaggtacttgctgagatgaccaacggaggggtcgaccgcagtgtggaatgcactggcaacattaatgctatgatccaagctttcgaatgtgttcatgatggctggggtgttgctgtgctggtgggtgtgccacataaggacgctgagttcaagacccacccgatgaacttcctgaacgaaaggaccctgaaggggaccttctttggcaactataagccacgcactgatctgccaaatgtggtggagctgtacatgaaaaaggagctggaggtggagaagttcatcacgcacagcgtcccgttcgccgagatcaacaaggcgttcgacctgatggccaagggggagggcatccgctgcatcatccgcatggagaactagatttcgctgtctagtttgtgatctggcctgggcttggggttaataaaagaggcaatgctagcctgccctttcgatgaggaggtacatacacgctggcgatggaccgcgcttgtgtgtcgcgttcagtttggcttttgccaagcagtagggtagcttcccgtgtcggtaattatatggtatgaaccatcaccttttggctctacatggtatgaacgtaagatacaaattccaactacctctagctcgcttgtgtggtatctgtatcagtattcatgtgtttgtttgcttatgtgtttgtttgcttgtatttgctggtgcttgtatcgcgggatgcaatgagttgttgtttggttgttgtcaaccaggctctatgtgtgtgtgcgaggtgtgtgtttggtta

SEQ ID NO: 9511 - DNA, 791 bp, Zea Mays
ctcaggcctcagtgtccgcgcattttacaacacggccacaccaacgccacgacatggacgccgccgccgccgcctcactgttgccccgcgccgccgcctcctcactgttgccccgacgcgttctctctcctctccatgtttcccgaagcggcctccttccccgtcaaagctccttcctcgctgctcgctgtgcccactcccgtgcccctcctccacatccgcctctgccgcgcgccgactgcgatgatgctgccgccaaggcgcacccgcgcctccgtctccgcctgcttgcggaggagttccgcgcactcccatctgacgcagatcgcgcgcgccggctcctctcactcgcggccgcgctgccgcggctcccggagcccgaccgcgcccagggcaaccgcgtcatgggctgcgtcgcgcgggtgtggctcgtcgctcgctgcaacgcgtcaacgggctggcggatgtggttctcggcggactccgactctgacctctcgcgtgggtactgcgcctgcctcgtcgccgcgctggacggggccaaacctgaggacgtcctcgccgtcgaccccgccgatcccgacctcgcgccgctcggggcggggacaacggcggcctggtcgcgggccagcacgtggcataatgtgcttgtcggcatgcagaagcgggcgcgcacggccatcgcggcgcgcgagggtaggcaccccgggaagccgtttccgtcgctcgtcatcgcgcgcgacggcgccgtcagcgcgcagggcagctatgccgaggcccagaaggggaga

SEQ ID NO: 9512 - DNA, 2022 bp, Zea Mays
ctctgttcctccctgcttttctgagccaaacgtggttctaccgcccgttggaaatgggctcggcgatggagaaggagcagaggaggccacccagctcgaagacggcgccggtgtccatgaaggcgtcgcccgcaaatgcgacgccgcaatgcatgaagaacaggaaaattgcactgcagcaggacgtggacaagctgaggatgaaactgcggcacgaggagaacgtccaccgagctctggagcgggcgttcacgaggccgctcggcgctctacctcgcctccctcctttcctgccgtctcaaacgttggagcttctggccgaagtcgccgtcctggaggaggaggtcgtccggctggaggagcaggtcgtcaatttccggcaaggactgtaccgggagaccgtcatcaccacctccatggcggcgaagagcgtgtacttcccggacggttaccggagcacgccggcacggcacaagccacctgcacaaccgcagagtccagagctgtctacctcgacgcgccaaggctccgatcaagatgccgctgattggctgccatctttgaggcgagccaccaatgcgatgtggacaccaagaaggcccggtcgttccctgagccaaggcgacagtccggggaaggagaaccagtcgttcggcagtggcactaattcgtgcagagagttcggcctggcgcccttgagtaaagtgccaggatgcagggtagtacaggtagcggagacacgcgcaggttttcagacaacgagtgcagtggaagaccacaaagctgttgagggcagcaatggcactggtccaagcaaggcctcaacggcggcgaacgaagtctcggaggagctactggcgtgcctgctggccatcttctcgcagaagagcgcatccagcggccaagacgaggagcgggtgtcgctgccgccggtctccggctcctgcggaagcagctcagcagacccctactgtgtcccagaattcgggtggcgggatattggccggtacaagcagttccggtcagtcgacatgaacacttgtgccggcgacgactccgctcttggccagagactgaagtgagtttccattgatcgggcactgctccggaagctctccttggttgacctagcgggcctctcccaccagcataataggctggcgttctggatcaacacctactactcctgcatgatgaacgcatttctcgagcagggagcgcctagcgacccccgtatgctggtggccatgatgcccaaggcgaccatcaacgtcggcgggcgcgtgctgagcgccgtggcgatcgagcacttcattctccggctgccccactacgacgatgacgacgcaaaagcacgtgcacactgactgaagcgaggaatggcgacggccaggccgtgctcgggctggactggccggagccgctgctgacgttcgcgctctcctccggcagacggtcgtcgccggtgagggtctacgcggccggccggagtcgacgagaagctggaggcggtgaagcgggagtacctgcaggccgcggtgggcgtctcgccggcgagcgggctgccgaacctcctccttcactggtacctgctggctgcttgactccgccaaggacgtggaccgggtgtgcctgcagctgtcccgcgacccgtgtgcgccctgccggataccttctgcttctggccctgttgtcgtagaacgttggagtgtgtacacagttttggttgggccgtgattctttttgctgtttcaaccgtgaatttgttgtttgcttacgttgtacacacagttttcagttttggactacaggtctgcagagataaggccgtaagagcatgtacagtggagagacatcaaaacagttctccaagtacatgagacaacaaagagactctattgtacaattgagtgtctataaacgtagtttattaataaatacagaattaaatgtatttgtatagcatcagatcgatagaacagacgacaaattcgtacagtgggaagtgagacgtccgttgct

SEQ ID NO: 9513 - DNA, 2146 bp, Zea Mays
acaacgattgttgtacatatgcatttcttttttgactaacatttttttttaaaatattttcagcaatacttgccaattatgaatattctgttaattaaaaatacacatgacatgattgaggaccctgtgatatatgttggactttatatgtcctacaattttgatgagcttgagactgcaaggtgttctttgcactgcagaaacttatgtcttgttgcaacaatgcaagctggaaagattaatgttcataagaattatatcagacctagaggttaatggtgcatgtttgcttctgagctggcatgcagagacactgctttctcttgaattcatccattgtcagctttatcctaccgtcatggataaaatttgcatgagtgtgtacctgaagggatctcaaagccatggaatccaacaatttagtattaagtcgtcacaaatctgtgaaaccaagcctctgaccatctcttctggtctgttcaaaattttgtcatctggtcgttgcacctgctgtcacttcgtgatattaagatgcagtcaccatttgctcggatgattattcacactcttctcgagtcgtcatgtgatttacacacacttgagatatcagaaaacaatgtgggttgacatgaaaaatatattcttaatttccttttacttattttctatctggtaaattggttgttttttgtagattgctggctggctttcggaattgaacaaatgttctacaaacttattagcgctgaaatcagatatttttatgaactccctgtctgttcttaacctgagggaaaataatttgcaaaaggatgatgttgtagatcttcacaaaattctaataaaaatgcctaacttaagagatttagatataagtggcaatccagtcatggatgaaggtatcagatcattgatccctttcatttcatggtctattcaaaaggaaaatccacttctgagattaacagttgagaactgtgagttgtccagtattggtgtgattatacttctggagtgcctcacaaatgcgaagcaactccttgatgtgctatctattgcagacaatcatctagggagttctgtggcagctgcattggccagattcttgggttcacatgtacgggctttaaatgctacagatatcggcttgggaacagtaggcttccaaatacttgaggaaacattgccaacagaagtagctctttcccacatcaacatcagtaagaatcgtggtgggatcagagcagcatattttgtttccagattaatatgtcgagcaccagaccttgtctcagtcaatgcagcagggaaccttttaccacctgaatcattggaagtcatctgtaactccttgaagcaagggacttgtaatttggagcgagtggacctgactggcaacatgcatttatcaagcaatatttttcctgcattccttgaattcaagaagcatggaaagccaattctggtagtaccaccaaacttgagcacttctgctccatatgatgatgacccatgactactatgtaccgtataagccctagtgctgctcaagtcacttcagttggaactaaataaatagtgatagtatttttttggatcattcccaagaatcctaaccactagatcaaaacacaacacaaattgtacatctgtttagattcgacacggctttcgtcggtgaagctttgcgctagggcagcgacggtcgggaaagcgagcttgatgtcgacggtggactttctgttgctgacagacttccctctagatcggttaaggtttgaggtggagatcgaaaatgattgtgaatcttgtacctttaggtgtcggcctccacctctttatttatagggctacgcaacagatgctcaacaaccttgatgctctcgatcagggcgtgaggtcaggggtctagttttcggttgggtcaagttgggtcaactagtggagatcaattctaacattttcccctttaatctcattttataccttcagctttatacctttaatttttttgatattccattatagataagtgcatagagcatgtttcatcgtcacgattaatcaccgatagacttagcaactacagtacatatctctatcctgaaatagattctttaactttgggccttttattgttcggaaa

SEQ ID NO: 9514 - DNA, 2193 bp, Zea Mays
gcggccggtggcgaccggcacatcaacatcagagagagggtggaacagacagagaaagagggactgtggtgtgcacatggaggagctctccaacaaggctctggcaccaagcttgctttcgctgtgcctggatgcggtagctgatcgtctcatcagcgacaacgccgccgcaggcggcggcgtgggccgaacgggttcgtcaggagggtgcagcggcggcggcggtctcgccggattctcggaagatgatggaggggaggcagacgaggaccgcctgcatccacaggagttggcggaggggcttccctgggagcttctccatcggctggcgtcccggctcccgcctgtcgtacttgagtcactccatcacgctgcacatgcccgatactgttctgctgaaactacttctggacttggagtgcaagatggagaaagacgtggggtgaaacgttcaaggtgtgaagatttcaacagcacttggcagttgttgttcaaacttcgctggcccctgggtggtaatactggacataataatttggtcactgtggattggcagcaaaagtattgggaaaagcatttacaagagtgtttaaatgaagctgcagaacatgcttttcttccttttttttgtgggagtattggtgagctgagtatatcagctaaaatcatgaattccatctaccagagcatgggcacatctcaacaacattcaagattagcatatcaatgcagcaaatttggttgctatgtgaggagcttgagactgcaaggtgttctttgcactgcagaaacttatgtcttgttgcaacaatgcaagctggaaagattaatgttcataagaattatatcagacctagagattgctggctggctttcggaattgaacaaatgttctacaaacttattagcgctgaaatcagatatttttatgaactccctgtctgttcttaacctgagatcattgatccctttcatttcatggtctattcaaaaggaaaatccacttctgagattaacagttgagaactgtgagttgtccagtattggtgtgattatacttctggagtgcctcacaaatgcgaagcaactccttgatgtgctatctattgcagacaatcatctagggagttctgtggcagctgcattggccagattcttgggttcacatgtacgggctttaaatgctacagatatcggcttgggaacagtaggcttccaaatacttgaggaaacattgccaacagaagtagctctttcccacatcaacatcagaatcgtggtgggatcagagcagcatattttgtttccagattaatatgtcgagcaccagaccttgtctcagtcaatgcagcagggaaccttttaccacctgaatcattggaagtcatctgtaactccttgaagcaagggacttgtaatttggagcgagtggacctgactggcaacatgcatttatcaagcaatatttttcctgcattccttgaattcaagaagcatggaaagccaattctggtagtaccaccaaacttgagcacttctgctccatatgatgatgacccatgactactatgtaccgtataagccctagtgctgctcaagtcacttcagttggaactaaataaatagtgatagtatttttttggatcattcccaagaatcctaaccactagatcaaaacacaacacaaattgtacatctgtttagattcgacacggctttcgtcggtgaagctttgcgctagggcagcgacggtcgggaaagcgagcttgatgtcgacggtggactttctgttgctgacagacttccctctagatcggttaaggtttgaggtggagatcgaaaatgattgtgaatcttgtacctttaggtgtcggcctccacctctttatttatagggctacgcaacagatgctcaacaaccttgatgctctcgatcagggcgtgaggtcaggggtctagttttcggttgggtcaagttgggtcaactagtggagatcaattctaacattttcccctttaatctcattttataccttcagctttatacctttaatttttttgatattccattatagataagtgcatagagcatgtttcatcgtcacgattaatcaccgatagacttagcaactacagtacatatctctatcctgaaatagattctttaactttgggccttttattgttcggaaa

SEQ ID NO: 9515 - DNA, 2312 bp, Zea Mays
atgaagggcggcggcggcacgacccgcacacggaagaagaacgacgacagcggactgctgaagaatggcgacacgatgcagacgacgcgccggcggtccgcgacggcggctgcagcaggggagatccgggacgccgtgacggaggatgggggagatgcttggaaacgccatggtgaaacgcttctgttcatcgacgtggaatctcgacctgcacaagtacgagcaaacctcccccaaatgccaaaaggaactaacaagaccgaaatcaggggcaattacctccatccaccaagttgctcaagctgttcagcgtcatcacccgcacaggattccctgctttctgtcgagccgttgccagagaagcagcctcgctgccatgttcgtcaggaaccagagaaaataaaaaacaacgattttaccatctttgccaaaaagaagttaatggtgcatgtttgcttctgagctggcatgcagagacactgctttctcttgaattcatccattgtcagctttatcctaccgtcatggataaaatttgcatgagtgtgtacctgaagggatctcaaagccatggaatccaacaatttagtattaagtcgtcacaaatctgtgaaaccaagcctctgaccatctcttctggtctgttcaaaattttgtcatctggcaagtcgttgcacctgctgtcacttcgtgatattaagatgcagtcaccatttgctcggatgattattcacactcttctcgagtcgtcatgtgatttacacacacttgagatatcagaaaacaatgtgggttgacatgaaaaatatattcttaatttccttttacttattttctatctggtaaattggttgttttttgtagattgctggctggctttcggaattgaacaaatgttctacaaacttattagcgctgaaatcagatatttttatgaactccctgtctgttcttaacctgagggaaaataatttgcaaaaggatgatgttgtagatcttcacaaaattctaataaaaatgcctaacttaagagatttagatataagtggcaatccagtcatggatgaaggtatcagatcattgatccctttcatttcatggtctattcaaaaggaaaatccacttctgagattaacagttgagaactgtgagttgtccagtattggtgtgattatacttctggagtgcctcacaaatgcgaagcaactccttgatgtgctatctattgcagacaatcatctagggagttctgtggcagctgcattggccagattcttgggttcacatgtacgggctttaaatgctacagatatcggcttgggaacagtaggcttccaaatacttgaggaaacattgccaacagaagtagctctttcccacatcaacatcagaatcgtggtgggatcagagcagcatattttgtttccagattaatatgtcgagcaccagaccttgtctcagtcaatgcagcagggaaccttttaccacctgaatcattggaagtcatctgtaactccttgaagcaagggacttgtaatttggagcgagtggacctgactggcaacatgcatttatcaagcaatatttttcctgcattccttgaattcaagaagcatggaaagccaattctggtagtaccaccaaacttgagcacttctgctccatatgatgatgacccatgactactatgtaccgtataagccctagtgctgctcaagtcacttcagttggaactaaataaatagtgatagtatttttttggatcattcccaagaatcctaaccactagatcaaaacacaacacaaattgtacatctgtttagattcgacacggctttcgtcggtgaagctttgcgctagggcagcgacggtcgggaaagcgagcttgatgtcgacggtggactttctgttgctgacagacttccctctagatcggttaaggtttgaggtggagatcgaaaatgattgtgaatcttgtacctttaggtgtcggcctccacctctttatttatagggctacgcaacagatgctcaacaaccttgatgctctcgatcagggcgtgaggtcaggggtctagttttcggttgggtcaagttgggtcaactagtggagatcaattctaacattttcccctttaatctcattttataccttcagctttatacctttaatttttttgatattccattatagataagtgcatagagcatgtttcatcgtcacgattaatcaccgatagacttagcaactacagtacatatctctatcctgaaatagattctttaactttgggccttttattgttcggaaa

SEQ ID NO: 9516 - DNA, 3218 bp, Zea Mays
gtggcgaccggcacatcaacatcagagagagggtggaacagacagagaaagagggactgtggtgtgcacatggaggagctctccaacaaggctctggcaccaagcttgctttcgctgtgcctggatgcggtagctgatcgtctcatcagcgacaacgccgccgcaggcggcggcgtgggccgaacgggttcgtcaggagggtgcagcggcggcggcggtctcgccggattctcggaagatgatggaggggaggcagacgaggaccgcctgcatccacaggagttggcggaggggcttccctgggagcttctccatcggctggcgtcccggctcccgcctgtcgtacttgagtcactccatcacgctgcacatgcccgatactgttctgctgaaactacttctggacttggagtgcaagatggagaaagacgtggggtgaaacgttcaaggtgtgaagatttcaacagcacttggcagttgttgttcaaacttcgctggcccctgggtggtaatactggacataataatttggtcactgtggattggcagcaaaagtattgggaaaagcatttacaagagtgtttaaatgaagctgcagaacatgcttttcttccttttttttgtgggagtattggtgagctgagtatatcagctaaaatcatgaattccatctaccagagcatgggcacatctcaacaacattcaagattagcatatcaatgcagcaaatttggttgctatgtgaggagcttgagactgcaaggtgttctttgcactgcagaaacttatgtcttgttgcaacaatgcaagctggaaagattaatgttcataagaattatatcagacctagaggttaatggtgcatgtttgcttctgagctggcatgcagagacactgctttctcttgaattcatccattgtcagctttatcctaccgtcatggataaaatttgcatgagtgtgtacctgaagggatctcaaagccatggaatccaacaatttagtattaagtcgtcacaaatctgtgaaaccaagcctctgaccatctcttctggtctgttcaaaattttgtcatctggcaagtaagctgcatgcccttcaatattcacaattgaaatattatggattgaaaaacaaatgaaccatacttttagtttattttttctacttctacagaagcatcccattagtattaatcacggggtattgatcatttatgtgtttctgaatagttttacttatatgcatttgtcatatcgatactttttttttgggaaaacgcaggagaactgcgcctcaatatattaagaagaagagataaatccagatcaaagagatctggacaaattacaaggcctcctcatgggggccagaaacacagcaaactgaaaaaatccatcaaactaaacaactccctagtctccaggaattagggcagcaaggtatgaaagacccttagccccagccatctcccaagactgcctctcctccctggctaaattaatggacagatctaaactaggagtacaaccatcaaaaacacaactattaccatcaaagacacaactgttaagtcatatcgatactttatagtccatttcaatgtgaaacatttaaacaccgttcaatccttacaattgttcaggtcgttgcacctgctgtcacttcgtgatattaagatgcagtcaccatttgctcggatgattattcacactcttctcgagtcgtcatgtgatttacacacacttgagatatcagaaaacaatattgctggctggctttcggaattgaacaaatgttctacaaacttattagcgctgaaatcagatatttttatgaactccctgtctgttcttaacctgagggaaaataatttgcaaaaggatgatgttgtagatcttcacaaaattctaataaaaatgcctaacttaagagatttagatataagtggcaatccagtcatggatgaaggtatcagatcattgatccctttcatttcatggtctattcaaaaggaaaatccacttctgagattaacagttgagaactgtgagttgtccagtattggtgtgattatacttctggagtgcctcacaaatgcgaagcaactccttgatgtgctatctattgcagacaatcatctagggagttctgtggcagctgcattggccagattcttgggttcacatgtacgggctttaaatgctacagatatcggcttgggaacagtaggcttccaaatacttgaggaaacattgccaacagaagtagctctttcccacatcaacatcagtaagaatcgtggtgggatcagagcagcatattttgtttccagattaatatgtcgagcaccagaccttgtctcagtcaatgcagcagggaaccttttaccacctgaatcattggaagtcatctgtaactccttgaagcaagggacttgtaatttggagcgagtggacctgactggcaacatgcatttatcaagcaatatttttcctgcattccttgaattcaagaagcatggaaagccaattctggtagtaccaccaaacttgagcacttctgctccatatgatgatgacccatgactactatgtaccgtataagccctagtgctgctcaagtcacttcagttggaactaaataaatagtgatagtatttttttggatcattcccaagaatcctaaccactagatcaaaacacaacacaaattgtacatctgtttagattcgacacggctttcgtcggtgaagctttgcgctagggcagcgacggtcgggaaagcgagcttgatgtcgacggtggactttctgttgctgacagacttccctctagatcggttaaggtttgaggtggagatcgaaaatgattgtgaatcttgtacctttaggtgtcggcctccacctctttatttatagggctacgcaacagatgctcaacaaccttgatgctctcgatcagggcgtgaggtcaggggtctagttttcggttgggtcaagttgggtcaactagtggagatcaattctaacattttcccctttaatctcattttataccttcagctttatacctttaatttttttgatattccattatagataagtgcatagagcatgtttcatcgtcacgattaatcaccgatagacttagcaactacagtacatatctctatcctgaaatagattctttaactttgggccttttattgttcggaaa

SEQ ID NO: 9517 - DNA, 1187 bp, Zea Mays
acaggacattgatcgccagcttttgattgtgggtgaccacaacatgcgtagcttcttggagcgtttatctaggcgcctacgtggagctgctgctcgctgtggctgcaggaccaatgttgcacattacgttcatgtaccgttgtatagccacacaacaatgccatctataagattggacgttggcttggactatgatcagaatgagatcagaccttcacaggttcaggggccttgtcaaaaagccatacgatggtacttgaacggtccacgtagattgtcaaaaaaaaatttatgtgtgatatccggctacagagcagctcctagagagatctacagcttagctacagcatgtcaagttgctggaaacgtccatggactcattaaaaaatacgaatagcggaagagccgcttgtgtttcgtccttgggctcattaaaaaaagagccgcttgtgtttcttcatgtacacaacttggtgtaaaggggctaaagttttagaattatgatgcacatgaaatcttctgagaactaactgtaacatgttaagattctgaagtttttaggaggaaaggctttaggaggaaaggctttatattactatatatacgcttgtgcaaagcaaggaagggcggagatatctcgcatgatctggaagccgccgccgtcgaatgaaagcatcacaaatggccacttggagacaccgacaccgtcgtgcacagaggtggcgcagaacgacgctgcaagggtgccgcgcggggcacacacgaaggcagtgacggatggggagggcaggcacgaggaagtgaagccggaactggatgggacgcggcgccagagtttgaggatgcggcggaggagcttgagcgacgtcactgcaaggtccggcgagcaacaagcctggtggcggtggcggcggcaggacgaggaaaagcgcgagagcgcaagagaagacgcgaaggcggcgagacgacgacaggagcatgtggtggcgagcggcgtgaggagggtgaggatgcacagcagcacatcctccgctgtgcgttttagacacgaggaagggtctagactctataggaagctgcttcagcagtccaccgtcctgcttaaaccgccccttattttagataccaagaaaaaatggagcggtcatgttgattttttatgtctatttcgaattgacaaatggtag

SEQ ID NO: 9518 - DNA, 1671 bp, Zea Mays
ataatgtccttgttaaactttataagcatcaaaccttcctgcaagggcatgatgaagcggaatttacaatttctagtctggaagaaactttgattgaagttaacttgattcttgacatattgtttcttactttttatgataacttctcaagatgtaatggtagacagtggataactttgtgttcaatttttaaggacattctatgtggttcttatggtgtcgggaaatttgttgcatctgttgaggcaaagaattcatttcattatgctaaagctcagctacttctcatccttattgaaactttggactttgagaatctcctccggatgattcatgatgaagttcctctgagtggagggtgttctgcattttctgtcggtgatattctggagatggatgttgaaatatcaaaattgcctgaattttcattggtagaatcaggaccacttatactggcttgggcagttttcctttgcctagttctgtctcttccagaaagtaacaccaacttggaaattgatcatacatcctatgcccgacgggcctttgagtttgcgccattcaattatttactaggagttctttgttcaagcatcttcagggagtcagatggtcctgtttctggttatcggggtatattgcggacattcatttcagcattcatcgcttcatatgaggtatcttatcagaaagaacacagttcctttgacatgatttcgagtattttatgtgaagtttatgatggagaggaatctctctgtatgcaattttgggataaagatagctttgttgatggtcctatcagatctgttcttcatatgctggaggaggagtatccttttcagatatctgaactgatacgtttcttatcagcagtttgccatgggacctggcctgctaattgtgtatataattatcttgagaggatgaatggagttacaacaatctataccatcccttgtgttgctgatggtgttggttatggccatcaaattgaaagtcatcatccagtcagcattcctagtattgaaggcattacaattccacaaggaacccatggctacattttgaaagttcttcaagaggataccacattagttcgctgggagttcccgcattctggggtatcctttttgctcataactctggcgcaagagctccattcatgcaattacaagaaggcatgtgatatcataggtctactttatcggatggtgtcgtcaaataaggacctgtgcttcgctttgatgcatgttgacaagtcactggctgttcaaacatcaaataacttaggacaaattgaaaagcatgtcaggattgatattgctaaggtattttgcaattccattttcaaatatgtgcgagatgttaataatgctgacatattgtccaaaacctttggtctactagcagaaatgatgaaatgcgctccatatcacgtgtttgatgcggcgttcgagtgcaacatcttcacttcacaattaagtagtccatcaagtgattggttactttctggtgccctagctagaatgctttttgctgcctatgaaggaaatggagattgttcttcgcttacatcttcagtttctgacccctggatggctcgatatatatgttttgaaacatagcggagctcttagagaggatgttgtacactcaaggcttaaataa

SEQ ID NO: 9519 - DNA, 1530 bp, Zea Mays
atgaccaccggccacatgaaccccaactacactttgtcaatgatcatgccgctagtaacaaagaccttcaacctattgtcgatgctcgagggcacaaaactgaagcgtacaatggtggggaagatcaagaaacaatgttgggctttgagggaccttgttgctagtgtgaaggacaagacaaaggctcatgtgcgtcgcgtcgattcctggtcttcgagaggagcggaggaggagggcggcgagtgcggaggagaggcgagttcagctgtagcgtttcgcttcttgcccgtggcggcggcggtgccacctcgaacgctgctccctgttctggggcttactgcggatcctgatctgagcatcattcagagaggaagaaatatgtttaggagaaagcatggcgctgatgtcaactcagatgatgctgagcaaagagaagcaaagattagtgaactgaaagctgctcttgggactttgtctgcccgtggcgagaagtactgcagtgaagcatgcttgagaagatatctggaagcccgtaactggaatgttgctaagtcgagaaaaatgctggaagaaagtctcaagtggagggcagcttacaagccagaggatattcgttgggtaaaatgtacagggcaagtttccgagacagggagggcagaactgttgttgtcatgaaacctacaaaacaaaatacttcatcccatgaagggcagatacggttcctagtatatactttggagaatgcaatcttcagcctgcctgaaggccaagaaaaaatggtcatcaagattttcctcgatccaaaatcggtcgagaaggtgaacttcgtgtaccagaaggatgaggagagcatgaaggtcatgtacaaatacatcgatccggaagtccttcctgtagagtttggggggaagagcaatgtggtgtacaaccacgaggagtactccgagttaatgatacaagatgacatcaaaacagcaagcttttgggcagttgatgcgaaaactaaccatgctaaccctgccatcaatgggaccttggttcctgaggttgcgccacagtcgtcgtcgctggctgctaaagctagttgaagagtatctgcattctctgagaaaattgagaagccgaagactaatggaaccttgagagaaacatatgaaataagaaacatggtatactcgttcatcctcaagagttgtttcagtactggaagtttattcagcacacaataagctactagagaatgtcaccatgtgtgatttgatgcccaaaagagatggtttacaaggtacagccaagtttttgtacttgaattaattactatatgtcagtgattatcacatggataagtaactagcacaagcttaaccgtttacttttctcttattccttttacgatatactttgtcttctcgctaatcaatcgagtgtttctttcgatgatttaaaggttttgagctgtcctagtgctaataactctgcatgaaacagcaagcgtctcctcatgaaatgtcatagaaaaaactctgcaac

SEQ ID NO: 9520 - DNA, 2514 bp, Zea Mays
ccctcccccgccaaaatcgcaacaagaatgtccacaagccacagccttgtcttgtcttctgtatctacatcctctcgcaattccccatcgtcttctacccttctgtcctccgatccccaccctccggttaactcctcaccaagaaaaaggaaccggccgtcctcgttcctgtcgtcgctgttctttcctcgccattaccggcgtataaaaccagccctcggcctgatcgcacagcatccggccaagcgggagtagtccctgtcgtctgtccaccaccctctgcgagtacgtctcctcctcccgtctgtctctctctgtgtgtcggtctgccgttcccgccgccgccgccgcagatgggcctgttcagctcgccggccaaggtgtacaagccggccgccgacgtggacctcggcccaggcagcgacgagctctacatcagccccaatgtcaaagctcctcgggtcgccgggctcctggtgaagatcttcgtgtggatcctggagatgcccatcgtcgggcagatcgtgctctacatcctgaagaaggacaacctcatcaacaagctggtgtccgacgccgacatcccggagccgccgctgttcacggcatcgcacagctgggaagacaccccggagcagagcgtgcggctgaccaagcccgacctgtcggcggcggagcgggtccaggaggccgtgggctgcctcccggcgcggctggaggccgcgctggccgccgacgcgcgcggcatcaggcgctggaccgtccgcgacttctccgacgcgtacaggtccggcgaggtgacgcctgtccaggtggcggcgaggttcctcgcggcggtgagggagagctcgggccctggcgtgagcaatatggccttcttcatcagctgcgaccccgacgacgtcatgaggcaggccgaggaatccaccctcaggtaccagagaggggcgccgctgtccgcgctggacggcgtgctggtgggcgtgaaggacgagatcgactgcctgccgtacccgaccacgggcgggacgcggtggctgggcgcggcgcggcgctgcgaggccgacgccgcgtgcgtcgcgcagctgcgcgcctgcggggccgtcctcgccggcaaggccaacatgcacgagctcggcgccggcaccagcggcatcaacccgcaccatgggtcgacgaggaacccgtacaacgccagcacgatcgccgggggctcctccagcggctccgccgccatcgtgtgcgccggcctctgccccgtcgcgctcggcgtcgacggaggcggctccgtccggatgccggcggcgctgtgcggcgtcgtcgggttcaagcccaccgccgggcgcctctccaacgccggcgtcctcccgctcaactggacggtcgggatgccggggatcctggcggggacggtcgaggacgcgctcatcgcctactcggcgatcgtcgaccagtcccagccgtcctacttgcggccggaactgaatcttcctcagctcggctccacactctccatcggcaacatcaagctcgccagatacggaaagtggttcaatgacagcgccgaggacatcaggagctgctgcgacaaggcgctgcaggcgctgcgcgcgaactacggctggcagaccgtggacgtgaccatcccggaggtggaggagatgcggctggcgcactacgtcaccatcggctccgagtgcacgacgtcgctcgccaagtacctcgacaagctcaagaggtccgagatcggctgggacgcgagggtggcgctcagcgtctacggctccttcagcagcagggcgtacctgaacgcgcagcggctccggaaccgccagatgtacttccacaagcagatcttcaaggccgcggacgtcatcgtctcgccgatgaccggtgtgactgcgtacccgctgcaagacgacgcgctcagcaccggggagctcgactacataaacggagccgcgctggtccggtactccatagccggcaacttcctcggcctgccggccatcaccgtcacggtcggctacgacaggggcggcctccccatcggcctccagttcatcggcaggccgtgggccgaggccaccctcctccacgtggccttcgccacgcagcaggcgtgcgccaaggggtacaagaagccgccggtgttctacgacctcctcggcaagcaacaggactgaggtcagcgacgcgccgccgccgccggcggcgagcgagcgaggatccaccgtatatgtatccgtgggggtcgatcggaggagaagagacgtatagcagcaggacaattgttgtcatgtataccttcattctcgaatcattatcgagtatttgtcgttgactactagttcattcttgaactaaaacacggtaaataaaaaataattgaggtcgttcataatctgagaagagagaaagaaatttcactcactagcggtacatcatcagactcggcggcacaaaatcctgtccggatacatattgttgtaacaattacgcagtaaagcttct

SEQ ID NO: 9521 - DNA, 1195 bp, Zea Mays
gtttgccaagactttgattcatatgtaggggtggtactggatcacgatccaaatatttcttcatctgcctcggaaccctagctgtggcacgcacccaggttgtcgtcctccccaccgcaccaccaccacggccactgctgcgacgatgacgagggtgaccgtcgatgcctgtctgctgccacctgaccagtacggtcgcgtgcccgtcgacccggatccgtacgcccagctttcgtgacaccgatgcggcacccaaggagggtgcctcgcgggggacccagacctccacctcttcgtcgtcttcaatggctgtgatgtggcgtctctgttgctgcaattgccaagtggatgaaacagatcggtgtgagagtcatgtcaaggccacaaccaacaaaattgacggggtgacgaagggtttgagggattctgctactgcaaaagtcgagccacacgatgatgctccccctatcgatgtcgatgttctatccttggatgatctgataaaaaattgttgactttggttcaagagccttgataggtgaaggtatttatgggacattgtactatgcaactcttggtaatgtaacaaaaatgacagtaaagaaactttactgaaaatgaacccattgtcgagttcttggtcgaggttggtgttgccattgattattgatcacgggggttactaccaaacaatgatgcttacttctgataccaagtctcattggtttcaaggatgacacatgaaaactttgttgacatgttgggggaccgtatcaagcgtaatcttcgcatagtatcctacgaattcgcgaccatgggttctctccatgatgttctacatggaagaaaagtatttcaaggtgctcgacctggcccaacgtttggttggatgcagcgagtgcaaattgttgttgacgctacaaaaggactcgatattttcatgggaaagttcatcagtccattgtccatagggataatagaacaattaatatcatcttgtttgaaggcttcaaggcaaagatagtagacttcagatatggctgtccacttgcacttgaactcacatcaagccttcggatatcatgccgcacaataataatcctttttttaaagtaactatttgtgttacttaactttagttgtgctttctgcttttgcatgtattgtctgattagttttcgattaggacaacaag

SEQ ID NO: 9522 - DNA, 2409 bp, Zea Mays
gcccagacaaggcccacagtcgacggcctcctccacctccgcgcgccgtgtcgtctcagccccacccccgcgcaatgggtaatttcctcgcctgcctccgcctgtgcctgcaagtcgtcaactgcctccgcctgcgcgcggcgggcggcatgggagcagagagtatcccaccttcgccaacgtctccggggcccacaccctccttttcctcgctgactccacgcccccgccggccccgccttcgcctcctcccgctcacgggtgctctgctcgccgaggccacaagcgcgttgttccataccaaggcagagaaaagacggaagggcgtgtggatcgagatcaacaacgacggcgacgacaaccagagcgcgaggagcagcaccgtctccaccgccccaccccgcacgccgccattgccagggctcccccaccccacccccgcacgccatgacctccacaaccccacccccgcgcgccatctcgccagggctcccccacccccgcgcgccgtctctcctgcaccagctctccctgcaatccctccagctctccctgtcgtgtcgcctccacagcgcccaccgaggtcccgctagtgtggcccccgacctcgtcgctcagtgctggcgcgagatcgaggccatcggccccaccacacctcgattcgccaacaccgccgacccgggcgcctcgccctctgccttcgactccaacaccggctcgtcgctcggccacatcgggtgcctatgctcgatgtatcgcgctgcctctctgtcctcattcgttgcgtccgtcctcggcttcctcttccgccttccccgcgatgcctccccgcgtcatcgcccaccagcatcatcgcgcaggcctcgcttgagacagacatggcagtggattgggtgtttggttctctttgcaggcgagtcatcgtcgttgcctcccctttgtcctctcccagcgccagagattagtcgcctctttttcttgtgtaactgaaaatttggggtagaagaggcgcgtttagttttctcagacagtatgacagtggattgggtgtttggcttctctttgcagtagcaattggaggcgaacaggaagacactgtagaggcactctcgcgcgctgttcaacgtagtggcagcagaggtggcatcaaggggcaccgatggcggcaacatgctatcgcagcgtgtggcggagagacagaggtcagacctggcaaacaggacagggaaggggacgtgatctccatgcaagagaacatgtctgccaggacactcacgctctctagctccacgcagcagacaattgtgcggttcgttaagctaccattggttgacaagatcaccgcttggatcttcctggaaaagttattgcgctacagtgcgacgacggccagggccaaggtgctgaaggaggtgaggaacatcgcagtaacgatctccatggagaagggtgcgatggccagaggtaaaaaggaaaacttgatgctgccaggatcgtccatcaagaaggtaccatggtggggtggtggaggggatggccaaacgatctcagaagctggcagggaggtgaaagagattgaggagctagaggagaaggcgtcatttttcagaagctggcacgtctcatggaggggaaatagcacctttgcttgtttggcatacatgagctatatgagggtggcgatcagatttgcttatggttgttggcctactaggatggttgtatggccagtcactgactggaaagctgcaacggactcaagcttctcccagagaacttattctgccattaagctcctgttcttacagctaagctccatggctagggacatgtgcacattggtgagaatggaagcattcactgcacttggtaaaattcaacgagtttctgagggtgttctgctacaatcgctagaaaagaaggtgagaagaactgcctgcaaatcattaggagcgctggcaaagttttctactcagtacacagagaaggccttggacttgttgatggacatgatgaatgatgatacagaagcaatatggctgcaggctctagaagcactatttcgtatggcaacatatggatgtttgagtgtgcaggagaagcacatgcatatggtattaactacgaacatactccgttcacaaatgcatgactggtccttccaaatagataactatcatggatctggaatggttccattggctgacctatgtgttagaagacgaccgtatcctgtgtgactggcaagatttaccatttaaaaactatgcccccctggaaaatgatgttaatgtccacccagtaactttttgttttgtttcctgtcatctcaagatcaaagatcctaagaaacagttcctggtttatgggtctagcagagccagaagtgagcacctacaacccttttaa

SEQ ID NO: 9523 - DNA, 4355 bp, Zea Mays
tcacaacccagagatctcacacccacgaccaccacgagggaaaaaaaacaacaacagaggagagagactagagagagagagagagagagaggagcgttggagtttggaagcagttcctgcgacctgcggccggagccccggggcatattcctcgcccggagatcccgtacccgaccctcccctgataaacagacgcaagcgtcagggagggagggagggacagagagaggtagagagggccggggcgaagggggcaaagatgcgttcttgaggagcctgtgcaggggaggtccaatccagaggccgccattccttttcttttccccccaacctctgcaggctcttcagatccagcaatccggcttgtttcttttgctgatactgtgtgtgttcctgaaacttcatggagacttccatatctccaccaggcacatcaaagcagtcagctgtccgcaaaccttctcctggaagctctcttaaggatctgtgccttgtttccaaacaagggtcaatagctgaagtagaatctgctttggccttgttgaaaaaaagtggtgggaacattgatggtagaaatgcatttggtcttagtgccctccaccttgcaacatggagaaatcatctacccattgtgaggcgactcctagatgctggcgctgatccagatgcaagggatggagaatctggctggagtagcctgcatagagcacttcattttggtcacctatgtattgctggtgttcttttacagtttggtgcttccctcgctttggaggacactaagggccgtacacctgttgaccttatctcctgtccagtatcacaggccaatggagattttccagatgcagttgcaacggaagtcttcagttggggaagtgggacaaattatcagctgggaactggcaacgcccacatacaaaaactaccatgcaaagtagaagctttgcatggatcatatatcaaaacagttgctgcatcaaagtttcacagtgtagcagttagttctaatggtgaactatacacatggggatttggtcgaggtggtcgtcttggtcatccagatattcacagtggacagacaactgctgtgattacccctcgccaggtgacagtaggattaggccgtaaacgagttaatgctgtggctgcagccaaacatcatactgtgattgctacagagctgggggaattgtttacctggggatcaaatagagagggtcagcttgggtacccttctgttgatacccaaccaacaccaaggcgtgttggttcgctcaagcaaaggataatttcagtagctgctgcaaacaagcactccgctgcagttgctgatactggcgaagtattcacctggggttgcaataaggagggccaactaggatatggcacttcaaactcagcatcaaactgtatcccaagaatggtggagtacttgaaaggaaaagtacttagaggtgtttctgcagcaaagtatcatacaatagtgttaggagctgatggagaggtgttcacttggggccatcgccttgtcaccccacggcgtgtcgtagtagctcgatgccttaagaagggtggaaatacaaatctgaagtttcatcgtatggaacgacttcaagtgatttcagtggctgctggaacaacgcacaatactgctttaacagctgatggtgctcttttctactgggtttcatcagatcctgatctaaaatgccagcagatattttcaatgtgtggaaggaatattgtgaacatctcggctggaaagtactggaccgctgtggctacatcaactggtgatgttttcatgtgggatgcaaagaaacgtaaggacgaaacgccaattttcactcgggtgcatggtgttaagcgagcaacatttgtttgtgttggtgaaacgcacatgcttgtgctctcaagtatataccatcctgagtatccacccaagcctaaaagccaaggcttaaaatccatgttagaatggaacggtggaacagaagagctgggtgaagatatcctgtttgatgatgttcagcccaacagtggtttatcaggaagcagtggtgaaatgagcaaaggtgtgcctagcttgaaaagcctctgtgagaaggttgcagttgagtatttattggagccaaaaaactcaatacagcttcttgaaattgctgattccttggaagctaaggagctcaagaagcattgtgaggatttagctattcgcaacctcgattacattttcacagtgggagcttcttcaattatgaatgcttcttctgaaattcttgtgaacttagagaaattgctagatgagaaatcctcagagccttggagtcagcaccgtcttcccacaatgacagctacctatcctgctgtcattgacagtgatgtagaggaagatgaagcaagagaattccccaagacccgtaaatgtgggaaatctgcatcaaggccatctgcgatgtctagtgatgacagcttccttcagaaagactgcaccgctgaacaagccgtctctaagcagatcagagcacttcgcaagaagctgcaacagattgagattctcgaggctaaacaacttgcaggtcatcagcttgacagtcagcaggtagcgaagctcgagtctagggctgcccttgaaggtgaacttgctgaacttggcattccctcagagatatactcaacttcctctgcttgtccagcagaaggtaggacaaacagaaaacctgaggtttctaagaaacagaagagaaagaacaagcagtcaacacagaccccgtcagtgaaaaatgagcctgggcaacaaatccccattacggaacttcaagttctacaagtcaatgtctctgctgaaaagcaggaggcgtatgccgctgatccaattaaacctatggaggctgccgcgttcagcaacacaaaggacaccgcttctccaccggagaagaaaccttcccaaccaactccatcaaagaagaagaacagaaaaggcggcctgtcgctgttcctgagcggcgctctcgacgacaccccaaaaccaagcctccctgcccccgctgtgcctgccacaccgaagcccgaaggacccgcctggggcggcgtgaagataaccaagggacccgcttcgcttcgagacatccagaccgagcagagcagaacaaacgagcccgcgtcggccaaggcgaaggaccgccacgagaactcgccggacagcgccggccgcgcgacaaggctctcctcgttcatccccgacgcgcgttccagcccagtagccgtcgtggcgcctgctcgcgcagcggcggcgccttcttccgaaggtgacaggagcacgccgccgtggtcgtcctctgccacctcgcccaacgtgtcgcagccttcgctcagggacatacaacagatgcagcagaggcaccatggcggcgtctcccacagcccgaaaacccagacatcgggcttctgtataccgccccacggcggagcgccagaggccgctggcggtggcggcgtgaaggacaacgtgcccaaccggtggttcaggccggagaccgacgccccgtcctccatccgctccatccagatcgaggagcaggctatgaaggacttcaggcgcttctacagcagcgtgaggatcgtcaagccgcaggtctagtagcactggcggcggcggcggtggcggccttggcggagagtgactgatggcacaacaaccccctttaggctcaccctcccatttgacactggctcgttgtacattcgagtgtacagttggttctgttcgccataggttccttgagctgaacaataaacaaacaccctttgctgctgttgctgctgctttcgcagtgagtggtctcgtttagttgtaacagaagattgtacaggccatgtgagatcaccaccccccggctttggcttaacagtttaacttgagccaatgcttctttttttttttttggcgccaaaatgtctttggttgttccaagcagaggtcataaaaactgtgtggtgcgtctgcacccaggtacccaacatttttagcttcgatcggacatgatctcactttggggctgtagcctagtgcttctatatgctctcgatctgcttgactggtcggtgtgagaatttggtagatagcggcatacttgtgctgttgtgcaatagtagcactatgcatggtcatctgctaagatcgatggcagctcgtaattaatggagctagtctgcctggttcagtagcttgtcgcctatggctatcggtaataaggccggttgcaatatttttttgtttggtgagcactagctagccatgaggcgatcaaatgtcatgtgctcccatgaaccctgatgacatgtatcttcac

SEQ ID NO: 9524 - DNA, 6956 bp, Zea Mays
cactcccagcctggcatcttccctctccacgccacacgcacggctccatccttctgtccacgctcgcgccgccagggcgctcgagctcgccgtcgtcatctcgtcgggccgccgcctcgcagcttcgcccgcggctctggtccgcgccccgccaaggcccagccccaagctgccagcggcctccggcgttgctcgccgctcactgcgcgccgtctcgcgctctcgcgccctcgcccagtcctgctctcccttcgtcgctccgcggctccgccggcgtctgggcatccggccttcgggctttggtggcgccccccaccggccaccggcccaccccagcgggcagcggccactgcaactctgcggctctgccaggaacaaggaggaacagtggcgattctgccagggacagggaggagcagtggcagacaacgtccttccttttgtttggcccggggcttcggaattatctggagccgctactgcccccagcgttcggactcccgggtcgcaggcagccacgtctcgtcctggctctgggctcgccgcgctatcgtctcggccattcgctccgacgtccgtattcaatagatttgccctactcgtgaccacgagaatccggcgaggagggagaccgctcgtgcggagtctataatggctgacgggcagcatattcaggcagcatcagaggaagtggattcaatccacttcagcttctatagtgatgatgaaattaagaggatcagcattaaaaagatcaccaagtcggagcgccttgatgccaaaaaccttcctgtgccaggtggattactggaccctgcaatgggacctatcaatgatattgatatctgcaagagttgtggtcagcattctgttcgttgccctggtcacttcggtcatattgagttggcaaaaccattgttcaatcctttgctgtttatgagtctgaaaaaccttctccatgtcacgtgtttccattgtcacaagttccgcctgaacaaggaacaggttgacagatatgtgaatgaacttgaacttttagtaaagggtgatattgtctgtgctaaaaatttggaagactcagtagaagaagcatatctttccaaggaagatgaaaacatgaacaagaccacttcaggtgataactcatcttctgtgaaagacaagaaaacctggacatctatccaattgaaagaggttttgtctattttttccaagataatgaaaaagagacagaagaagtgtgcaaaatgtgacatgaagagcccaacaatctcaagtcctatatttggttggctggtcaaggacacaaaggcttctgctgtaagaacaaatgcaattgctgattttaaactcaagggagatggtgatattcacaactcaggggaaacaggggtttctggtcttgaggaagagtcatcttcacctggaatggtgtctaaagactcaatcaatgaagttagaggtctttctgatgatacaattaaagaattggtagcatcatcaggaaaaaaacatctattgcctacagaggttgaatctattctcaaggacttgtggaaaaatgaagctaggttctgcatgttactttgtgatttccagaagaatatgtcaagtgaaccagaaaagagaaggggctatgaaatgttcttcttgagtagtctccttgtggcaccaaatagattccgcccatcaactagctctagtcttggaattatggaacatcctcaaagtgttctgctaagtaaagtgcaagaatccaatcttgcgctacaacataacaatgcatcttctaaccatatggatgttcttcaaagatggatggatctacaacggagtgtaaatgtgctatatgatagtagcaaaggccttgcaagaagcgagaagaatgctcatggtatacgccagctattggaaaagaaagaaggaattcttcgacaaaagatgatggggaagagggttaattatgcatgccgatctgttatatctccagatccgtacttggctgttaatgaaattggcattcctcctgtttttgcgacacgattgacatatcctgagaaagtaacaccctggaataccaaaaggctccaagaagctataaggaatggtgccgatatacatccaggtgcaacacattacagggacaacaatagcatgtataagttacaggcagtccctgccaaacgccgttccattgctaagatgctacctgcatctagaggatcaatttgtcagccagggagagatcctaattgtgagtttgaaagcaaggttgtatatcggcatcttcaagatggtgacattgtacttgtcaataggcagcctactcttcacaagcccagcatgatggctcattttgttcgggtgttacctggagaaaagacgttacgaatgcactacgccaattgcagcacctacaatgctgattttgacggagatgagatgaatgttcatgttccgcaagatgaaatatctcgtgctgaggccatgaatattgttgacgcaaacaagcaatacattggtcctaggagtggggatgctgtcagaggtctcatacaggaccacattgttggtgctgtactattgacaaaaccagacacattgctaagccgtgaagaatatagtcagcttgtctttgggtcttgtgtgccgtcctcaaattgtggctctcatcaccctgctaaggtgtctgctattgaggattacgatacacttgaacttgtccatcctgctatttggaagccaaggcccttatggacaggaaaacaggttataacaaccatcttgaatcatttaacaaaaggttgtcctccatttactgtggagcagaagggaaaaataccaaaagaatatctgaaagaagatccttccgctcaaaaggaaaaagaagatccttccgctcgaaaagaagctcattctgctaaaaaaggaaaacgagaagatccttccgctcaaaaagaaaaagattcttcagttaataaagaaaaacaagagaagatacaaaaacaaaaacaaaaagatcgttctgaactggtcttatatattcacaataatgagctcataaagggcataatagacaaggcccagtttgggaagtatgggatagttcatacagttcatgaactctatggtgcatatacagctgggatactgctctcgacattcagccgcttatttacactgttcttgcagttgcatgggtttacttgtggggtagatgacctgctactattgccagagaaggataaactgagaagtaaaattcttagtggaagcgaagtgcgtagtaatgaagtccactggaaatttactggagctgacgaagatcataaaggtgatctggtaaaattgcatatggaggttgagaaggctgtaagaagtaacggtgaatcggacacggctaccttggacaatgatatgaaaaatgctctaaatgggataacaaccgacgtcaataaaatattatttcctgatggtctacaaaagccctttcctggaaattgtctctctcttatgactacaactggagctaaaggtggtccggttaacatgaatcaaatatcatcattactaggccagcaagagctagaaggaaagcgtgttccacggatggtttctgggaagactttaccgtgctttccgccatgggatatttcttcaagagctggtggctttatcagtgatcgatttttaactggtctgcgtcctcaagagtattactttcactgtatggcaggcagagaggggttggttgacacagcagtcaaaacatcccgtagtggataccttcagcgttgtcttatcaaatgtctggaatcgttgaaagtctcctatgatcacacggttcgggatgctgatggatcaattgtacagttctgctatggagaagatggagttgatgtgctgaaaactagctttctgaacgagttcaaagaacttgctgataacagaaaagctgtccttgccaagctcggtggctgcagtaaggatcccacattatcaaaatgtaatggatacattactgaactgcctcctaaattgattgataaagcggaagagtttcttaagcattcaaaggaatgctgtcgttacaacattgaggcaaaggaattaaaggagttacttaaagtcaagttcctatccagtcttgtagatcctggtgaggctgttggtgtggttgctgctcagtcaataggagaaccttctacgcagatgacgctcaacacttttcatcttgctggaaggggtgacatgaatgtaactcttggtataccccggctgaaagaaatactgatgactgcatcagataatattaggacgcctgttatgaagtgtcctttgctcgaacatatttctgaggatgatgctaaaatggtggttgcaaagcttaggagggttcgtgtggctgatgtagtggagaaaattgaagtctgcacagttcctttttacaactctaatgggcgtgtttcaaccctgtacaagttacagatgaaactctatccacaagaccagcttgagtcaggtcttactatagatgagtgtcaggcaaccttgagaacagtttttgttgaggcaatggaacatgcaattgaaaagcatctagatctgctatacaaaataaatgaaatccgtgctgttaagatagaagatacagagggctcattattaaatggtgatgaagaatctcaaagtagacatgctgatggaggagacactggtactagtgatgatgacgatcaaaatgataatgatgttgacttgggaactgatgcagaaaagatgaaacggcaagagaaagatgagatggagtatgatgatgatactgaaaccgaggagggaatgggtagcgaatctgaggagagcgatgaggatccagctgagtcaggtgatgattcacaagaggctgacaaagaacacacgatctcgaagtctgagacgacttcagtggatgacctgccatattctgtaaaaaaggggaaaaaatcaaaagatgatcgtggaacagctaaactagaagagaaaaatcaaaatgagggaagattagatgaccagaaacagggtcaaataaagaagcgcaggaaaaagttaaaacatactatccatgttgaatccagtgatttggattttgagattcactatgcctttcatgatgaacctcatattttactagctcagattgccaaaaagatagctaggactattcttgtgaaggcctgcaataacattgatcattgtaagatcgtcaagccaatgcacaaccatacgcgtctagagaccgccggagtgaactttgaagtggtatggaatctcagtgaatacatcagcgtcaatgacatcacatcaaatgatatccatgccatgctgaagacatacggggtggaggccgcacggggcaccatcatcaaggaagtgagcggcgtgtttgaaccctatggcatcaatgttgacatgaggcacctgagcctgatcgcagactttatgaccttggatggcggataccggcctatgaacaggctggggattggccagttcagcacctcgccatttggcaagatgacgttcgagacagcaacaaagttcattgtggatgcagccacacatggggaggcagattttctggagtgcccctcagcgagtgtctgccttgggaagcccccgaaggttgggactgggatctttgggctactgcagaatcttgaattggagcagcccaagaatatctaaaatctgcatttggtgcacgtctggccaagctgccttctgaaggttcacaagttttggtcctgtcagcctttgcacggcagaatgtgctttagtttgttacggtgtggcacgctgcatctgtggtggcttagtggcagcatgccatttcatacgggcatgctgctggaaaaactagcagaacatgtcaaataccagttagtgttctggaattctggattaatttacagcatgatagctagttgtacacatgctttagaatgccgttgttgtccagtgcttgttaagaaagaactgggtcatctttgttgccagggtctcaaaaaacaaccctgcatgacgccaaggacccaggcaccagtgttcgaattatcgacgggcagacatcatatatggatgcgatattctattgacacaatctcaggttgactgctcacctatgtactaaatctgcctaccctgtgatgtggaaattgaaatactagaagcatttgtaggacttttaattagaggactcaacagtcacttatcctagtggcttgggaggtttgaaagcactggaatgcttgcgtgtttgaaagagtcggtctttgtggttctttaaaatattggtaacgaaggcttgatgtgcggctggagcaaggaccttgtgtacctgttagtcttgttcagttatttctatgtctcgtggaagagattaaaaaattgtgaaggattttgatttgctatggattgaaatccatgtaaatctccttcaatctatatagattttgatgaaaccgaataaacccttatagagggcatgaggtaggctaggaaatcttgttaatctgatagtagaggtgtacatttaggctgtgtcttgtgggctgactcgaagcacgaaaaaagcacggcccaagacagtaataatttatgcactaaggcaactaaggaagcatggaagaactacccaacgcctgaattggagttagttgttgtagtgcatgctctaaaatttttgaggcactatccatatgtttggttccctataagtcgagacaagcatgtatgagcttagctagtattggtagaaaaagagtgagttcatgcagattcttttgtttggttgcttgtataggctcgtgcagaatagacatagactttgttatgttggttgcactgaaacgtgtattatagaagggtgtataaatagatcttcaaatattatatattataatatattataagtggtt

SEQ ID NO: 9525 - DNA, 2160 bp, Zea Mays
gacaaatgtacttttaagttgttctgaaggaaccttgagattcaaagttagtaggtacggtgaaggctattttgtaggttgtgatcgacatccaaaatgcaagtacattgctcgctcactgtcacagcaagaagatgaaactgaacccatagaagaaaatgcaaaatcttttgaacccaggttacttggtgtcatgcctgattctgatcaaaaggtgtttttgaaacaagggccatatggctactatgttcaagttggagaggacaaaaaaggtctgtttccaaaaagggtttccctttccaaggtcaaagatatagactctgttactctagaagatgcaattgagcttttgcaatatcccaaaatcctgggaaaacatcctgaagatgataatcttgtacttataacacattctaaggttggatacaacatcaagcacaggagatttattgctcaagtgccaaagaacatggacccaaagaagatgacacttgagcgtgcactcaagcttctgagtagtaaaagtgtcagacggattggtcgtctaaaggggaaggtcgaaaagaaggaacccattgaatggcattagctgagcctgcctgcactcgtgtgtgcaaaaaaaaaaaaaaaattcagagagaagtcaacattcatagcatgcagaggttcagcctttcgtgtgtttaactgcttatgatgagagcggagaagggggccccatgtgtgacaaagaacaagtgccaagggaatgcacaaccagacatattcgggtcatatctttgatttcatatttttcctttagtcatcaacatcataagctgcattgaacgcgcggacacagaataccagactataaaattctgagcttaacaaagatgagagggtggtttcatcacctattttacataatcgctgcatttcctaattactttcacattttgtactagagataaatgcatcttttaccacaggaaacccattttagttgtgaccgtcgtgtaggttatgtactcatgtgtaagaattgtatatgctacttcacagctgaaattccatctgttttgcactccttttttttaatttgttttcaccggttgatcccgaataacggctagtcttagtaatgctgtcgcgggaatttttttttttacttttgaatacctttacgaacatcgtaagtttttcaccattcaaccgattggatccacttttaaatgtctttagttcagtagcactacttagttttgtctatgaaaaaatgtctcaccaataagtactggagagatgtaaaagtaaaactgagctgtggtataggtactagaagacgtccacgttctttcactcatgcatagcatagcctgttggtcaaagtaaatatcagacagagtaaaatacatccagacagcaaacttcaatttcagacattcctgttctagctcctggttcgttgacacactaaagcacacgttcacctctccattctcggtcacgcagagacctcagcgccaccacacgctcgccatccacctactcatacctgtagatgaagtcggagttgccgaccatggcattgagcacctgcgagacgaggaagccgctgccggcgatgacggccacgatgagcagcgccgtgacggggttcttgagcagctccactatgggctgcagcaccgtgtacgccacccctgtgctcaccgtcacaacgtacagcgcgtaccgccgcatgttgtcccagaactcctccaccagggggccctctggccccagcgccagggcggggcctggccccgcggacagggccagcgccacggtcacgcccaccgtgatgccgccgaggagcgcccacgtcggcagagcgcacgtcctgccgccgccgccggcctcgttattattgcccgctgcagcgagctcttgacgcaagtggctctcctcctccctagctgctgcgatgctttcgtgaggcgctatggcaaggaggcgttttgcgtgctgctgcggggttggtggttcacaggaggagagcccagctcggacgacggcggtgaggccatggccgcgtccgggagacagccgatgtaggtggtggaggagagagagctggttcatcttgtgcaggcgccgtcgcttggtggttgttttttgtgataaggcttctccaac

SEQ ID NO: 9526 - DNA, 2592 bp, Zea Mays
atgcggccgcggccctcccgcttcctccagctactccttgtcgttgtgatcgcctgcgccgttccgggggtgagatgctccgaccggcggtttccgcacctcgaccgcgtccgcgagctccaacgccgggagggctcgtcatcggccgagcaggaggccgctgcgaggggacttctggcgcgcctcctaccgtcacactctaccagctttgagttcagagtcatctccacctccacggagctatgtggtgggaagacatgtttcgtcatcaacaaccacccgttgtttgatggagaagggactccagaaatattgatacttggagcaagtggggtggaaatttctgctggctttcattggtacttgaaacactattgtgcagcacatatatcttgggataaaaccggtggtgcacaactatcaaccattccgcgtcctgggtcactacctcgtgttcctgatggtggtgtactgattcaaagacccattgactggagctactaccagaatgcagttacatccagctattcttttgcttggtgggattgggaccgttgggagaaggaaattgactggatggctcttcaaggaataaatttgcctcttgctttcactgggcaagagtctatatggcagaggatttttgagaggtacaacattagcaaatcagatctggatgatttctttggtgggccagcctttcttgcatggtctcgaatggctaatatgcatggatggggtggacctctccctcagacttggcttgatgaccaactagttcttcaaaagaaaatcctttctaggatgtactcttttggcatgttcccagttcttccagccttctctggcaacatcccagctgcgttaaagtcaaagttcccttcagctaaagtcactcaccttggaaactggtttacagttgacagcaatccaaggtggtgctgcacatatcttcttgatgcatctgatcctttatttgtagaaattgggaagatgtttatagaagagcaaatcagagaatatggtaggacaagtcacatctacaactggtgcatgctccacaatttcgctgcagattttgaaatgtatggtgttttagatgctttggcttctgggcctattgatgctcgattaagtgataactccacaatggttggagttggtatgtctatggaaggtattgagcaaaatcctattgtttatgaccttatgtcagaaatggccttccatcacagacaagttgatcttcaggtttgggtcaagacatatccaacaagaagatatggaaaaccagtgaagggactgcaagatgcttggtggattttgtatcgaactttatataactgcacagatggtaaaaatgacaaaaatcgggacgtgatagtagccttcccagatgtcgaaccttttgttattgcgacaccagggttgcatgtgaatactagacaaatgtattctacagtaccatcgaagaattacatacggaaggacgtctctagtgatgcatatgaacatcctcatctatggtatgatactaatgctgttattcatgccctggaactttttcttcaacatggagatgaagtatctgacagcaacaccttcaggtatgatcttgtggatttgactcgtcaagttctggctaaatatgctaatgacgtttttctaaagatcatcgagagctataaatcaaacaacatgaatcaagtcaccatcctctgccagcactttctcagcctcgtaaatgaccttgacacattactatcctctcatgagggttttctgcttggcccttggttggaaagtgccaagggccttgcacgaaacagtgagcaagaaatacagtatgaatggaatgctagaacacaaattacaatgtggtttgacaacactgagacaaaagcaagtttattgcgcgactatgcaaacaagtactggagcggcctgctgcaagattactatgggccaagggccgccatctacttcaagcacttgttattaagcatggagaacaatgcacctttcgccctcaaagaatggaggagggaatggatcagtctcaccaacaactggcagagcgataggaaggtgttttcaaccacggctacaggagaccctctgaacatatcgcagtcgctttacacgaagtacttgagcaacgctgatctacttgggctagtagaaggtacaggctctccttggaagtctgcaagcttataagtaggtgatgcgtgcaatcatgggtcatttcagattcgcaattacttttttttctctaatgtttttcctcaaactcataaatatcgtttggctgcgacatggttgctacgaatcagttctgtgtgaactgtgaagtactgaagtctttctgtatagcagtagaaggacgggtttctttcctttttccagtgttccttgccgtaaatttttcagttctgtatgtatccccatttttccatgaccatgcacagtaaagtagcccttaggagaatggtcatggaaaaattcggcctagttcagggtgtcggaactttactgtgcgtctgtacctgagaatcgtgctgctttctgtgaaatccatgtctttcaaac

SEQ ID NO: 9527 - DNA, 2860 bp, Zea Mays
atgcggccgcggccctcccgcttcctccagctactccttgtcgttgtgatcgcctgcgccgttccgggggtgagatgctccgaccggcggtttccgcacctcgaccgcgtccgcgagctccaacgccgggagggctcgtcatcggccgagcaggaggccgctgcgaggggacttctggcgcgcctcctaccgtcacactctaccagctttgagttcagagtcatctccacctccacggagctatgtggtgggaagacatgtttcgtcatcaacaaccacccgttgtttgatggagaagggactccagaaatattgatacttggagcaagtggggtggaaatttctgctggctttcattggtacttgaaacactattgtgcagcacatatatcttgggataaaaccggtggtgcacaactatcaaccattccgcgtcctgggtcactacctcgtgttcctgatggtggtgtactgattcaaagacccattgactggagctactaccagaatgcagttacatccagctattcttttgcttggtgggattgggaccgttgggagaaggaaattgactggatggctcttcaaggaataaatttgcctcttgctttcactgggcaagagtctatatggcagaggatttttgagaggtacaacattagcaaatcagatctggatgatttctttggtgggccagcctttcttgcatggtctcgaatggctaatatgcatggatggggtggacctctccctcagacttggcttgatgaccaactagttcttcaaaagaaaatcctttctaggatgtactcttttggcatgttcccagttcttccagccttctctggcaacatcccagctgcgttaaagtcaaagttcccttcagctaaagtcactcaccttggaaactgttgacagcaatccaaggtggtgctgcacatatcttcttgatgcatctgatcctttatttgtagaaattgggaagatgtttatagaagagcaaatcagagaatatggtaggacaagtcacatctacaactgcgatacttttgatgagaacactcctccattaagtgacccgaattatatatcttcgttgggtgctgcaacgttcaggggtatgcagagcggtgacaacgatgctatttggttgatgcaaggttggctgtttacctatgatcctttctgggaacctccacaaatgaaggcactactgcattctgttcctgttggcaaaatgattgttcttgatctttacgccgaagttaaaccagtgtggataaattctgatcagttatatggtgttccctacatctggtgcatgctccacaatttcgctgcagattttgaaatgtatggtgttttagatgctttggcttctgggcctattgatgctcgattaagtgataactccacaatggttggagttggtatgtctatggaaggtattgagcaaaatcctattgtttatgaccttatgtcagaaatggccttccatcacagacaagttgatcttcaggtttgggtcaagacatatccaacaagaagatatggaaaaccagtgaagggactgcaagatgcttggtggattttgtatcgaactttatataactgcacagatggtaaaaatgacaaaaatcgggacgtgatagtagccttcccagatgtcgaaccttttgttattgcgacaccagggttgcatgtgaatactagacaaatgtattctacagtaccatcgaagaattacatacggaaggacgtctctagtgatgcatatgaacatcctcatctatggtatgatactaatgctgttattcatgccctggaactttttcttcaacatggagatgaagtatctgacagcaacaccttcaggtatgatcttgtggatttgactcgtcaagttctggctaaatatgctaatgacgtttttctaaagatcatcgagagctataaatcaaacaacatgaatcaagtcaccatcctctgccagcactttctcagcctcgtaaatgaccttgacacattactatcctctcatgagggttttctgcttggcccttggttggaaagtgccaagggccttgcacgaaacagtgagcaagaaatacagtatgaatggaatgctagaacacaaattacaatgtggtttgacaacactgagacaaaagcaagtttattgcgcgactatgcaaacaagtactggagcggcctgctgcaagattactatgggccaagggccgccatctacttcaagcacttgttattaagcatggagaacaatgcacctttcgccctcaaagaatggaggagggaatggatcagtctcaccaacaactggcagagcgataggaaggtgttttcaaccacggctacaggagaccctctgaacatatcgcagtcgctttacacgaagtacttgagcaacgctgatctacttgggctagtagaaggtacaggctctccttggaagtctgcaagcttataagtaggtgatgcgtgcaatcatgggtcatttcagattcgcaattacttttttttctctaatgtttttcctcaaactcataaatatcgtttggctgcgacatggttgctacgaatcagttctgtgtgaactgtgaagtactgaagtctttctgtatagcagtagaaggacgggtttctttcctttttccagtgttccttgccgtaaatttttcagttctgtatgtatccccatttttccatgaccatgcacagtaaagtagcccttaggagaatggtcatggaaaaattcggcctagttcagggtgtcggaactttactgtgcgtctgtacctgagaatcgtgctgctttctgtgaaatccatgtctttcaaac

SEQ ID NO: 9528 - DNA, 3630 bp, Zea Mays
ttcgttacggcactggtactgtcttctccttccctcgccccttccctccactcgcgatctcgcgccctgccctcccctcggctccctccgcctctcggacagagggtgagagggtattctaacagcccccatatacaccccaccggcgccggaacctacgacgtcgcaatgccgctccagttagagatcaagaggaagctcgcgcagaggtcggagagggtcaagtccgtggacctgcatcccacggaaccatggatcatgtcaagtctttattctggcagtgtctgcatctggaactaccagactcagacaatggtgaaatcttttgaagtcagtgagttaccagttcgttcggctaaatttattgcacagaagcaatgggttgttgctggtgccgatgacatgttcatccgtgtgtataactataataccatggataaggtcaagttgttcgaagctcatactgattacatcaggtgtgtggctgttcatccgaccctgccatatgtgttgtcatcatcagatgacatgcttataaagctttgggactgggataagggttggatgtgtactcaaatttttgagggccactctcactatgtcatgcaagtcacatttaaccccaaagacacaaatacttttgctagtgcttctcttgatcgtactgtaaagatttggagtcttggttcccctgatcctaatttcacattggatggtcattcaaaaggtgtcaattgtgttgattacttcactggtggtgaccggccatatctaattacaggctctgatgaccaaactgcaaaggtttgggattatcaaacaaagagctgtgttcaaacacttgaaggacatgcacataatgtctctgctgtatgtttccatcctgagcttccaataataatgacaggttcagaggatggaactgttcgcctatggcactccactacttacaggcttgagaatacacttaactatggccttgaacgagtttgggcattaggttacatgaagggctcacgaagagtcgtgattggatatgacgaaggaacaataatgattaagattgggcgtgaagcacctgttgctagtatggatagcagtggtaaaatcatatgggccaaacataacgaagttcaaactgtcaatatcaaggcagttggtgcggatgctgagattgcagatggagaacgtctgccattggctgtgaaggagctaggaagttgcgacctttacccacaaagtttacggcacaatccaaatgggaggtttgttgctgtatgtggagatggagagtacattatctacacagcgctagcatggagaaatagatcctttgggtctgctcttgaaattgtttggtcaactgaaggagagtatgctgcaagggaaagcacatcaaaaataaagatctacagtaaaaactttcaggagaggaaaagtataagaccagcattctctggagaacgtatatatgggggagtattgcttgctatatgtacaaatgatttcatttgtttttatgactgggcagagtgcaggttgatacgtcgaattgacgtgaatgtaaaaaatgtatattgggctgacagtggtgatttggtgacaatagcaagcgattcgtcattctacattttgaagtacaatagggatctagtttcttctcatctagatggaggggcatcagttggcgaggaaggtgttgaagatgcctttgaattgcttcatgagataaatgaacgtgtccgtactgggttatgggtcggagactgttttatatacaataattcttcatggcgcctgaactactgcgttggaggagaggttactacaatgtttcacttggatcggcctatgtatttattaggatatcttgctaaccaaagtcgtgtatatcttattgacaaggaatttaatgtggtgggttatactttactactcagtttgattgagtacaaaacacttgtgatgcgtggggatttggaacatgcgaatattattttaccatccataccaaaggaacaacacaacagtgtggcacatttccttgaatcacgtggcatgttggaggaagcccttgatatagccactgaccctaattacagatttgatctggctgtgcagcttggaagcctcgaagttgcaaaggaaattgctattgaggcacatagtgaatcaaagtggaagcagttgggggaactcgctatgtccactggaaagtaatcgtattccagaagcagcactgatggcacgatcttaccttccaagcaaagtttctgatattgtctcaatatggaaaaaggacctccaaaagaatctctggcagatcctgctgagtacccaaacctgttcgaggactggcagattgctctgaatgtagaagctactgttgctcccaagaggggtgtctacccacctgctgaggagtacatgacttatgcggagaggtctaatgacagccttgtggaagttttcaaaagtatgaatgtggaagaagtaccaagtgataatggagatcctgttcatgaggtcactgaggatgacggagtcgagggaagtatggatgatgttgttgaagttgaacccgatgattcaacagatggcggtgtccttgtgaatgggaatgatggtgaggaacactgggtgcttactcctgaccagcagtagagatatcacgacaacattctgcaccagcagattagttgcctattgtaaaaaagtaagtaccattatgtatacgcacaagtcaagaaaaaattaaattgacaaagaaccgtgctcccatacccttgaataaatctatgttgtatgtaatgttttctaggcctaagtagtatgtaatattcttcatgtttggcgtgtaagggcgagtttgagaaccctatttttcaaagggttttcattttttcaaagaaaattagttcatttaaccttaggaatatagtaatcctttggaaaaatggagttcccaaactagtcctaaaacaaattatctgcccgcatgccatggtagaccgtcaattttcctagtatattttgtggtttaaactttcttctcacagttgtaggtcgccacatgttcagactcgatagtcatgtaaaagaagttcctccccatttgtacaaggcgttgtgcgtggtctagtattgcggttacagaaacagtcttggatggtaattagcatttggtctagataagaaattttgtaattcgattcattttgggtgggcattgtagatttgtggtatgttatagattatctacccttgtatgtttaccacatgatacgatactaacattctttaaggttggaatttgttcaccgacacatgggctgcgacctgcatagcatgtgaaagttgtatttttggttccccagttgtcgataacttgatccttggtttctgccatgtattgtactgccttcttgtaacttattttgccttttttagatgtactgtttttagtatatagtgtatttagatacaatgtataaccagttgtataataaaaactagttaagtgtccgtacgtcgctacgacacataaattatacgttcttttgttcacagacaatgtttgagaagcatttcaagtaatgcattacttatatgcttaatagtaaataccat

SEQ ID NO: 9529 - DNA, 3999 bp, Zea Mays
ctcgtttcctccccgcctctccccctccccggctctaagggctcttctacaccgaagcaccgcacctcccgccatgcactgcatcgccccccgcctgctcctcctcccgctcccgaccgtctcccgccacgcgctatcgccaacccagacgccacctcttcctcccctcctcccctcccgcgcctgtaagttccacctcgcctcggcgcgctcgccgtcccgcgccgccgcttcggtttccggcgacgacgaggatgaggaggttgacgtggatgacgacgaggacgacgagacaaccatccgcaacgtagacgatgaatacgacgacgatttcgaggacggggatgagggagatgagggcgatgaggaggcggtggacgaggagagcggtggtgagtacgaggaagaggcgggggaggacgaggacaagcgggaggataccgcagcgcggaggcgggactcggaggagtataagtcgcggcgggtggcgaagctggtcgccgaggtgcgggagttcggggaggacgtcatcgactacaacgagctcgccgggatctacgacttccccatcgacaagtttcagcgcttggctatacaagcatttttaagaggttcatctgttgtagtttctgcacctacaagtagtgggaaaacattaatagcagaagctgcagcagttgcaacagtagcaagaggaaggcgtctcttctacacaacaccattaaaggcattgtcaaaccagaagttccgtgatttccggaataccttcggtgatcataatgttggccttcttacaggagattctgctatcaacaaagatgctcagatcctaatcatgacaacagagattttacgtaacatgctgtaccaaagtgttggcatgacagcctctgaaggtagattatttcaagttgatgtcattgttttggatgaagtccattatttgagtgatatctcacgtggcactgtttgggaagaaactgtcatatattgtccaaaggaagtccaacttatatgtctgtcagccactgttgcaaatcctgatgaattagctggctggataagtcaggaaactgcggatgtctaactcccaaaacttagcatctccaaagagtgagttctattatgtgaaagggaagaggaggtttagaacaaataaaattgagcaaggtaatagcaggcctttggacatatcgaaacaggttcagttatcaaagcatgaactcagcaatatgcgtcgttcccaagttccactaatacgtgacactttatcacaactatgggaaaatggcatgcttccagctatctggtttatttttagtagaagagggtgtgatgcagctgttgagtaccttgaggattgcagactgttgcatgactgtgaggctagtgaagttgagctggaacttaggaggttcaagatgcaatatcctgatgctattcgagaaagtgctgtgaaaggactcatgcgaggagttgcggcccatcatgctggttgcttgccactgtggaaatcatttattgaagaattatttcaacgtggccttgttaaagtagtttttgcgacagaaacccttgcagctgggattaatatgcctgccaggacggctgtaatttcttctctcagtaaaagaatagatgctgggcgccagctcttaaccccgaatgaactattccagatggcaggtcgtgctggaaggagagggattgatacagttgggcatgctgttcttgttcagactccatatgaagggcctgaagagtgttgtgacatcatctttgccggacttgagccacttgtctcacaattcactgcatcatatgggatggttttgaatcttcttgccggttcaaaagttacacataaacagaaagaatcggatgatgttaaggacaagcattctggaagaaccttagaagaagctcgaaagctagtggagcaaagctttgggaattatgttggtagcaatgtaatggttgctgccaaagaagagactgaaagaataaggcaagaaatacaatacctctcttcagaaattactgatgaatctattgatcgaaaatgcagggaagaattatcagaagaagactatgctgagatttccctcctacagaagagactaaaggaagagaagcagatcagaaatgagctgaaaaaaaagatggaactggagagaatggctgcatggaaaaatcggttagaggaatttgaaagtggccatcttcctttcatgtgcctgcaatacaaagataaggattcaattcagcacacgatccctgctgtatttattggaaacctcaactcatttgctgatcaaaagatcatgaacatggtggaagatgattcacttgtttctggcaagccgaaacgtgatagtggggaacaactttatcgcccatcttactatgtagctttaagttcagataattcatggtatctgttcacagaaaaatggattaaaactgtttacaagacaggtctacctgctgtcccttctgttgaagggggcacactccctagagaaaccctgaaacagctcctcctgcgtgaagagttggtgtgggataaagttgaaaaatcagaatacggctctttgttaagcatggaaggttctttagacacatggtcgtggagtctcaatgttcctgtgcttaatagcctttcggaagacaatgaggtagaacgattctcccaggaacatcaagatgctgtagaatgctacaagcaacagaggaggaaggtttcacatttaaagaaaacaataaaggctactaggggtttcaaagaattccaaaagatcatcgacatgagaaattttacaaaagagaagattgagcgcttagaagctagatcccgtcgcttgactcgacgaataagacaaattgaaccgaccggttggaaagaatttctccagattagcaaagtcatacaagaggctagagcattggatatcaatactcaggaacaaggtcctcttggatctaaagccatctcaactggcagcagtttgtggaagtttagtttccgaagggatcaaacttcgtccttggaaaaatagcagctatgtatatgaaccttcttctgttgttactggtgttataagttatttagaagagcagagaaattcgctaatcgatctccaagagagacatagtgttaagataccttgcgaaatagatgcccagtttgctgggatggttgaagcctgggcttcaggactgacttggagggagataatgatggactctgcaatggacgatggagatttagcccgtctactcaggcgctctatagatttactagctcagattcccaaactgccagacattgatccggttctccaaaagaatgcacaaattgcttgcagcgtcatggaccgagtaccgattagtgagcttgccggttgaaaactcaacctttaacagttgtcacagtgaaattcaagagcagctcatatcccactgactaaacatgtttttcaagaagatcagcaactacagtgattggttcaaggaatcaacattcagaatgatgaacaagacaaatgatcacatcaaaggttcataggattattcatccaaaaaattctatcactaccaattccagaattttcaaccacgtgaccaatcaaatggatatggagatcaaagcgcagcaacaatctctaggttttctcacggcttctagatgcctgaacaccagaaatactcagaatcagaactgcagtgtcaatggatatgactattaagggcatgttcgtttcacccccaatccatatggattgaaggggattgagtgagtttcaatccctgataaggccttgttgggttattcacatctcacatgggttggaagggattggaaaattttaagaagaattttgacttgctatggatttaaacacacccaatctcacccaatccacatggactgacactaaaacgaacaattcttaagtcaaaatctctcccaatctatacaaatctcctccaattcag

SEQ ID NO: 9530 - DNA, 2933 bp, Zea Mays
ctctggtgctcatgtttctctccatacaccacgacgacgacgatggtgtcgatgttttttgttgttgttgttgttgtactctttccccagattggcagcttgctgtccacagcctagcggctctgttttggatggactcactgttgtgtactgtctagccgcttgtttcttgtggacgtctaggccttgtggacgagtgaagtgaagcctgccatatcctgttggaatcgaacctgcttcgattcttccctcttgtagttacctccagatagcccccaattttttttttggcaccacctaccttggcatcgtcttccccaattcggtcgcgtccaacccttcctttcaggcctttccgaatgttttgcccttgatttgtactccgtcgcaggtttaggagccgtgtccggcttgtcacatcccggtggtttcacgcccgtctctgaccgagtgactgctagctagttcctgatccttcgatagcttgtttgtcacacgccaatggagtcgccctgtttccactcattatgctcacctgcaactctgcttccgcatcattagtgtctacaggaagagcacgtcgcaaccttccattttttacgctcagttgcagagtgctccgctgcagagcacacagtgaagctgtgtccgtttccccatcactgtcatcaatgagctacacctcatcttcttcgcccttttctatgcgagctttaatgcccgtttggtggctacgactactgtacgtactcgtttattgccactagcttcttcccccattgaaaaagctttattactacattctgctccgcaaagagagagagtgacctgatcttcccttcaatttggcgtcggtgttaatttggattcctacaagacgttctagcgcgcttctgcggcaggatcaggaggctggtggtcgccggcgcagcgtctgcggggcggcgtccgagggtgactctgcaaggactccccggtggccccgaggcgttcgagctcgtcgcgaggttctgctacaccgacgacggcggacggggcggggcggtgacggcgggcaacgcgtgcgtgctgcggtgcgcggcggagttcctggacatggcggcggcggacgtggccgcggccgaggccgaggccgaggccgcgccgagcctggtgcggatgacggagaaggcgctggaggagatgccgcactggccgtggcacacggtcgtggacgccgtgaagcagtgccagcgcctggtcccgctcgcggactccaccggcgcgttcgacgcggccgtggcggcgctggtgtcccagatggccgtgcccccgccggccggggacgccacgcccacgggctcctcgccggagagcaccgcgttccggttctcgtgcgacaccaagagcagcagcctcagcctgcgcggcgggtcctgcgtcagccgcacctggtggttcgaggacctcgtcgcgctcggccctgccacggtggagcgcgtcgcctcggcgctcgtggccaggggcgccgaccacggcgtcgtcgcccggttcctcttctactacctaaagtgccgcgtcgccggtgcgagcgccgaggagaagaaggcgatgctgcaggcctcggtcgccgtcatggcgaagctggaccgaagcgccgtctcctgcaagggcctcttcggcatcctgaggatcgccgcgccgctgaggctggccgacgcgtgccaggagcggctcgtggccatgatcggccgcaagctggaccacgcgacgctcgataacctgctcgtcccggcgccgcccgggacgggcagcctgtacgacgtgagcctggtgctgaggttcttggccgcgttcctccgcggcggcgccagtgacgagccggcgaggctgaagaaggtgggcaagctcgtggacctgtacctggccgaggtcgctccggacccgtcccttcgcccggccaagttcctggagctcgccaccgcgctgccggctcacgcgagggactgccacgacgcgctgtatcgcgccatcgacgtctatttccaggttcacggccgcctgacggacgaggagaagatgaagatctgcagggggctgagctacgagaagctgtcgcccgagagctgcaagcacctggcgcggaacggcgagttcccgacgagggcggcggtgcaggcgctggcgtcgcagcacacggtgctgaagagcatcgtgctgcgcgagcccgcgggccagctgaagcccgtgtcgctgtcccctcccccgtccacgggtaagcaccgcgacgtcggcggcggcgagaacgacgagggtcaggtggtcctgtacgcggggcggctggacctgtcgctggagaaccagaacctgcggtcgctcctggacgggatgcactggcgggtgatggagctggagaaggtgtgtagccggatgaagacgcagatgagcaagatgaagcagcccaggcgcggaggcggtggcggccgcgccggcaggtcgtcgctccccaggatgtgctcctgatccaccacctcgcctcctcgcgctgccgttattagcgcgcgctttagcggtgaccccgcaacactgtaccatagcgacgatgtacataccgactgccgtgctaggaggaatcagtgaagcgcggcgcggcgcggtgcaggcggcagagcatcgtcctcctccctgcatcttgtcccttttttttttttgcctagcttcctcccgtgtatgatgatgcgtgtatcggttctcggtggtggcaatttgaaaagaagggctggctagcagcgtcagcctgagctgagtggtcctgctggttgaatggatgtggtctatctgaaataataaaaaaaggggtactgtgtggcatgcttcgtgcctgaagaatctcgcaatgctgctacagcagcttgccaggtcgagcatacagtaactgctcgcattcgcaccag

SEQ ID NO: 9531 - DNA, 298 bp, Zea Mays
atggaccaggccgtggagccgaggtcccgggaccgcgtctcccgcatgttccgcaccggcgccgagatgggcctcaccgtgtgccgctcctgggcgttcaacgacgacacctacaacgccctccaggtctcccctggccacttcgacgagcgcatcttcaagactggaaatgctttgggtgattcagatactgaggaatggctagttgcagtgaaagtaatttctagctggagcggatcagtcatcatgctgatgtttgcctcgatggtatctacctagcatgtggtatttgtaggtt

SEQ ID NO: 9532 - DNA, 2872 bp, Zea Mays
tcgcattgtcagatctacttcgatctcacttctggttaactgagggcgttcctcgatcggatctcctgctccggctccggctcctgctccagctgaatggataacatgctaggcgacttgtacaagccagatgacggcgacgacttctacagcaaaaaataccgcgacgagctagagaatgtgtcattccaactattagaagaaattacagatggtttctctgagagtcgagagctcggccgaggatcctttggagtggtttacaggggattgactaaaaatggtgattacgttgctgtgaagaagcttcatgctaatgtcactgatcttaaccataagcagtttcaaaatgagttatataaccttgcaaaacttaagcatgaaaacattgtacggatttatggctattgctatgaaattaagaaaacatttatggagcacgatagaagaaaaattcttgtcgaagagccgcgtatagcgctctgccttgagtatttacacaatggaagccttcaagatcatatttcggatgagttttctggtcttgactgggacacacgctacaggattatggaaggggtctgtcgtggtttatatcatatccataggaatctaaagaaacctctttatcatttggacctaaaacctgccaacatattactaagtaaaaccatgcaaccaaagcttgcagattttgggttatctaggatctttcggaatgaagaactaacacgaacgactaaaagtcctctaggaactcttgggtaccagccaccagaatacattgaaagaggtgaagtctcagaaaaattcgacatattcagcttaggtgtcgtaatgatacacctggtttcgggacgtggaggcttcgaaagatatgcatgcatgcatagtgaagaatttatcaatcaggtaaaaacaaactggaggaaaagatttaagcaattacagaggaattccttacgtaaagtcaaagtgtactgccacgaggtagagacatgcactcggatagcactgaattgtgtggagaaagacacacagaaaaggcctgatatagatatggtcatcaataatctaaaggaccgtaagacccatagattcaagagtacttggacaagtagttttcggcaggatggaagaatgtatggaagctatatgccatattcaaacagatatttaaacaaattgatgtcaggctctatttgcaccgaaacaaaattttatcgaagagaaaaattaccgaatgttggagaagaattcattatagggagaaaagaagagaaacagaaaatagtggcatctttactacagagcatgacacaacacatcactatccttcctatctatggcattggaggaattggcaagacaaccattgcaaagttgatttactatgatacaaatttcaatagttactctcgagtatgggtctatgtttcaccgaaatttgacttgaagaaagttggaaacactgtaatttcacaactctctagtgaggagagccaaattaatgaaacacaaatgatacatagttgcctgatgaaattactttctggtaaaaaggttctgattgttttagatgacttgtgggaggatagtttatttcaactgaataatttgaaggatatgctaagttatggtgatagcatcaatgtaatagttatagtaaccacacgcagtaaacatgttgcagagaatgttagcactaatgttgagccacacaagatagaacccttgacagatagcatgtgctgggatataatgaaacaaagaagcaactttgaagctaaaaatcacaaagaacatttggcacatataggaatggagatcgctgtaaagtgtggaggtgtggctttggcagctcaatcccttgggttcatgttgaagcccatggaattatgtgatgaatggattgaagtcagagacagtgacatctggaataaatctatttcgaaggatgccaattcaccaaaccatatatgtgagaagtatattttgcagctcataggattgtctttcattcaagatacaatgtcaccaaaggtgctgcagtagcctggaagtgatgacagacatatatggaggctttcttctactggtgtttgcacagccaagtcagcttatgggggtttcttcattggagccacggtttttggtccttcggatctaatctggaaatcgtgggccccaaagaaatgtcgttttttcccctatggctggttgctcttgacaaatgttggagtgccgaccgtctagccagacggggtttacaggcagcaccctatgtgttgtttgttttgtgaccaagatgaggaaaccatcaaccatcttctggtttcttgctccttctctcggcaattttggttcgtgctgttacaaatggtgggtcttcaacgcctatctccacagccagacacgtccttcttcctagaatggtggtcaggttctgctgcagtggtggatgagcaatttcagcagggtttctactacatcatcctgcttggtgcttggctcctttggaagcaccgtaaccgatgtgtcttcgatgggattgggatcaaacccgatgtgcagcatgtgttgtccttagccacagaggaaatgagactttgggggctagctggtgcgaagggaattaggatgttgacttgttggcgagtaatcctctagcttgatccaggtcatgtttctttgttctggtcgagatttgtgagtgtgttgtttttctattctttttcttttttctttgtaatctgttttggggttctcagttctctatcccttttcatcttcttaatacaaagatacacagttgtcctgcgtgtttgaaaaaaaaatacttttaaacatagttaatgaactagtacatcaa

SEQ ID NO: 9533 - DNA, 5406 bp, Zea Mays
atggataacatgctaggcgacttgtacaagccagatgacggcgacgacttctacagcaaaaaataccgcgacgagctagagaatgtgtcattccaactattagaagaaattacagatggtttctctgagagtcgagagctcggccgaggatcctttggagtggtttacaggggattgactaaaaatggtgattacgttgctgtgaagaagcttcatgctaatgtcactgatcttaaccataagcagtttcaaaatgagttatataaccttgcaaaacttaagcatgaaaacattgtacggatttatggctattgctatgaaattaagaaaacatttatggagcacgatagaagaaaaattcttgtcgaagagccgcgtatagcgctctgccttgagtatttacacaatggaagccttcaagatcatatttcggatgagttttctggtcttgactgggacacacgctacaggattatggaaggggtctgtcgtggtttatatcatatccataggaatctaaagaaacctctttatcatttggacctaaaacctgccaacatattactaagtaaaaccatgcaaccaaagcttgcagattttgggttatctaggatctttcggaatgaagaactaacacgaacgactaaaagtcctctaggaactcttgggtaccagccaccagaatacattgaaagaggtgaagtctcagaaaaattcgacatattcagcttaggtgtcgtaatgatacacctggtttcgggacgtggaggcttcgaaagatatgcatgcatgcatagtgaagaatttatcaatcaggtaaaaacaaactggaggaaaagatttaagcaattacagaggaattccttacgtaaagtcaaagtgtactgccacgaggtagagacatgcactcggatagcactgaattgtgtggagaaagacacacagaaaaggcctgatatagatatggtcatcaataatctaaaggaccgtaagacccatagattcaagagtacttggacaagtagttttcggcaggatggaagaatgtatggaagctatatgccatattcaaacagatatttaaacaaattgatgtcaggctctatttgcaccgaaacaaaattttatcgaagagaaaaattaccgaatgttggagaagaattcattatagggagaaaagaagagaaacagaaaatagtggcatctttactacagagcatgacacaacacatcactatccttcctatctatggcattggaggaattggcaagacaaccattgcaaagttgatttactatgatacaaatttcaatagttactctcgagtatgggtctatgtttcaccgaaatttgacttgaagaaagttggaaacactgtaatttcacaactctctagtgaggagagccaaattaatgaaacacaaatgatacatagttgcctgatgaaattactttctggtaaaaaggttctgattgttttagatgacttgtgggaggatagtttatttcaactgaataatttgaaggatatgctaagttatggtgatagcatcaatgtaatagttatagtaaccacacgcagtaaacatgttgcagagaatgttagcactaatgttgagccacacaagatagaacccttgacagatagcatgtgctgggatataatgaaacaaagaagcaactttgaagctaaaaatcacaaagaacatttggcacatataggaatggagatcgctgtaaagtgtggaggtgtggctttggcagctcaatcccttgggttcatgttgaagcccatggaattatgtgatgaatggattgaagtcagagacagtgacatctggaataaatctatttcgaaggatgccaattcaccaaaccatatatgtgagaagtatattttgcagctcataggattgtctttcattcaagatacaatgtcaccaaagtattctcaagcatacaaaaaaggcctcacattgttcaccatgcacgatctcgtgcatgatttggcaagattactaacggctggtgaaattctggatgcttccaatattgggactatggatgcgaggcatgttgcccgcgagcctgcaactaggtcattatttcatgggtacatgcatgctaagtcaaactttcgtagcttcatacgtaccaattcaaatatatacacataccggcgacggcgagagccagaaggtagcggacagcaatacaaatatgcattgctcactaattgtcacaagcccctagaggtattgacggattcgcccaatatgataagggcactgcattttcgggattgtcatggctcgaaaggactaaaagattatgcatttttgcctgcaaagttgtccctaaaagttctggatttaagtgggtgcaacatagcctacctgccagcttctatcggtgaattggctgtattgaggtatctcaatgctccagagattaaaaatgaaatgctcccagactctctgagcaaactgtcaaaattaatatacctcaacctaagtgggtccaatatttcagcactgcctgattcaattggtgatatcgaaggtctaatgcatcttgatatatcaaattgtgtgcttttgtgtgagctcccagaatcatttgtggacctaaaaaatctggtatatctagatttatcacattgccagatcaaaattacagcaagagtttttagtggtctcaccaatatccagcatttgaatttatcaaaaagtcttattcatggaggtgacgggttggaggggctgcaggaagccgttggtggtctcaccgaacttcggtatttaaatctatcagggtgctttgaaaatctgaggccagatgaggtattaagttttgttgaccgtatttgtaggcttacaaatctggtgcacttggatttgtctttcaatttgggtcttgtcagtgtgcctgaaagtattggcagcctcaggaagctgcacaccctggatctcttgtgctgccgaaacctagtgacgcttccaaaatgtatgttcaacatggatagcatgaagatgttaaatgttacctgctgtcctcatctagatcagtctacgctcccccgatacaggtattttaccttgccgtactttgaggtccatgctgatgatggcgaatctaccagcaatattggtttgcttcggtatgtgaatcctactcatgagttgtacataagtgggcttgataacacaatatctgcagaagaggttgacagtataaacctaagccaaaaacaggggatccagtcgttgagtctttcatggactagagatgctcagagatctgtggaggacatggaagtcctgggaaagctagtgccacctgatactttaaaatgctttgagctaagaggttatgatagtatgagctttccaacatgggttatgggcatcacgctctatcttcctcgccttaccaaggttgtattgtgggagctgcgtaaatgcaatagtctaccaccactgggccagttaccaacactacaaaagctagttataggaggaatggacagcactttgacagttgatgagggtttctgctgcgccggcccgggagcctttcctctattacaggaacttcaactatgccaaatggagaacctggaagtgtggaacacaacatactcctgtggccagagcaatgaggatgtgcaggaattcatgttcccaaaccttagggaactgttaattcgtgattgccccaagttgagactgaaaccatgcccacctaaaactgtgggatggaagatagagaacagcgacaatgtactgtcgtcatgggatgaggagggagagatcgaccttgcagcattgttcccatcaaggaaagagtttaagaaactttgggaagggaaaacaaaagtgccagcagcttgtagcgcacaatttgaaaaatgcagaaaacctggagcttcctacaatgcttgtcctgaacgcgtggaggtgaaatcgagcaagctgcctttgggaaaatggaggctgttccggcacctccttcccacctatgatttaaggatctcgtgctgcacttatgcgacaagcggctcgtcacaagagatcatccaaggcctcgccttcatcgaatcattatgcctagaagacgatgctcagtctgagcttccgaattggttgggtgagctcacttctcttgaaacgttggagatatcgaagtacccagggctagaggcaccactggatggcatgaagcaactcgcccacctccggaagctgtcgctgataaattgtagaagcatgtcagcactaccgcaatggttgggagaactcatctctctcaaagaactgatcatctcagagtggccaaacctgagcgattttccggagagtatgcagctcctcacctccctcaagatgctacgtttggagcggtgtcccagaattactgcccttccaggatggctgggcgacctcgcttctctcaaaatactagtcatcagcaattgcaagggcatcgtgtctctgccagacagcatacagaagatcaccaggcttgtacgagtataaattgggggagcctgaaacatgctatctgctttgcaactcatttacagtagcctggaagtgatgacagacatatatggaggctttcttctactggtgtttgcacagccaagtcagcttatgggggtttcttcattggagccacggtttttggtccttcggatctaatctggaaatcgtgggccccaaagaaatgtcgttttttcccctatggctggttgctcttgacaaatgttggagtgccgaccgtctagccagacggggtttacaggcagcaccctatgtgttgtttgttttgtgaccaagatgaggaaaccatcaaccatcttctggtttcttgctccttctctcggcaattttggttcgtgctgttacaaatggtgggtcttcaacgcctatctccacagccagacacgtccttcttcctagaatggtggtcaggttctgctgcagtggtggatgagcaatttcagcagggtttctactacatcatcctgcttggtgcttggctcctttggaagcaccgtaaccgatgtgtcttcgatgggattgggatcaaacccgatgtgcagcatgtgttgtccttagccacagaggaaatgagactttgggggctagctggtgcgaagggaattaggatgttgacttgttggcgagtaatcctctagcttgatccaggtcatgtttctttgttctggtcgagatttgtgagtgtgttgtttttctattctttttcttttttctttgtaatctgttttggggttctcagttctctatcccttttcatcttcttaatacaaagatacacagttgtcctgcgtgtttgaaaaaaaaatacttttaaacatagttaatgaactagtacatcaa

SEQ ID NO: 9534 - DNA, 5510 bp, Zea Mays
cttcgatctcacttctggttaactgagggcgttcctcgatcggatctcctgctccggctccggctcctgctccagctgaatggataacatgctaggcgacttgtacaagccagatgacggcgacgacttctacagcaaaaaataccgcgacgagctagagaatgtgtcattccaactattagaagaaattacagatggtttctctgagagtcgagagctcggccgaggatcctttggagtggtttacaggggattgactaaaaatggtgattacgttgctgtgaagaagcttcatgctaatgtcactgatcttaaccataagcagtttcaaaatgagttatataaccttgcaaaacttaagcatgaaaacattgtacggatttatggctattgctatgaaattaagaaaacatttatggagcacgatagaagaaaaattcttgtcgaagagccgcgtatagcgctctgccttgagtatttacacaatggaagccttcaagatcatatttcggatgagttttctggtcttgactgggacacacgctacaggattatggaaggggtctgtcgtggtttatatcatatccataggaatctaaagaaacctctttatcatttggacctaaaacctgccaacatattactaagtaaaaccatgcaaccaaagcttgcagattttgggttatctaggatctttcggaatgaagaactaacacgaacgactaaaagtcctctaggaactcttgggtaccagccaccagaatacattgaaagaggtgaagtctcagaaaaattcgacatattcagcttaggtgtcgtaatgatacacctggtttcgggacgtggaggcttcgaaagatatgcatgcatgcatagtgaagaatttatcaatcaggtaaaaacaaactggaggaaaagatttaagcaattacagaggaattccttacgtaaagtcaaagtgtactgccacgaggtagagacatgcactcggatagcactgaattgtgtggagaaagacacacagaaaaggcctgatatagatatggtcatcaataatctaaaggaccgtaagacccatagattcaagagtacttggacaagtagttttcggcaggatggaagaatgtatggaagctatatgccatattcaaacagatatttaaacaaattgatgtcaggctctatttgcaccgaaacaaaattttatcgaagagaaaaattaccgaatgttggagaagaattcattatagggagaaaagaagagaaacagaaaatagtggcatctttactacagagcatgacacaacacatcactatccttcctatctatggcattggaggaattggcaagacaaccattgcaaagttgatttactatgatacaaatttcaatagttactctcgagtatgggtctatgtttcaccgaaatttgacttgaagaaagttggaaacactgtaatttcacaactctctagtgaggagagccaaattaatgaaacacaaatgatacatagttgcctgatgaaattactttctggtaaaaaggttctgattgttttagatgacttgtgggaggatagtttatttcaactgaataatttgaaggatatgctaagttatggtgatagcatcaatgtaatagttatagtaaccacacgcagtaaacatgttgcagagaatgttagcactaatgttgagccacacaagatagaacccttgacagatagcatgtgctgggatataatgaaacaaagaagcaactttgaagctaaaaatcacaaagaacatttggcacatataggaatggagatcgctgtaaagtgtggaggtgtggctttggcagctcaatcccttgggttcatgttgaagcccatggaattatgtgatgaatggattgaagtcagagacagtgacatctggaataaatctatttcgaaggatgccaattcaccaaaccatatatgtgagaagtatattttgcagctcataggattgtctttcattcaagatacaatgtcaccaaagtattctcaagcatacaaaaaaggcctcacattgttcaccatgcacgatctcgtgcatgatttggcaagattactaacggctggtgaaattctggatgcttccaatattgggactatggatgcgaggcatgttgcccgcgagcctgcaactaggtcattatttcatgggtacatgcatgctaagtcaaactttcgtagcttcatacgtaccaattcaaatatatacacataccggcgacggcgagagccagaaggtagcggacagcaatacaaatatgcattgctcactaattgtcacaagcccctagaggtattgacggattcgcccaatatgataagggcactgcattttcgggattgtcatggctcgaaaggactaaaagattatgcatttttgcctgcaaagttgtccctaaaagttctggatttaagtgggtgcaacatagcctacctgccagcttctatcggtgaattggctgtattgaggtatctcaatgctccagagattaaaaatgaaatgctcccagactctctgagcaaactgtcaaaattaatatacctcaacctaagtgggtccaatatttcagcactgcctgattcaattggtgatatcgaaggtctaatgcatcttgatatatcaaattgtgtgcttttgtgtgagctcccagaatcatttgtggacctaaaaaatctggtatatctagatttatcacattgccagatcaaaattacagcaagagtttttagtggtctcaccaatatccagcatttgaatttatcaaaaagtcttattcatggaggtgacgggttggaggggctgcaggaagccgttggtggtctcaccgaacttcggtatttaaatctatcagggtgctttgaaaatctgaggccagatgaggtattaagttttgttgaccgtatttgtaggcttacaaatctggtgcacttggatttgtctttcaatttgggtcttgtcagtgtgcctgaaagtattggcagcctcaggaagctgcacaccctggatctcttgtgctgccgaaacctagtgacgcttccaaaatgtatgttcaacatggatagcatgaagatgttaaatgttacctgctgtcctcatctagatcagtctacgctcccccgatacaggtattttaccttgccgtactttgaggtccatgctgatgatggcgaatctaccagcaatattggtttgcttcggtatgtgaatcctactcatgagttgtacataagtgggcttgataacacaatatctgcagaagaggttgacagtataaacctaagccaaaaacaggggatccagtcgttgagtctttcatggactagagatgctcagagatctgtggaggacatggaagtcctgggaaagctagtgccacctgatactttaaaatgctttgagctaagaggttatgatagtatgagctttccaacatgggttatgggcatcacgctctatcttcctcgccttaccaaggttgtattgtgggagctgcgtaaatgcaatagtctaccaccactgggccagttaccaacactacaaaagctagttataggaggaatggacagcactttgacagttgatgagggtttctgctgcgccggcccgggagcctttcctctattacaggaacttcaactatgccaaatggagaacctggaagtgtggaacacaacatactcctgtggccagagcaatgaggatgtgcaggaattcatgttcccaaaccttagggaactgttaattcgtgattgccccaagttgagactgaaaccatgcccacctaaaactgtgggatggaagatagagaacagcgacaatgtactgtcgtcatgggatgaggagggagagatcgaccttgcagcattgttcccatcaaggaaagagtttaagaaactttgggaagggaaaacaaaagtgccagcagcttgtagcgcacaatttgaaaaatgcagaaaacctggagcttcctacaatgcttgtcctgaacgcgtggaggtgaaatcgagcaagctgcctttgggaaaatggaggctgttccggcacctccttcccacctatgatttaaggatctcgtgctgcacttatgcgacaagcggctcgtcacaagagatcatccaaggcctcgccttcatcgaatcattatgcctagaagacgatgctcagtctgagcttccgaattggttgggtgagctcacttctcttgaaacgttggagatatcgaagtacccagggctagaggcaccactggatggcatgaagcaactcgcccacctccggaagctgtcgctgataaattgtagaagcatgtcagcactaccgcaatggttgggagaactcatctctctcaaagaactgatcatctcagagtggccaaacctgagcgattttccggagagtatgcagctcctcacctccctcaagatgctacgtttggagcggtgtcccagaattactgcccttccaggatggctgggcgacctcgcttctctcaaaatactagtcatcagcaattgcaagggcatcgtgtctctgccagacagcatacagaagatcaccaggcttgtacgagtataaattgggggagcctgaaacatgctatctgctttgcaactcatttacagggtgcactctctgtaggtgctgcagtagcctggaagtgatgacagacatatatggaggctttcttctactggtgtttgcacagccaagtcagcttatgggggtttcttcattggagccacggtttttggtccttcggatctaatctggaaatcgtgggccccaaagaaatgtcgttttttcccctatggctggttgctcttgacaaatgttggagtgccgaccgtctagccagacggggtttacaggcagcaccctatgtgttgtttgttttgtgaccaagatgaggaaaccatcaaccatcttctggtttcttgctccttctctcggcaattttggttcgtgctgttacaaatggtgggtcttcaacgcctatctccacagccagacacgtccttcttcctagaatggtggtcaggttctgctgcagtggtggatgagcaatttcagcagggtttctactacatcatcctgcttggtgcttggctcctttggaagcaccgtaaccgatgtgtcttcgatgggattgggatcaaacccgatgtgcagcatgtgttgtccttagccacagaggaaatgagactttgggggctagctggtgcgaagggaattaggatgttgacttgttggcgagtaatcctctagcttgatccaggtcatgtttctttgttctggtcgagatttgtgagtgtgttgtttttctattctttttcttttttctttgtaatctgttttggggttctcagttctctatcccttttcatcttcttaatacaaagatacacagttgtcctgcgtgtttgaaaaaaaaatacttttaaacatagttaatgaactagtacatcaa

SEQ ID NO: 9535 - DNA, 5606 bp, Zea Mays
cctcaacaagttaaaaggcactcacactaccatcgctttccgcgtccgccgttttaacaatcgcattgtcagatctacttcgatctcacttctggttaactgagggcgttcctcgatcggatctcctgctccggctccggctcctgctccagctgaatggataacatgctaggcgacttgtacaagccagatgacggcgacgacttctacagcaaaaaataccgcgacgagctagagaatgtgtcattccaactattagaagaaattacagatggtttctctgagagtcgagagctcggccgaggatcctttggagtggtttacaggggattgactaaaaatggtgattacgttgctgtgaagaagcttcatgctaatgtcactgatcttaaccataagcagtttcaaaatgagttatataaccttgcaaaacttaagcatgaaaacattgtacggatttatggctattgctatgaaattaagaaaacatttatggagcacgatagaagaaaaattcttgtcgaagagccgcgtatagcgctctgccttgagtatttacacaatggaagccttcaagatcatatttcggatgagttttctggtcttgactgggacacacgctacaggattatggaaggggtctgtcgtggtttatatcatatccataggaatctaaagaaacctctttatcatttggacctaaaacctgccaacatattactaagtaaaaccatgcaaccaaagcttgcagattttgggttatctaggatctttcggaatgaagaactaacacgaacgactaaaagtcctctaggaactcttgggtaccagccaccagaatacattgaaagaggtgaagtctcagaaaaattcgacatattcagcttaggtgtcgtaatgatacacctggtttcgggacgtggaggcttcgaaagatatgcatgcatgcatagtgaagaatttatcaatcaggtaaaaacaaactggaggaaaagatttaagcaattacagaggaattccttacgtaaagtcaaagtgtactgccacgaggtagagacatgcactcggatagcactgaattgtgtggagaaagacacacagaaaaggcctgatatagatatggtcatcaataatctaaaggaccgtaagacccatagattcaagagtacttggacaagtagttttcggcaggatggaagaatgtatggaagctatatgccatattcaaacagatatttaaacaaattgatgtcaggctctatttgcaccgaaacaaaattttatcgaagagaaaaattaccgaatgttggagaagaattcattatagggagaaaagaagagaaacagaaaatagtggcatctttactacagagcatgacacaacacatcactatccttcctatctatggcattggaggaattggcaagacaaccattgcaaagttgatttactatgatacaaatttcaatagttactctcgagtatgggtctatgtttcaccgaaatttgacttgaagaaagttggaaacactgtaatttcacaactctctagtgaggagagccaaattaatgaaacacaaatgatacatagttgcctgatgaaattactttctggtaaaaaggttctgattgttttagatgacttgtgggaggatagtttatttcaactgaataatttgaaggatatgctaagttatggtgatagcatcaatgtaatagttatagtaaccacacgcagtaaacatgttgcagagaatgttagcactaatgttgagccacacaagatagaacccttgacagatagcatgtgctgggatataatgaaacaaagaagcaactttgaagctaaaaatcacaaagaacatttggcacatataggaatggagatcgctgtaaagtgtggaggtgtggctttggcagctcaatcccttgggttcatgttgaagcccatggaattatgtgatgaatggattgaagtcagagacagtgacatctggaataaatctatttcgaaggatgccaattcaccaaaccatatatgtgagaagtatattttgcagctcataggattgtctttcattcaagatacaatgtcaccaaagtattctcaagcatacaaaaaaggcctcacattgttcaccatgcacgatctcgtgcatgatttggcaagattactaacggctggtgaaattctggatgcttccaatattgggactatggatgcgaggcatgttgcccgcgagcctgcaactaggtcattatttcatgggtacatgcatgctaagtcaaactttcgtagcttcatacgtaccaattcaaatatatacacataccggcgacggcgagagccagaaggtagcggacagcaatacaaatatgcattgctcactaattgtcacaagcccctagaggtattgacggattcgcccaatatgataagggcactgcattttcgggattgtcatggctcgaaaggactaaaagattatgcatttttgcctgcaaagttgtccctaaaagttctggatttaagtgggtgcaacatagcctacctgccagcttctatcggtgaattggctgtattgaggtatctcaatgctccagagattaaaaatgaaatgctcccagactctctgagcaaactgtcaaaattaatatacctcaacctaagtgggtccaatatttcagcactgcctgattcaattggtgatatcgaaggtctaatgcatcttgatatatcaaattgtgtgcttttgtgtgagctcccagaatcatttgtggacctaaaaaatctggtatatctagatttatcacattgccagatcaaaattacagcaagagtttttagtggtctcaccaatatccagcatttgaatttatcaaaaagtcttattcatggaggtgacgggttggaggggctgcaggaagccgttggtggtctcaccgaacttcggtatttaaatctatcagggtgctttgaaaatctgaggccagatgaggtattaagttttgttgaccgtatttgtaggcttacaaatctggtgcacttggatttgtctttcaatttgggtcttgtcagtgtgcctgaaagtattggcagcctcaggaagctgcacaccctggatctcttgtgctgccgaaacctagtgacgcttccaaaatgtatgttcaacatggatagcatgaagatgttaaatgttacctgctgtcctcatctagatcagtctacgctcccccgatacaggtattttaccttgccgtactttgaggtccatgctgatgatggcgaatctaccagcaatattggtttgcttcggtatgtgaatcctactcatgagttgtacataagtgggcttgataacacaatatctgcagaagaggttgacagtataaacctaagccaaaaacaggggatccagtcgttgagtctttcatggactagagatgctcagagatctgtggaggacatggaagtcctgggaaagctagtgccacctgatactttaaaatgctttgagctaagaggttatgatagtatgagctttccaacatgggttatgggcatcacgctctatcttcctcgccttaccaaggttgtattgtgggagctgcgtaaatgcaatagtctaccaccactgggccagttaccaacactacaaaagctagttataggaggaatggacagcactttgacagttgatgagggtttctgctgcgccggcccgggagcctttcctctattacaggaacttcaactatgccaaatggagaacctggaagtgtggaacacaacatactcctgtggccagagcaatgaggatgtgcaggaattcatgttcccaaaccttagggaactgttaattcgtgattgccccaagttgagactgaaaccatgcccacctaaaactgtgggatggaagatagagaacagcgacaatgtactgtcgtcatgggatgaggagggagagatcgaccttgcagcattgttcccatcaaggaaagagtttaagaaactttgggaagggaaaacaaaagtgccagcagcttgtagcgcacaatttgaaaaatgcagaaaacctggagcttcctacaatgcttgtcctgaacgcgtggaggtgaaatcgagcaagctgcctttgggaaaatggaggctgttccggcacctccttcccacctatgatttaaggatctcgtgctgcacttatgcgacaagcggctcgtcacaagagatcatccaaggcctcgccttcatcgaatcattatgcctagaagacgatgctcagtctgagcttccgaattggttgggtgagctcacttctcttgaaacgttggagatatcgaagtacccagggctagaggcaccactggatggcatgaagcaactcgcccacctccggaagctgtcgctgataaattgtagaagcatgtcagcactaccgcaatggttgggagaactcatctctctcaaagaactgatcatctcagagtggccaaacctgagcgattttccggagagtatgcagctcctcacctccctcaagatgctacgtttggagcggtgtcccagaattactgcccttccaggatggctgggcgacctcgcttctctcaaaatactagtcatcagcaattgcaagggcatcgtgtctctgccagacagcatacagaagatcaccaggcttgtacgagtataaattgggggagcctgaaacatgctatctgctttgcaactcatttacaggtgctgcagtagcctggaagtgatgacagacatatatggaggctttcttctactggtgtttgcacagccaagtcagcttatgggggtttcttcattggagccacggtttttggtccttcggatctaatctggaaatcgtgggccccaaagaaatgtcgttttttcccctatggctggttgctcttgacaaatgttggagtgccgaccgtctagccagacggggtttacaggcagcaccctatgtgttgtttgttttgtgaccaagatgaggaaaccatcaaccatcttctggtttcttgctccttctctcggcaattttggttcgtgctgttacaaatggtgggtcttcaacgcctatctccacagccagacacgtccttcttcctagaatggtggtcaggttctgctgcagtggtggatgagcaatttcagcagggtttctactacatcatcctgcttggtgcttggctcctttggaagcaccgtaaccgatgtgtcttcgatgggattgggatcaaacccgatgtgcagcatgtgttgtccttagccacagaggaaatgagactttgggggctagctggtgcgaagggaattaggatgttgacttgttggcgagtaatcctctagcttgatccaggatggcttggcgaccatgcttctgtcaaaatactaatcatcaacaactgcgtgagcaacctgtctctgccagaaagcatacagaagctcaccaggcttgtacgagtatatatttatctcgtttgccttttctttgttttaacctctcaatatttatacatagaaacgtttttaagccaactttggacatttaaatataaattgtgcattaatggtaatttattttag

SEQ ID NO: 9536 - DNA, 2960 bp, Zea Mays
cagttatttacatgcttttaagtattgaatcatgttacatttccctgtttgagtgatagcatacagaaaatttgctacctatggttgtgtgcttttatgaagaatacctgttttcaagaaatctagtgccaccttgcctggtccttgctctacttatggtgcacttgttcttgttttgttatgtactgtaggcaaaagattatgggagatgcatagcagcaaaggtccctgagattgaacataatatgtgttccaaggagtttctagcactcagagcatgcatgcagactgtggttaagaacaaggcttgaggctccatatttataggaagtttgatactaatctcttttggtaattgctgcggatttttgatccttttctatttttcagtcatcttaaaaagtagaacctcattttcttggctaaacaatcagtagagcctaagcacgcaagagacaaagaaaatgttgggcaatcagatacaagggggcttgggcacatctggggcactgtctcatgcttatgttcagcatcctccgctgcgatgtgacataccagacactcagggtctgttctatgatgatgcaaataagttccttatagctccaactgctgatcggatattgtactggaaaacaattctacctactccatctggacctccaaactctgatccagttaatgaaggacctgtcttgtcagttcgatattcgctggatcataaagttattgggattcaacgatccagacatgaaattgagtttagaaatagggaaacaggggagacttgtagcaaaaagtgcagagctgattcagaaactgtacttggctttttctggacagattgcccaacatgtgatgttatacttgtaaaaacaagtggtcttgatcttcttgcctacgagcctcagccccatgcttttcacttggtggaatcgaagaagttcaatgtgagctggtatctttacacacatgaaagtaggctgattctacttgcttctggaatgcaatgcacgatgtttactggctatcagttttctgctggtgggattgtcaaaataccgaagtttgagatgatgatgtctaaaagtgaagcaaacaacaagcctgttctagctgcagatgatgtttacattgtaacagtctatggtaggatttattgcttgcagcttgacagagttagtatgtcattgaatctatatcgcttttaccgtgatgctgttgtacaacagtgtactctgccaacatactcaagcagaattgcagttagtgccgttgacaacataattatggttcaccaaatagatgcaaaagtagtcatgctttacgatgtgtccctggattcttatgccccagtttctgcaccacttccactgctattgagaggactgcccatcaatagtagacaagtatctcagactgcggatagccagtctagtgcatacggtggaaccatctatggagaaggttggaacttcctcattccagacctcatctgtgatgctgagaatgggctcttatggaagctccatttagatctggcggctattgctgctagtagttctgatgctccttcaattttggaattccttcagagacgaaagtctgacccaagcatggttaagactctatgcctagctatagttcggacaatcatcctggaaaggaggtcagtgcccacagttgctaaggcgatggatgttgtccttgattcctacacgcgtttgatgaaaatgggaggggcttttcctggggttaggcgaatacatgagcaaaatcagcagtcaggtagtcagcctattgatggctcccatgtggtttctcaggaatccagtcctggaacaacagttagtcctgctgtgaacccagaccacggaagtgaggctgtggatatatatgtgcagtcaaatccaggagttgagcatacaatagacaggggattactaaatataaacatatcttctgattctgtggacaatacatctgatgctgtcgacaaacgacagcaagctgtaggcgaagctagccgaccattgtcttcaggcacaatgacgcaacatggacaacatgctggaaccgtggcaatttctccaattgagatgttccagtctgtctttacacttgttgaagatgaaatgatgggtgatcctgcatatcttattgctgtcatcatagagtttctacggagtgtctcaaaggctgggcttaaggctcctcacaacctttatgtgatgacggcgacactactagctcgtagcaaccgttacgctgaaatagcattgtttgtgtcaaacaagattcttgagccgtgtaaagaactggcaatgcaacttatggagctgggtctgcagcacccgccaacgaggaagctgggcatggacatgctgagggagcgaggcctgcatcacgactacgtgactgcgatgctgcaagatgggtactacttggaggccctgcgctatgccagaaaatacaaggtgatcaccgtgcagcctgccctatttctggagaaagccctggcgaagaacagcgcccacaacctggctgcagtgctgagcttcttctgcgagttcactccgagcttcaaggccacatcggactttgtcagataccggcatattctgtctgaaatggtttgaacagctttccgttgtgcaaacttgttgtcccgaaatgacttggcacgtcctctgtaacaagcaacgtcacctcggagggtacttttatttaattcttttggtccctcttgcagaaaataatattttattgttgtgaataaaaaaacgttgcaattaccgatgaaaaacaagtctggcttgaggctaagatgatcgcttcccgctcgccgaccatgcagctagccatctcgtcacttatgctactcctagctatggatggccaaataggtgttaaatgggcatacactaaatacggtatttctagtagtgcttcggtatagc

SEQ ID NO: 9537 - DNA, 3539 bp, Zea Mays
aaccacttgagtacgcattccccaccctaaaaatagaagccaaggttggaagccgaggatcaagacagcaacaatggcaaagaaattactctttttttgctttcccatccctgtcctgtatcatgctcctgccggggctcctagattggtggcgtcccaatcattattcccgggtaaattggttcgctgccgtcaagaatcgcagatccaaccagaaggaccaatcttagtgtgccagaactgtatcacaattccaattttaggccaacatttgggtctaagaaacattaattaactaaggtcgaactcgaggtgagaagtacctgcaggggaggaatctattagttcctgtgcatcctttaggcagctgtggtaatccctattgggggaggtaccaatggccggttaatttggtgatccattgagctgtgcaagcaagcaaataccataggattacaagatgagatggcagaggagcaaattcagttggctcctcagcgcatgcctcatttgtctgctgctgcagctggttggtgcgatcaggactagcttgttctggccacaatcttgcctgccgtctcctgcaatcccaagagaagatgaatcggtggaacaactgtggcacagttgtgctctcgacttgagaattcctcaagatgttagaaacaagttccattacagccttctgttcaacaccatcagcaattcgtatagagaaaatgataataagtcctatcctcagaaggtcggcattgaggaagcaaccacggcaaccttttcacctgcagaagttgccaacacttttctggattgcttaaacaagcataatttccctttctctgatcatggactgcagaagcatcaggaggaaaccataagcttacttcccaactctaacagcatcaaccttccttttgcgatgaaaagaagacgtctacttgaagaagattcagccattgctccaccccgacctaaagcaaaacaggcaataagaagcgttttgtcttccgaaggagaggctcacttgctagtcactaccgtgaaaaagtccggtaaaccagagcccaaaaacaagagcaaggacaacagtggcactattattgctggtttgtcagtggcttgtgttgcattggtggctcttatatgtctgtgttgctgtgcttgtcgtggaagcgaagacccagaatcatcatatgatgacaaaccactgctgagtttgaatatgagtgatttatcaggttgggggcattgtcaaccagttcatcagcgagccagcgtaaagaatttaaatttcctcctataaaggcagaagttagagaaatgtcaatgaagtcagagtttgagcgacgcagcaatgtgcaggcgatgaaactaagttctcatgaaataactaccattgctggacgtccggcgacctctactaattctcaggatgtgaaatctgctgttgctgcagttccttctagtaatgccagcgacagcatatgtaaacctgcagctggtccagcaccagcaccaccaccaccaccacgtccaggttatcctctcccaaaggctcctcctgcaccatctgcaccaacaccaccggtaccacctccaaagatgcctacagctgctggttcgagcaatccacccccaccaggacccccaccgcctcctgctcccaggcctgcagttggacccggacctccaccatcaccaagtagtgccggacccggacctccacccccaccaggtagaggtggagctggacctccaccaccagccatgcctggtggtccaaaagcgcgtggtccaccaccattgaagaaggcagggaatgttgcaggtcctcctgtggcagacaataaaacaaagctgaagccattcttctgggataaagttactgcaaatccggatcaagcaatggtgtgggatcaaattaaagcaggatccttccagtttaatgaggagatgatcgagagcctttttggttgtcatgctgctgacaagaaaaatgctgacggcaaaaaggatttagcagcaaaggatacccctcaatttgttaggatactcgatgctaaaaaggcacagaacttagcgatatcactgaaggcattgagtgtttcagctgacgaaggcatgaactccctattgatctgatacaaaccttgataaggtggactccaagcagcgacgaggagctaaggcttcggttatacaccggggagctcactcaactgggtcctgcagagcaattcttgaggaccatcattgacataccttacctctatcagcgcctggatgtgttgcttttcatgtccactttgccggaagaagctgcaaatgcagaacaatcatttaaaaccctggaggtggcctgccatgagcttcggaacagccgtctattcaagaagctgctagaggctgtactcaagactggcaaccggatgaacgatggcacctttcgaggtggggcccaggcgttcaagctggacaccctcctgaagctctcagacgtgaagggggtcgacggcaagacgacgctgcttcactttgttgtccaggagatcattcggtcagagggcgtgcgtgccgttcgggccgccaaagagcagaacaacagcagcatatccagcgtgacttctgacgatctcaccgaggatgtcagcgatgacacggagcactacaagcagctaggcctgggcgttgtttcgagcctgggagacgacctccagaacgtgcggaaggcagcaatcctggacgccgatacgctgaccatctcggtggcgagcctggggcacaagttggtgaaggcgaatgagttcttgaacacgggcatgaagagcttagacgaggacagtgggttccatcgcaagcttggcgagttcatcgagcagtcccaggtgcgtgtgacccagcttctggaggaggaaaagaagctacgggcgctggtacgcactactgtagactacttccatgggagcacagggaaggatgagggcctacggctgttcgtcgttgtccgcgacttcctgggaatcctggacaaggtgtgcagagaggtgaaagaggcggctgccaaggctgctgctaataacaagaaaccttcagcggcaggatcaggatcaaagggaaggcaaccgtcgcagtcttcttcgtcgttccgtgatcctcgacagcagctggtgcccgcaattaaagatcggaggagtgcagcggcacgcagctctagttcatcttctgattctgactgactgacagcaaagaatttgtgcagatcacaccagattgatgaggtgatatgggagcacagcaggtagaagagttagcggctatctagttatggattgactcgcttacagcagaatgaaaaagagttagggacactacgccctggtaggttaatttagtatgcacatgatctcaggctctcagctttcgcctccgtaaatattattttatacaaatgtacatcctagatatgtatacaaagatcgttcatggcttaatgaataatattattttatacaaataccttataatatatattgtttgtg

SEQ ID NO: 9538 - DNA, 2948 bp, Zea Mays
ctctcttctcttctcatctcactatctcagcgtgtgaatgtgtgaaatatgtgatcaaaaccagggtggcctctccctctcgctcgctcgctcctcactccccctataaaagccgccgcggcctcctcctcctccctccgcaagaatccagcgagccaacaaggcaacaacaaacacctccctccttcttcacttccctgccgttgttgcaggaagcaagcgagggcacacaaaccgacaaggccgcccacgcgcgcgtcggccgccgccgttgccgaccagcaggcaggcagcatggtcgtgaacaacaaggtggacagcctgtcgtacgacgtcgaggcgccgccgccctctgccgccggcgccgccgcggggcaagcgccaccgccggcgtcgccagctccggcgccggcaccggcaacccacgcgcccgtgacgcgggaaggcggcgcggcgtcggtgctggagctgcacaaggtgtcgctgccggagcggcggacgacggcgaaggcgctgcggcagcgcctggccgaggtgttcttcccggacgacccgctgcaccagttcaagaaccagtcgtcggcgcggcgcctcgtgctggcgctgcactacttcttccccatcttccagtgggggtccgcctacagcccgcgcctcctgcgctccgacctcgtcgccggcctcaccattgccagcctcgccatcccgcagggaatcagctacgccaagctcgccaacctgccgccaatcgttggcctatattccagcttcgtgccgccgctcatctacgcgctgctggggagctcgcgggacctggcggtggggccggtgtccatcgcgtcgctggtgatggggtccatgctccgggacgccgtgtcgccggacgagcagccgctcctctacctgcagctggccttcaccgccaccttcttcgccggcgtcttccaggcgtccctgggattcctcaggctgggcttcatcgtggacttcctgtccaaggcgacgctgacgggcttcatgggcggcgccgccgtcatcgtgtcgctgcagcagctcaagggcctgctcggcatctcccacttcacctcccacatgggattcctcgacgtcatgcgctccgtcgtcaaccgccacgacgagtggaagtggcagacgatcgtcatgggctccgccttcctcgccatcctcctcctcacgcgccaaatcgtgctcccctggcgtcggtgatcatctccaccatcctctccttcatctggaaatcccccagcatcagtgttatcggcatcctccccaggggagtgaaccctccttcggcgaacatgctcagcttcagcggctcctacgtggcgctgacgatcaaaaccgggatcatgacaggcatcctgtccttaacagaagggatcgcagtgggcaggacctttgcgtccatcaacaactaccaggtggacgggaacaaggagatgatggcgatcgggctgatgaacatggcgggctcctgcgcctcctgctacgtgacgacggggtccttctcccggtcggcggtgaactacagcgcgggctgcaggacggcgttgtccaacgtcgtgatggcggcggcggtgctggtgacgctgctgttcctcatgccgctgttccactacaccccgaacgtgatcctggcggcgatcatcatcacggcggtggtggggctggtggacgtgcgcggcgccgccaggctgtggaaggtggacaagctggacttcctggcgtgcgtggcggcgttcctcggcgtgctgctggtgtccgtgcagacgggcctgggcgtcgccgtcggcatctcgctcttcaaggtcctgctgcaggtcacccgccccaacgtcgtggtggagggcctcgtcccggggacgcagagctaccgcagcgtggcgcagtaccgcgaggccgtccgcgtgccgggcttcctcgtcgtcggcgtcgagtccgccgtctacttcgccaactccatgtacctggtggagcgggtcatgcgctacctccgcgacgaggaggagcgcgcgctcaagtccaaccacccctccatccgatgcgtcgtcctcgacatgggcgccgtcgcggcgatcgacaccagcggtctagacgcgctgtccgagctcaagaaagtcctggacaaaagaaacatcgagctggtgcttgccaacccggtggggtcggtggcggagaggatgttcaactcggcggtgggcgagagcttcgggtcgggccgcctcttcttcagcgtagcggaggccgtcgcggcgggggcgtgcaaagcggcgcagccctgacgacgacgacaggctgatccctgaggtgccgcacgggagcatgcataggaataggatgggtcagagacagactaccggtgctgctagtggtagtagggcaggacgacgtacgaataacatggtgatggcctctcttcctccactccgatgcgatgcgagtgtgcgacgcaggggaggggagaagagtttttgaaggatgtgaccagttgctgttgtagttgttgtcaagtacgtagtaatgaaacgagaattgctgcgtggcaattcaggcctgttttttctttttgcatcaaggaaaaataagtgctggtacagatgagattattttaactagaaccaagttacttgccagtaaaataagaagcttccatataaacttgaaacaaaagaaaaaggagacacgattctcagttcaacctttatggattctggtttcttgtcgtcttcttttcttaatgcaaacttgtaacaagtatgttttgttagaaactattttgtgaatggggtttctagctgagttgcttaattagatggtctgagtagtattcctaagatcataaagatgctttaactgatttcaaaaaaaaaaatctcatttaacccacgacacaattacaagtctaagacttactgactaagtttgac

SEQ ID NO: 9539 - DNA, 903 bp, Zea Mays
gaccagtaaaggagttgcgcgcgaaaaagttgacgcgggagtggatgcatgggatttgcatgccaaggagactgtcggggaattgggcgcctacaggtcctgcaaggagggttttgcattttcccattgtaccacctgcaaggctccatattatttgagggttcattcccacactgacaggaaatggcgaacactgaagtttcgtttctttgttactagagatatactattcatctttgctctagtccagactgtcatctctgcattggcatacttggtacattttcttgatgggtaccagcaatattggttgaggacagcctggggttttgataaccaagttagtttttattacatatgtggtgcattattattttttgctctattgggactatcaggttgcttcataacctgttatgaccgaagagtacgaaatgatttggctcagccttgtcgagaattatgtctttgttgctgtcaaccagggagtatgtcgtagaggatgtcgatggcgagcgcacagactggtgtccgccgccgctccctgcagagcacatcagccagctgaggtctctggggcttctataatagctagggtactcggcgtggcattaccctacccagctgtacaggaggcgatacaaaagcaggaagtcaggcatactgcgttgaaatgtggcaatattgatatcttctttttttgtacattgtaatggcaacagtttcttcctgacaaccaaaaagttttataccaagtgaaatcacgtactttacgaagtctgcgtggcttctcacctctccaagtgactttgtcatgtttaaattcgcgtatcagcctatcggcctatcctccctcattcagaataacaattgacaacggggattcatcgaattctatactcc

SEQ ID NO: 9540 - DNA, 1498 bp, Zea Mays
gaccagtaaaggagttgcgcgcgaaaaagttgacgcgggagtggatgcatgggatttgcatgccaaggagactgtcggggaattgggcgcctacaggtcctgcaagtcacagggcaggcacataagcatctcttcctctccttttggcttccctcctcttgggtttgcactgcccctgctcttgacttggatgtgcactgcctctactcgacttggatatgctctgcagttcgcatctcctctgcagctctgtttccctcctcttctgctgtttctttccctgtctttcctctgcttgtgctttgttatattgatgctgaccggaagtgctcgagttctttgtttttacagctgatagcacaatggtatattatactccactcggaattccaatatgttggtgcagtggttagacgggggttcccaggagggttttgcattttcccattgtaccacctgcaaggctccatattatttgagggttcattcccacactgacaggaaatggcgaacactgaagtttcgtttctttgttactagagatatactattcatctttgctctagtccagactgtcatctctgcattggcatacttggtacattttcttgatgggtaccagcaatattggttgaggacagcctggggttttgataaccaagttagtttttattacatatgtggtgcattattattttttgctctattgggactatcaggttgcttcataacctgttatgaccgaagagtacgaaatgatttggctcagccttgtcgagaattatgtctttgttgctgtcaaccagggatgtgtgcagattgccatctacctggcacgttatgcatgtggactgactgcaccacctgcttcgaaggttgtgctaccacagctggcgagtgtggtggttgcttgggaggtgctggggaagctgggctacctctgcttctcatcatgggggttattgtgcttgggcttttcacggtcatcggcatattctacagtgtcctggtcgcgacaatggttggccagcggatctggcagcggcattatcacattcttgcaaaacgaatgctaaccaaggagtatgtcgtagaggatgtcgatggcgagcgcacagactggtgtccgccgccgctccctgcagagcacatcagccagctgaggtctctggggcttctataatagctagggtactcggcgtggcattaccctacccagctgtacaggaggcgatacaaaagcaggaagtcaggcatactgcgttgaaatgtggcaatattgatatcttctttttttgtacattgtaatggcaacagtttcttcctgacaaccaaaaagttttataccaagtgaaatcacgtactttacgaagtctgcgtggcttctcacctctccaagtgactttgtcatgtttaaattcgcgtatcagcctatcggcctatcctccctcattcagaataacaattgacaacggggattcatcgaattctatactcc

SEQ ID NO: 9541 - DNA, 3471 bp, Zea Mays
atggcgagcgggggaggggggattcgggcgacgacttcggggaggatgaagtcgcgagggtggggagattcaagcgacgactttgggacaccggctattgcgctgaggcgtgggggcgactgtagtggcacggcgagttcagactccagcgccgtcttcttcgcggtcgccttttgcgctccatcccctgggctttccgtcacggcggccgcagccatggtggagatgcggcagcggaggaagccgctggtgctcgcctccacgcaggcgctcctcgactcgcttccgggggatcgcccgccgccaccgccgcagaagccggtgcgccttaaggccggcgtcctccgattcccctccggaggtggtggcgccgagttcggggagctcgcgtctttcgtcggcatccctgcccctgctctccgacggctcgcggtcgtcacgggtactcctgatgtggaaagcgcacagtggttaggcatgttgctaaccatcttggtctgcatgtggtcgagtgtagctgtcatgatctgatgacatcatcagaaagtggggcacctgctgcacttgcaactgcctttaaagaagctcagaagtattctccttgtataatacttcttcgccactttgatgcaattgggaatgcatcctcaaacgaaggtccacagtctgagcaatctgggattgcatcgaacattgaatctgtcattaagcagtacattggacaacgttgggttgctaaggattcactgccaggaaaagatgtaaatgggagctcatacctcgtggagcctgaatgtgtaagctctcttcaaatcatactagttgcaactgcggacagttctgaaggaatgcaacagtcaattagaagatgcttccgctatgagatcgacatgaagactatgaatgaagaacagagaaacgaactgatatctgagacacttcaaggcattcctaaagttgctgatgagagtatttgtgacaagttcataaaagatttagcagcgcaaacgtcaggtttcatgcccagggacatacttgcattggtcgcagatgctggtgtgtcttttgcgcataaaattgcagcagggaaagatagcaaagcaatcagtaagcatacggaggtccttccagaaagctcttctgccactcaaaatgaggaacaccatttcagcaaagaagatattatgtcttccttggaacgagccaagaaacggaatcgtgctgcactgggcacacccaaagttcctaatgtcaaatgggaagatgttggtgggctagaggatgtgaaaaaggttattctagatactattcagttgcctctgatgtacaagcacctgttttcttctaaattgcgcaagcgatcaggtgtcctgctatatggacctccaggaacagggaagactttactcgcgaaagcagtagcaactgaatgctcattgaactttcttagcgtcaaaggtccagaactgataaacatgtatgttggagaatcagagaaaaatgttcgggatatttttgagaaggctaggtctgcacgcccatgtgtcattttctttgatgagcttgattcccttgctcctgcacgaggatcctcagcagattctggcggtgtcatggacagggttgtttcccagttacttgtggagatcgatgggttgagtgacaacagccaggaccttttcattattggggctaccaataggcctgaccttcttgattctgcccttcttcgccctggtcggttcgacaagcttctttatgtcggtgtaaatactgaggcatcatacagggaaaggatccttaaagcacagacacgcaagtataagctgcacaagaacgtttctctcttgtcagttgcgcagcgttgtccaccaaacttcactggtgctgatatttacgcgctgtgtgcggatgcatggtttcatgcagcaaagcgatcagttgaaacattcgaaatcgatccttcaagaagtaatgaagccagtgccgaagaagtcatcgtcgagatcgacgattttatcacggtgttaggagatatcgcaccgtcgctctctctggacgagctacaaaactacgaacagttgaggcagaagatcgaaggaccttctagatgaagttgggtttccactccctgctgacattcttaaactgctaacacaccaaaacattccctgtcttacattttcgttcgtacacaagttttcctccctgaaaacttgggcacttctatatccattcctgatttatacaatcacatccttgtagcagcatctgtattgacatcagaatgacattttctctgaagagaaacatcctgtcattctttgttagcagctccgcaactattctgaatgagcccgtgaagtcaagcactcaaagccttacctgggaaacaaaatgctattcctgacctgaaggaagcatccaccaatacagctagtttgggtacacacgctgaaccagctagttcgcctgggagaggcctctgtctcgtttagatgccatcgtctagaagttgtatcggaaaaattataagcgaatgttgcaatgaacagagttccttgtactgctgtgatttgtcattggtcaaagagaactaactgcagcgtttgtctacctacaatacttgtttttttgttgttgctatcttgtagtgccagcagcgatgcctccttgttggtgctcggcaagtcggctggtgtgagcaaaatccgtacgtcgtcgtctccagtggtgtcattctaaactggatctgctgctctcgagaccgaacaactgcaacaaactcaggcagggactcagcatctacacatcctgttctacggtacggtgattgtgacacaaatcggctgcatgggaaccatactagctgccaagaaagatgaaagtgttttctccgacccaacctacaatgtgtctgttctttttgggaagagagatgagccactcctactagcttgcgcacgtcaacttattgagcacataagtggctcagcccggtcattggtgatttctctgggtctgaaagatcattctcagggaacgctgaaggatattactgtagctgtgatgattgaatagctgatgagctgggcatggggttggctcgatggttggcatattcagccccatcgataaagatactgtttagcattgcgcaagaggagccatcgtttataccatgcactaaattctggtagttttgtagttggaccttctatctacttggattaacaaaaggtggttttaagctggtgtcaaaatttgagtgtcaactttcacgctaaacaaaaggcactgtacactggtaaagcacttctgaggcgaatcatgcttttcgaggacaatttcggctatccgtgctggggctgccactgtggagctctgtgcgtactcctttgccgtctaggactagctaggagagctactgtactcgccactcacatcacggctttagaccaactccagcaa

SEQ ID NO: 9542 - DNA, 3715 bp, Zea Mays
atggcgagcgggggaggggggattcgggcgacgacttcggggaggatgaagtcgcgagggtggggagattcaagcgacgactttgggacaccggctattgcgctgaggcgtgggggcgactgtagtggcacggcgagttcagactccagcgccgtcttcttcgcggtcgccttttgcgctccatcccctgggctttccgtcacggcggccgcagccatggtggagatgcggcagcggaggaagccgctggtgctcgcctccacgcaggcgctcctcgactcgcttccgggggatcgcccgccgccaccgccgcagaagccggtgcgccttaaggccggcgtcctccgattcccctccggaggtggtggcgccgagttcggggagctcgcgtctttcgtcggcatccctgcccctgctctccgacggctcgcggtcgtcacgggtactcctgtgcttgtcaagaatactgacaataatgttgggaggattgtcaaagcagtattgtttggtaacccgtcccttgacaagtcctgctcagaacatactgaccaagtggtctctgcctctctctctggtcatgcaatgggcttcttaccttgtcgcacgttccctgctattggttttacatccatggatgaagatgttggttatgttagcccacttttggcattcaacttgggattgcatgtttcttgccttaaacttcttattcaaagagaagggcagcctttcaagttctgttctcgagctgaagagattgatgcaactgccagttctggaagtgatctttctcttcacttagaccttcttccatgccctcaagtgcctaaatatgcattgcatttacgagtttctgttgtgaggattcctgattgtggtgtgcttgcttctttaaagatatattcatcctttggaggaagtgagtaccaagacatggtagatcaagctttgaacgagtactttaagtttgataggttcctagcaagaggagatgtttttggtatacaaaacagttggaagtgtggctcaagctgctgcctggcatgcaataagcaggataataaactgaatccccgtaatatgatctactttaaggtgactggcatggaaccatcagatgaacctatacttcgtgttaattgcaatgaaacagcccttgtacttggtggagctgcttctgctgcaatccccccttattccttttttgcttcttctggtaattcagtaccattgcacagtgaagtagtggagcatttagcatctgtcattgcaccagcattgtgcccttcggatattttaccaaaaataaagttttccacttttttatatggcccgccaggatgtggaaagcgcacagtggttaggcatgttgctaaccatcttggtctgcatgtggtcgagtgtagctgtcatgatctgatgacatcatcagaaagtggggcacctgctgcacttgcaactgcctttaaagaagctcagaagtattctccttgtataatacttcttcgccactttgatgcaattgggaatgcatcctcaaacgaaggtccacagtctgagcaatctgggattgcatcgaacattgaatctgtcattaagcagtacattggacaacgttgggttgctaaggattcactgccaggaaaagatgtaaatgggagctcatacctcgtggagcctgaatgtgtaagctctcttcaaatcatactagttgcaactgcggacagttctgaaggaatgcaacagtcaattagaagatgcttccgctatgagatcgacatgaagactatgaatgaagaacagagaaacgaactgatatctgagacacttcaaggcattcctaaagttgctgatgagagtatttgtgacaagttcataaaagatttagcagcgcaaacgtcaggtttcatgcccagggacatacttgcattggtcgcagatgctggtgtgtcttttgcgcataaaattgcagcagggaaagatagcaaagcaatcagtaagcatacggaggtccttccagaaagctcttctgccactcaaaatgaggaacaccatttcagcaaagaagatattatgtcttccttggaacgagccaagaaacggaatcgtgctgcactgggcacacccaaagttcctaatgtcaaatgggaagatgttggtgggctagaggatgtgaaaaaggttattctagatactattcagttgcctctgatgtacaagcacctgttttcttctaaattgcgcaagcgatcaggtgtcctgctatatggacctccaggaacagggaagcgtcaaaggtccagaactgataaacatgtatgttggagaatcagagaaaaatgttcgggatatttttgagaaggctaggtctgcacgcccatgtgtcattttctttgatgagcttgattcccttgctcctgcacgaggatcctcagcagattctggcggtgtcatggacagggttgtttcccagttacttgtggagatcgatgggttgagtgacaacagccaggaccttttcattattggggctaccaataggcctgaccttcttgattctgcccttcttcgccctggtcggttcgacaagcttctttatgtcggtgtaaatactgaggcatcatacagggaaaggatccttaaagcacagacacgcaagtataagctgcacaagaacgtttctctcttgtcagttgcgcagcgttgtccaccaaacttcactggtgctgatatttacgcgctgtgtgcggatgcatggtttcatgcagcaaagcgatcagttgaaacattcgaaatcgatccttcaagaagtaatgaagccagtgccgaagaagtcatcgtcgagatcgacgattttatcacggtgttaggagatatcgcaccgtcgctctctctggacgagctacaaaactacgaacagttgaggcagaagatcgaaggaccttctagatgaagttgggtttccactccctgctgacattcttaaactgctaacacaccaaaacattccctgtcttacattttcgttcgtacacaagttttcctccctgaaaacttgggcacttctatatccattcctgatttatacaatcacatccttgtagcagcatctgtattgacatcagaatgacattttctctgaagagaaacatcctgtcattctttgttagcagctccgcaactattctgaatgagcccgtgaagtcaagcactcaaagccttacctgggaaacaaaatgctattcctgacctgaaggaagcatccaccaatacagctagtttgggtacacacgctgaaccagctagttcgcctgggagaggcctctgtctcgtttagatgccatcgtctagaagttgtatcggaaaaattataagcgaatgttgcaatgaacagagttccttgtactgctgtgatttgtcattggtcaaagagaactaactgcagcgtttgtctacctacaatacttgtttttttgttgttgctatcttgtagtgccagcagcgatgcctccttgttggtgctcggcaagtcggctggtgtgagcaaaatccgtacgtcgtcgtctccagtggtgtcattctaaactggatctgctgctctcgagaccgaacaactgcaacaaactcaggcagggactcagcatctacacatcctgttctacggtacggtgattgtgacacaaatcggctgcatgggaaccatactagctgccaa

SEQ ID NO: 9543 - DNA, 3763 bp, Zea Mays
atggcgagcgggggaggggggattcgggcgacgacttcggggaggatgaagtcgcgagggtggggagattcaagcgacgactttgggacaccggctattgcgctgaggcgtgggggcgactgtagtggcacggcgagttcagactccagcgccgtcttcttcgcggtcgccttttgcgctccatcccctgggctttccgtcacggcggccgcagccatggtggagatgcggcagcggaggaagccgctggtgctcgcctccacgcaggcgctcctcgactcgcttccgggggatcgcccgccgccaccgccgcagaagccggtgcgccttaaggccggcgtcctccgattcccctccggaggtggtggcgccgagttcggggagctcgcgtctttcgtcggcatccctgcccctgctctccgacggctcgcggtcgtcacgggtactcctgtgcttgtcaagaatactgacaataatgttgggaggattgtcaaagcagtattgtttggtaacccgtcccttgacaagtcctgctcagaacatactgaccaagtggtctctgcctctctctctggtcatgcaatgggcttcttaccttgtcgcacgttccctgctattggttttacatccatggatgaagatgttggttatgttagcccacttttggcattcaacttgggattgcatgtttcttgccttaaacttcttattcaaagagaagggcagcctttcaagttctgttctcgagctgaagagattgatgcaactgccagttctggaagtgatctttctcttcacttagaccttcttccatgccctcaagtgcctaaatatgcattgcatttacgagtttctgttgtgaggattcctgattgtggtgtgcttgcttctttaaagatatattcatcctttggaggaagtgagtaccaagacatggtagatcaagctttgaacgagtactttaagtttgataggttcctagcaagaggagatgtttttggtatacaaaacagttggaagtgtggctcaagctgctgcctggcatgcaataagcaggataataaactgaatccccgtaatatgatctactttaaggtgactggcatggaaccatcagatgaacctatacttcgtgttaattgcaatgaaacagcccttgtacttggtggagctgcttctgctgcaatccccccttattccttttttgcttcttctggtaattcagtaccattgcacagtgaagtagtggagcatttagcatctgtcattgcaccagcattgtgcccttcggatattttaccaaaaataaagttttccacttttttatatggcccgccaggatgtggaaagcgcacagtggttaggcatgttgctaaccatcttggtctgcatgtggtcgagtgtagctgtcatgatctgatgacatcatcagaaagtggggcacctgctgcacttgcaactgcctttaaagaagctcagaagtattctccttgtataatacttcttcgccactttgatgcaattgggaatgcatcctcaaacgaaggtccacagtctgagcaatctgggattgcatcgaacattgaatctgtcattaagcagtacattggacaacgttgggttgctaaggattcactgccaggaaaagatgtaaatgggagctcatacctcgtggagcctgaatgtgtaagctctcttcaaatcatactagttgcaactgcggacagttctgaaggaatgcaacagtcaattagaagatgcttccgctatgagatcgacatgaagactatgaatgaagaacagagaaacgaactgatatctgagacacttcaaggcattcctaaagttgctgatgagagtatttgtgacaagttcataaaagatttagcagcgcaaacgtcaggtttcatgcccagggacatacttgcattggtcgcagatgctggtgtgtcttttgcgcataaaattgcagcagggaaagatagcaaagcaatcagtaagcatacggaggtccttccagaaagctcttctgccactcaaaatgaggaacaccatttcagcaaagaagatattatgtcttccttggaacgagccaagaaacggaatcgtgctgcactgggcacacccaaagttcctaatgtcaaatgggaagatgttggtgggctagaggatgtgaaaaaggttattctagatactattcagttgcctctgatgtacaagcacctgttttcttctaaattgcgcaagcgatcaggtgtcctgctatatggacctccaggaacagggaagcgtcaaaggtccagaactgataaacatgtatgttggagaatcagagaaaaatgttcgggatatttttgagaaggctaggtctgcacgcccatgtgtcattttctttgatgagcttgattcccttgctcctgcacgaggatcctcagcagattctggcggtgtcatggacagggttgtttcccagttacttgtggagatcgatgggttgagtgacaacagccaggaccttttcattattggggctaccaataggcctgaccttcttgattctgcccttcttcgccctggtcggttcgacaagcttctttatgtcggtgtaaatactgaggcatcatacagggaaaggatccttaaagcacagacacgcaagtataagctgcacaagaacgtttctctcttgtcagttgcgcagcgttgtccaccaaacttcactggtgctgatatttacgcgctgtgtgcggatgcatggtttcatgcagcaaagcgatcagttgaaacattcgaaatcgatccttcaagaagtaatgaagccagtgccgaagaagtcatcgtcgagatcgacgattttatcacggtgttaggagatatcgcaccgtcgctctctctggacgagctacaaaactacgaacagttgaggcagaagatcgaaggaccttctagatgaagttgggtttccactccctgctgacattcttaaactgctaacacaccaaaacattccctgtcttacattttcgttcgtacacaagttttcctccctgaaaacttgggcacttctatatccattcctgatttatacaatcacatccttgtagcagcatctgtattgacatcagaatgacattttctctgaagagaaacatcctgtcattctttgttagcagctccgcaactattctgaatgagcccgtgaagtcaagcactcaaagccttacctgggaaacaaaatgctattcctgacctgaaggaagcatccaccaatacagctagtttgggtacacacgctgaaccagctagttcgcctgggagaggcctctgtctcgtttagatgccatcgtctagaagttgtatcggaaaaattataagcgaatgttgcaatgaacagagttccttgtactgctgtgatttgtcattggtcaaagagaactaactgcagcgtttgtctacctacaatacttgtttttttgttgttgctatcttgtagtgccagcagcgatgcctccttgttggtgctcggcaagtcggctggtgtgagcaaaatccgtacgtcgtcgtctccagtggtgtcattctaaactggatctgctgctctcgagaccgaacaactgcaacaaactcaggcagggactcagcatctacacatcctgttctacggtgattgtgacacaaatcggctgcatgggaaccatactagctgccaagtctctctggtgattctagcttaagaatgctgaccttttataatgaatgtaga

SEQ ID NO: 9544 - DNA, 1724 bp, Zea Mays
cccaaagcaagcagtagccaagaaaccgaagcaaagctgcaagctagtatcgatcctacaaccccatccatccatggaagacccctacacgagcttcttcaagaacagctactactactacgcctcctcctaccccgctgccccagctccccaccgcctccctcctcccatcccaccgtacaccaccctctacccagccgccgcgcctcagtaccaccaccctgcctgcttcttccagccgccagcgccgacgctgccgccgcctctcaacgacagcccgccgtcaccgccgctacgggaggctctgcccctcctgtcccagtcgcctactcgcgccgcctcccgggcccggccgcacccgcacgtggcggtggactccgactccgacgacgacgccgacgacttcctgctaagggaggccgccgtcggcagctccgtgaccccctcggcatcgacgcgcgcgccgctcttcgccgacctcaaccgcgtgccctcctgctgcgacgacgacggcggcggcgacccgatggacctggagcccgcggtcgcgctgcgcatcggcctgccacctgctcccgccaacggctgcggtgccccggaggctgacctcctgtccgggctgtccggaagggcgggctgtggtggcatggaggccgaggaggacgaggacgagtgcaaggtgggcgacggggacgaggtggtgccgttagggttcgcgtcgacgcccatcgggagcctcaacaaggggcagtactggatcccgacgccggcgcagatcctgatcgggcctacgcaattctcgtgccccgtctgctacaagaccttcaaccgatacaacaacatgcagatgcacatgtggggccacggttcgcagtaccgcaagggcccggagtccctccgcggcgtgcagccgacggcgatgctccggctgccgtgctactgctgcgcgccggggtgccgcaacaacatcgaccacccgcgggcgcggccgctcaaggacttccggacgctgcagacgcactacaagcgcaagcacgggctgaagccgttcctgtgccgcaagtgcggcaaggcgttcgccgtcaagggcgactggcgcacgcacgagaagaactgcggcaggctctggtactgcctgtgcggctccgagttcaagcacaagcgctcgctcaaggaccacgcgcgcgccttcggccacggccacggcgccttcggctgcaacaacctcgacggcgacggcgacggcgacggcggtgctggcggcggcgccaacggcctcgacgacgacgacgacgacggcgccgtctccgagatcgagcacgactactgcgccgccgcgcggtgatcgatcgtgcatcgatctgtacgtggtgggtgccagtgccacactagctagctagtagcttgcttgctctagtagtgctatatatacccggctgaccggcggtgttaatttcttgttctctcgcatgcattgttagtttgcggcggccgggctgtattacgtgttgcggccggcccggccccggcctgtcgttgtttgcttttgctctaattagggttgtggaggtcgtcctgatgatttatatccatctctaagctagctacctgaaggtagtagaagaagaatgctgtcgttattgggtgcgcatggttatatatctcgatggagaaaagaaacagcttcctgcctcaatatgatttcatgttttggcgtttcttaa

SEQ ID NO: 9545 - DNA, 1180 bp, Zea Mays
caggatcagttgcatgtttgttgcaaagttgaacaaagaaggaaagaggctctatctaggacatctgaagatgccttatctgcatcggaaaacacacttcatgacatagtttctcgatacagttacatggatctttggccatgctcatcaaaagaattggattatctagcgagacaagagtggcttgcgaaaaacattgttaagaaggttgagaaaccagctatgttaaatagcggtagcatgctagacaaaggtgctgcaggatttagtgcgagtgcgaggttattaccacaatctgccaaagttgttcgtcctgagacttctcaaatggttatttatgatccaagacagatgaaaggcccagagtttgcagcaactagcagtgggtacacgaaggaggttgaagccacgctcaaagtgctatcgccgtcgatggtgtcctttattaagaatttgcctgctattgaaggaccatcgccggatatcgatgtggtgctcagcgtgctgctgcagagcacattgccagttgcacagagtgctgggaaagcaggtggcgtgagtgagctctcaggcgttggaaaaacgggactgaaccagaatggatctgtccatagacctccaagggagagaaggaaggacgtggagaggcaaggggcgcaggaggaagaggatgcgtcggcggtgcagagcagggcagctgtgccacgagacatcttcaggcttcggcagattcagaggagccgtggcctgggtgtgggtggtgccgccgtttcgcagtctgggtcctcggcattttctttctcgggcggtggaagcgccttctctggggaccactcagctagcacagattagcctactcaccagacatgttcaacagctcagctcaaagctcaactgcgagtagtgagctcaaaggctacctccagcagatttatatcacattccttttctcatcccctatttcaaacatcactttgcaaacaatatcatctatagtttcatgtcccctattttacactacatgctggagacagtctaaggacataatgacatactagtagggtgcccgtgcgttgctacggcaacttaaaaattgatacaaaacaataacgcaatataattacaatctttgattgatgattttgtagctaacaaacaacgccaccatcagaaaggacac

SEQ ID NO: 9546 - DNA, 2586 bp, Zea Mays
ttcagatcagctcaacaaagataaccttgcgccgcctcctaagaagatcaagactacccagccaggttctacagaccctcaaaaccttaatcgttagatcatcgccgttctcatgaagaattccggaggaggcgccgcccatggcgatggcggcgacatctacaatgtccgggccgccgagatcctcgccaacgaggccctcctgctccccatcaatgaggccgccccaatctacgagaatctgctcgccactttccccacggccgccaaatactggaagcagtatgtcgaagcctacatggccaccaacaacgatgaagccgccaagcagattttcagcagatgcctgctcaactgccttcacattagtctatggcgctgttacatcaactttatcaggagaattaacgataaaaggggctctgagggtcttgatgagacgaagaaggcttttgatttcatgctcaactacgttgggaatgatgcagcttctggccctgtttggatggagtatattaatttcctcaagtccatgccggttgtgacgccccatgaagagtcgcatcgcatgactactgttcgtaaagtgtaccagaaggcaattttagttccaactaatcatgtagagcagttgtggaaggattacgagaacttcgaaaattctgttagccgcaccttggcaaaaggcttgttatctgaataccaaccaaagtttaacagtgctaaggctgtatatagagagcgaaaaaagtacattgatgatattgattggaatgtactggccaccccccctacaggctcgtacaaggaagagcaacagtgtatggcatggaaaagactcttggtatttgaaaaggggaaccctcaaagaattgatgctacaacagctaataggcgtatcacctttacttatgagcaatgcctgatgtatctatatcatcatcctgatatatggtacgattatgctatgtggcatgtgaagaatggttctatggattctgcatcaaaaatatttcagcgagctctaaaagcaatccatgattctgaagtacttaagtatgcctttgctgaaatggaagagtccagaggggcgatacagactgctaagacagtatacgaatctcttctaggtgaaaatgctagtgagacctcacttgcaaatattcagtttattcgatttctaaggagaactgaaggcactgaagcagcccgtggcacaaagtgtttttgaagcaggtttaaagaggtttatgcatgagccaggatatatccttgaatacacagacttcttgtgtcgtttaaatgacgatagaaatgtacgtgctttgtttgagagggcactgagcttacttcctcccgaggaatccacagaggtatggagacgatttgcacaatttgaacagaactatggggatttatcaagcatgcttaaggttgaacaaagaaggaaagaggctctatctaggacatctgaagatgccttatctgcatcggaaaacacacttcatgacatagtttctcgatacagttacatggatctttggccatgctcatcaaaagaattggattatctagcgagacaagagtggcttgcgaaaaacattgttaagaaggttgagaaaccagctatgttaaatagcggtagcatgctagacaaaggtgctgcaggatttagtgcgagtgcgaggttattaccacaatctgccaaagttgttcgtcctgagacttctcaaatggttatttatgatccaagacagatgaaaggcccagagtttgcagcaactagcagtgggtacacgaaggaggttgaagccacgctcaaagtgctatcgccgtcgatggtgtcctttattaagaatttgcctgctattgaaggaccatcgccggatatcgatgtggtgctcagcgtgctgctgcagagcacattgccagttgcacagagtgctgggaaagcaggtggcgtgagtgagctctcaggcgttggaaaaacgggactgaaccagaatggatctgtccatagacctccaagggagagaaggaaggacgtggagaggcaaggggcgcaggaggaagaggatgcgtcggcggtgcagagcagggcagctgtgccacgagacatcttcaggcttcggcagattcagaggagccgtggcctgggtgtgggtggtgccgccgtttcgcagtctgggtcctcggcattttctttctcgggcggtggaagcgccttctctggggaccactcagctagcacagattagcctactcaccagacatgttcaacagctcagctcaaagctcaactgcgagtagtgagctcaaaggctacctccagcagatttatatcacattccttttctcatcccctatttcaaacatcactttgcaaacaatatcatctatagtttcatgtcccctattttacactacatgctggagacagtctaaggacataatgacatactagtagggtgcccgtgcgttgctacggcaacttaaaaattgatacaaaacaataacgcaatataattacaatctttgattgatgattttgtagctaacaaacaacgccaccatcagaaaggacac

SEQ ID NO: 9547 - DNA, 5955 bp, Zea Mays
atgacggcggaggggacggcgtgcaacggcgccggcgaggcgctgaaggcggaattcgcgccggagaaggtggtggccgtgtccctggaggagaagccggtcggggagcgcgagggcgaggacgtcggcgggccgttcttgatcgtgaacggcggcgattccgacgggcactccgagcctggctcagatctgggcaaggcgcccgacgaggaccctgcatccgaggaggacgacgtgcccaccttcaatgcagctccggacgcggccgtggccggagatcacgggaccgccgaagggcaagttggtgctcagggtgcggcactcggtgcttcgtcggcggacgggggtgatcgtgcttccgacgggtctgagggtagcgcggatgagagcagaggtgacccaagttccgattgtgttgccgaagtggcgcagcaggaggctgttggtgaagaggacagtggggcagctgctctggcgtcccgtgaatgcgaacctaccatcaccagtgctgactctgaggcacactatgtggattctgaggttgaagacaaggagggcacagtggatggtagtgctgttgttgatgccgttgaagcggtggtgcatcaggaagctagtacagagcaggatgaagatgctgctgtgatgtcctctggccatgatgatgccctaacgtctcccaagtcttgttctgctgccgtggagtccgaggttattagagaggatagcaaagaacagagtatcactgatggtgtggagccacagcagcagggtacagttggggcaagtactttggtggagaatgagcatctttgtgccgacatgatggctgattcatttgtagctgccaatgagcctgacagtcaagaggatgctgctgtgatgtcctctggccatgatgatgccctaacgtctcccaagtcttgttctgctgccgtggagtccgaggttattagagaggatagcaaagaacagagtatcactgatggtgtggagccacagcagcagggtacagttggggcaagtgctttggtggagaatgagcatctttgtgtcgacatggcggctgattcatttgtagctgctactgagcctgacagtcaagaggatgctgctgtggagtcctgcgggcacgatgatctgctaacttttactgagtctggttctgctgacattgagtctgaggtttatggagaggatagcgaacaaaaagagagcaacactgttgttgtggagatcgtggtgcagggcgtaggtagggcagatgtgctgatggcaaatgggcatctttgtgccgacacccaagctggttcttctgaagctactactgagcctgagaatcatgctaatggcagcaaactgactgatgttgcagaatcagtggagggggatgccggcagtggagaacaggatacaatggattcgtcgcaaaccaatgggcatatttatgttgccttgagtgctgattcttgtatagttccttctgagtccaaggcccattcctttgagacagatgggcaacgaactgatcagctacaagaggaagctccaaaacttgaagctgaagtattggagggagtgctaaaaccaactgaaaggaactgtgcaggtagtgttgagaaactcataggagaggaagttggcacagatgggcatgcaagcataggaggtacagctgatgcttatggggagcaagaagccaagcctatgcaggtagaaggtgaagtcacttgcggtattctcgaatttgaaaaagtggataaggatggtgaagagggtttgtgtgatgactacacggttggtgttgtttcttctaatgaggaaacagagcttcctatgaaggaaaaagtagatgaagctgtccccagtgttaatgttggtgggccagagaaagtaactgacaatacaagccaagataccaagacagttgattttattgatgaaatcacagcagagtcaaactttaaagctgaaaatatggttgaagtgaaaagtgcagctcgtgaagttgacaaaacagaggtaaaagatcttgcttttgctgatgaggctaatgtagctcctttacaccttcaacgtgactgtgaatctgttatggaaactatagagcatgagaaggtagaattaccaggtggttgtcaagctcatgaaattgtgtattcttcagaactagaaccgaagaaagagtttgagatgggggttgatggtgctgttccattgcaaggagctgcagcttctgttgcctctgttttccaccatgagccaatgtccattgatttgtctgagaatgatagcggtaaccattctggcccaactactgcgttggaatcctgtgaccatgtgcaaaatgaagagagcatatcccaagaaatttccatgaccactattgagcaacctatagctattgatcaagttgaacctgtcaacctgaatgtagatgaacttgtggttgatgatgatcaacctggttttgctccaaggtgtgaatctgctaggctggataaacctggatgtacttccaaaaaggatgattcaaatgagattgttgaagatagcaaatcactggaaaatcagttagaaatttgcaatgcagctactatgtctgatgagtgttcctccagaaatgcaaatgaagatccctctccaattaatatgtctgctgagtgttcctccagaactgcaaatgaaggtttctctccaattaatgaggcttctcatctagctgaggagtcttgcctttcagacaagtcatacaatgctatcagttatgaaaatggaaatgggcctgctaaatcttctgaggagcctgacaagtcatgcaatgctatcatttgtgaaaatgaaaatgagcctgctaaatcttctgatgtggttgaaaccagatgcgtggaagcattagcgccttcatctgttggcacggttgtcacggcagaacagaaggacaatggacaccgtgcttctggtgagtggcatggagataatgtgcaagtcattggacaacaacagaagatctacataattaaagttccaaagtttgccggtgatgatctctggaataagatccaggctgcacaggctcacttagaccacctgacccaggaaagagatgcaattaaccgtcgtaggcaaaagcaaaagggagaagcttgaggcagcacgtagagaagagcgggaagctaggactgcacatggagataagaagaatgatttaaataatgtacgttcggtactagggaaattgcaccaagcaaattcagctgaagaacttgatgagctgattgcgaagaaagagaggactatgcaacatgagaccatttctttgaaagaagaaaaacttttaattaaagagattaatgaattaaaagcccaacggaagcagctatccaccactatgggctcaaaggctgaaatcaatgaggcatttgaccaaaaagatcacattcatgaaaggcataaggtgttaaagaaggattctgatgttttattgaccaacctgaaattcctagaggaaaacacaagaaagattcaaaagtctttcgaagatgaaagaacaggtctcagaaaattaacagaggaacaccgagcagctaatgaaatacgtcaaaaggcctacattgaatggactgagcttagatcagagccctccaagaagaatgaatacttcttcaggtacagggatgaccggaatgcagcagaaattttcagagctaatggcgatataaatggacttaaatcacactgtaatagtcagattgagggagtcatggaaatgtggaacaaaaacgaggaattccgcaagcagtatgttgagtcaaacaaggttagcacactaaagagattagggacccatgatggacggaaacttggccctgatgaggaccctccagtcatatcaagcagaagaccaagcagcatctatccattgtctgcctcaagcccgggagtggccactttagcttcaataccagcacctgtggtagctgctccagctgcagtctctgccaaagaggactcatttcctgttttggaagccccccagaccagcaagcgcaccaagtcaaaagcatctgatatctgtgcccagaccgagaacaactctgttatagtatcggaggcagaggctttggaacagactttgaaagagaaagctcgtctattggaggaacaattggagttagctaggaaggcagaggagttggcacggaaggaggaggaattaagcaaagagagggctgccgctgagaaggagcggcttaggatggagcagaaggctaaggccaaggaggccgaggagaggaagaggcggaaagccgagaaggacaaggagaaagccgagttcaaagcgcgcaaggaagctgaggagagggagaagaagaaagccaagaaagacaaaaggagaggcacggcaccagcagattctagcctcactggtgacgggcacgccgcggccttggccacagcagacactgacagcaacgcatcggacaacccgagggaagctgaggctcctcaaccggcggcggctcccaagaggctgtctaggcccgcagcggcaatcaagcagctgaacagggtgcagcccatgccggcgccgctacgtaacaggggcagaaggagactgcggcagtacatcctgatcgcggcggccgtgctatcggggcttgcgttgttcgtggcaggcaactatattcccaggctcaagtcggttcactcctaagtttatctgtaggaaaggggtgctaatctgtcgcggtgaacctgggtgtgattcgtattatttcgattattctccggttggtttgtactattttttttttacctcatataggttggttgtgaaagatgggggtgcattgtgttaaaagttgttttacaggatggtggtgaaatcttcgttagaacatggataataattagtactatagattctttcttgtagtagccttagcgtatatgatatttactggatatgtcgttcgccctatcgctctgccttaaatatctacataaatacagacatacagtagaataaatagacacaaacactgtatgataaacttgaataaatatctgatcgcttttgctcaacatacgaattaagcttagattctcctgcttctgccaatgttctcgacgaaggcctccccaatgccctccccgatggcctcgatgaggccgccgatgaccccgaacagcgcgttgacggtgaccctggcggcggtggccagcgcgctcctcttctccggcggcacgacaccgtgcacgtagagcccgttcaccacgtccttggcgcacctggcgtggaggtagtagccgcagggcaggcactggtacgcgtgctgccccgcgcgcctcgtccgcctgcacgcctggcacacgaagctcgtctgctccgcgccgtcccgcgccaggagcagcagcgggtgctcgtgcacggccgggagctccatccgccgcgccatcgccgcgcagcacgggtgcatgtcgaagctgcacgacgcgcaccggaacgagaagcccctcacgggcttaccgcacacgtcgcacctgcagcggaggaagccgcccgacgccggcttcacgaagaagaggaggtgcgggtgcttggggtggaacgggtgctcgtgcagcgacggcggcgccagcgcgcaggactcgtgcagctggaagccgcaggcctggcacatgaaccgcttcccggcgccgtactccttgcaccccatgcacatgaacaggtgcgggaagtcgaaccgggccagccggtgctccgggtggctgaaatgcaccatctcggcctcagcctccggcccgtccacgacgcgatctctcgtctccggtgcatcgtcttcggacgacgacgatggcagccggtggccgctgagctcccttgagctcatagacacgcacctgctgttcacgctgttgcttttacctctacctgtaccattgccattt

SEQ ID NO: 9548 - DNA, 3466 bp, Zea Mays
ttttcttttctttttttttctttcgttcatggggtccaatggcccgacctttctccctcgaaaggtgaagggctgaaggcgagaaagaagcttcaaaacgaatcatccatcatcttgccaacccagcaaccctgccaagccatcgcattccagctctgcctttgcaagatcgccgccactcgcagccagcaagcaaccattccaccacatacttttttcctccggtttcgtccggcggcgagcgagcgaggtagcgcttgtccatgccgcggccgtgagggtgatcgaacgaggactacttcggcctagcgcggggagccatgtcggcgtcggcgtcggcgggtaagctggcggcggcgctgcaccggaggacgcgcagggtcacgtccgcgctggcgtgcgcggccctggagtgggtcctcatcgcgctgctcctcgtcaacggcctgctggcctacgccgtcgccaggttcgcggactacttcggcctcagcccgccgtgcctcctctgctcccgcgtcgaccgcctcttccaggccgaaggcggtggcggcggcgacgctagcggcgccggcgcgcggtggctgcgggacgccctctgcgacgcccacgccgcggagatctccgcgctggggtactgcctccgccaccgccggctcgctgaggccggagagatgtgcgtgggctgccgcccgtcgtcgtggaaggagaggacaagcgacgcaggtgcgtgcgcctgctgcgaagctgctgctgtactgcgcgcttctcctgtgcgcgagctggaagatactacaagggatgcgcgtgtctcggagaaagaggtagaagatggcgaccagggctacgttctgctggctcaagatgatcacgaggaggagccggatgaggtcgaaaaccgacaacaagaaccgcagagcgaggtggatggccgacaacatctggaagacgaggtgatggctgccgttcaggacgaatccttggaattcatggatcaggtcgaagacatcacgatcgaggacgaccggttggtgtcggtggtggcgcttgacgagatgaccatcgccgatgattcgggtctccatcgggatgtagaagaggtggacggaacgaatcatgtagtagaagatgagcaggatccgagggatgtggatgtcggagcggttctggaggagaagaggatgttggattcctcggttgcaacgccggtcgatttgaccgaggactctgtcgtgcccaccagccccgtaccttgtcctgagacttcaacagacccatctcatcctgatcatagctccgtttcccaagacgatggagatgttcttgaagatacttccacggccgaggaagaacacatctttgtgcctcaagtatcggaagccgtttccgaggatgacaacagaacagctgctgaggtggacacgaactgcgaagtgtcaatcgggagcgatatatgcgaacgggaacaagatgagcatgtcgttccatttcaagatttggcagcatttgaggagctggttgctccattggcaactggagatgatctaccattgccatcggaggtcctagagccacctgaccaagtagaagcaggtgaagttgaacaggaggacgtgaccacaagcacgggattagacctccaaccaaatgaacagaacgagatcgaagaagacagagcacctgagacgccgacgaacagcgtcgccacacaacgctccgacagaatgttcttgctcgagaggaaacggtcgctgtcgctgtctctggatgggagcgtagcgagcgagatggaaggcagcgagccgtccaccgtggaccagctgaaatcagcgctgcaggccgagcggaaggcgctcggcgcgctgtacgccgagctggaggaggagcggaacgccgcggccatcgcgaccaaccagacgatggccatgatcaaccggctgcaggaagagaaggcggcgatgcagatggaggcgctgcagtaccagcggatgatggaggagcagtcggagtacgaccaggaggcgctgcagctgctgaacgagctggtcagcaagcgggcgagggagaagcaggagctggagagggagctcgagctgtacaggcagaaggtgcagcactacgaggacaaggagaggaggaggacggcgagcttcaaggccaatggggtaagccccagtggcagtggcacttccgtgtcgtccagcggcgaggacagcgacgggcactccgacgactactgcgagctcggcgactctcctgacggcggcaacgtccagagctcatcggatgctgcccttagctccatgagggaccaggacgacggcacgaagcacctagcggctctggacgattccttgacgtacttcgaggtggagagactctccatcctggaggaactcaagacgttggaggagaggctcttcacactggaagacgacgatatcaacaccagcaaagaagttactggccattcctcgagtgacatggatttaccacacgatggccttcagtcgccggagtacattctcaccggtgacaggccaagattcggaggaagggcctctatcagcagagggaagagccttctgcctctgttcgatgcagtcggcgacgaggcctgtgaccgaatgccgccatctgcaggagcaggagaggcagaccaggccgacgatgcagcaacgaagccggcatccgtgcttgtcaaagagcaggagaggctggcgatcatagaggaggtcgaccatgtctacgaaaggttgcaggcgctggaggcggacaaggaattcctgaggcactgcatcaagtccctgaagaaaggagacaagggcatggaccttctccaggagatcttgcagcaccttcgcgatctccgcagtgtggagcttcacgtcaagaatgccggtggtgccatggctgcaaattcagcctagcaagttcatctatacgcggtaacgatgacactactagcttggtatggattcagtcgattggattgtaggactccaaagcactgcattggtgatggtccctgcaaggtactgccggagttatagggaggctctgctcattttgcctgtgggccggaagcaagccctcccttttgtgctggtccagcactgccaactttttctgtcgtggtggtcgcctggtctggtcggtcggtcgtaggaatcattagcccttccaaagctgcacaaagctgaatcacggtgacagcttctgcagcatgcacggggcaaaagaaaaaagatagccccagtggagatgtggatgtttttttttcttgtctgatttaatcttttgattaactttggatttgtttgtgcgctgaggtagggagtcctcgtgtattttttttttggtgaggatgtagcttgaacggttggtatgtgcagtttgtgctttctcaatatccaggtttataatgaaaggaaaggcggtctcacgaagaaatccctgtggtaaa

SEQ ID NO: 9549 - DNA, 2714 bp, Zea Mays
atgtgccccatgtgcggtgccaatccttcttcctcgttccttcccctggccaggcttggtggagtgaggggggcgatgcgaggcggaaccgctccaaacgtgcgcggagcctggccatcgcggccgtccatcctcccacacgtgtcgctcccacgcgaccaccgtgcgtccgtgccaacaatatcactcgcccagtaccaggttcagcagcagcacgccgccgcacgcctcgcacgcgcgagcggccctactgctcctactcctcccacccgttcccctcttccgcatctgcacccgcggcacgagatcgagatcccggcagaccggtgggatgcagcaggcggggctggccgatgacgacgacgaggagatatgggtaaaggaggaggatgacgaggaggaggaggacgggtactatatggacccccggagcccggccgtgtggacgcccggcggcagggcgggagggacctcaaaccggcggcgcgcgcgcgaggagaaggagcggaccaagatgcgggagcggcagcggcgcgcgatcacggggcggatcctggcgggcctgcgccagcacggcaactacaggctgcgggcgcgcgccgacatcaacgaggtgatcgccgcgctcgcaagggaggccggctgggttgtcctccccgacggcaccactttcccctcttcatcctccttcgccgccgtggctgcacagccgccccgccccgtgatggtcgccgccgcgtcgccctccgccaccccgctcgcgctcccggcctcctcggcgctccccctccgcggcatcgcgcccgtcgccgcgcgccctatctcccaccgccccgcgcccgcgttcgctctcctgttgcccccgcgggccgccgcggcctcgcgatccccggccgacgacgttcccgacgggaattcctcgcacctcctcgccgtccccgtccctgtccccatggaccccgccgccgctgaagacgtccccgttgccaagcagctgcaggtgcccgatgtgtcgccgcgcccgcctgagcgggacttcgccggcacgccctacgtgccggtctacgtcatgctccctcttggggtagtgaatggtaacggtgaggtggtggacgctgacgagttggtcgggcagctgcgggtgctcaaggcatctggagtggatggtgtcatggtcgattgctggtgggggaacgttgaggctcacaagccgcaggagtacaactggactggctacaggcgcctcttccagatgatcagggaactcaagctcaagttgcaggtcgttatgtcatttcatgaatgtggtggcaatgttggagacgatatatccattcccctcccacattgggtaatagagattggaaggagcaatccagatatctactttactgacagggcaggaagacgtaatacagagtgcttatcatggggagttgataaagaaagggttttgcaaggcagaacagcagtggaggtatattttgatttcatgagaagcttccgagtagaattcgatgagtattttgaggatgggatcatctcagaaattgagattggactaggggcttgtggagagctgcgatatccatcttatccagcaaaacatggctggaaataccctggcattggagaatttcagtgctatgacaggtacttacagaaaagtttgagaaaggctgcagaagcacgagggcataccatatgggcaagaggacctgacaatgctggccattataattctgaaccaaatctcactggatttttttgtgatggaggagattatgatagctactatggccgttttttcctcagctggtactcccaggcattggtggatcacgcggaccgtgtactgatgttagcaaggctggcttttgagggtacaaacattgctgttaaggtctccggggtgcactggtggtataaaactgccagtcatgctgctgaattgactgccggattttacaacccgtgtaaccgtgatggctatgctccaattgctgcagtattaaagaaatacgatgctgctttgaactttacatgtgttgaattgcgcaccatggaccagcatgaggtataccctgaggcatttgcagatccagagggcctagtatggcaggtgctaaatgctgcgtgggatgctggtatacaagtggctagtgagaacgctctaccttgctatgatagggatggattcaacaagattttggagaatgccaaacctctgaatgacccagacggacggcatttgttaggtttcacctacctaaggcttggcaaagatctgtttgagagacccaacttttttgaatttgagcgcttcatcaagagaatgcatggcggtaatatcagctgatttttgagctgttaaatagagaactcgctgctcaatttttaactctagtcttcaagaaggaagacgagttgagttccgtataatcggtgaattcacatccttttgtcgccggcggctccacatgtgccatcatctcatggccatggcgcaatgttatgcagatgtagtgtgaaatccgaagaacctaggcattctgctcatctccatctccatatcagcgtcaaatgctcaaattttttagttcaagtgactgctgatacgcatggaacaaaacgggaataagtgtctcgatcctactgtcttgcgtgtaatgatgttcaacaatgcagattgtgagtttggatctgttgagcac

SEQ ID NO: 9550 - DNA, 4748 bp, Zea Mays
gctgcttcctttcccagcgagcagtagaccctcagcagtctacggcaccttcggtctcctctacataaaaaaacaaaccatctatcaccagcaatcagcaacaccatccggtattcctccgttccctgcccgacggagctgcttccctccttgctgtgctgtgcttgttccagattctactccatacgcccttgatttattttacttcgtaaaaaagaaaaaaaatagcttcttactgaatttcatggccgacttggcgctcgccggcttaaggtgggcagcatcgccgattgtcaacgagcttcttactaaagcttcagcttacctcagtgtggacttggcgctagttggcttaaggtgggcagcatcgccgattgtcaaggagcttcttactaaagcttcagcttacctcagtgtggacatggtgcgtgagatcgaacgactacaagacactgtcctgccacagttcgagttggtgattcaagcggcccagaagagcccccataggggcaagctggaatcctggcttcggcgtctcaaaaaagccttctatgatgccgaggacctgctggacgagcatgagtacaacgtccttaaggccaaggccaagagcggaaaaggtcccctgctccgagaggatgaaagctcctccactgcaaccactgtcatgaagccttttaattctgctataaacatggcacgcaacttgctccctgggaacaaaaggctaattaccaagatgaacgagctcaaaaatattctggaagatgccaagcagcttcgagaacttcttggcttgccacatggcaatatcgcagagtggccaactgcagcacctaccggtgttgccacaaccacatcacttcccaattccaaggttttcggtcgcgacggggatcgtgatcgtatagtagattttcttctcggcaagacaacaactgctgaggcaagctcagctaagtactcgggtttggccattgttggattgggaggaatggggaagtccaccttagcacagtatgtctataatgacaaaaggatagaagaatgctttgatatcaggatgtgggtgtgcatctcacgcaaacttgatgtgcatcgtcacacaagggagattatggagtctgcaaaaaagggagagtgcccacgtgttgataatctcgatactctccagtgcaaattacgtgatatactacaagagtcacagaaattcctgcttgtcttggatgatgtttggtttgaaaaatctcataatgagacagagtgggagttattccttgctccattagtctctaaacagtcagggagcaaagttttggtgacttctcgaagtgaaacacttccggccgctatttgttgtgaacaagaacatgtcattcaattgcaaaacatggatgatactgagtttttggctctttttaaacaccatgctttctctggagcagaaatcaaagaccaactgttacgcacgaagctggaagacactgcagaggagattgctaaaaggcttggacaatgtcctttggcagcaaaagttctgggttctcgattgtgcaggaaaaaggatattgctgaatggaaagctgctctaaagcttggagatttaagtgatcccttcacatctctgttgtggagttacgagaagttagatccacgtctgcagaggtgcttcttgtattgcagcttgtttccaaaaggtcatagatatgaatctaatgagttggttcacctctgggtggcagaaggatttgttgattcatgcaatttgagtaggagaacattggaagaggttgggatggattacttcaatgatatggtctctggatctttcttccaattggtttctcaaatgtatcgtggttcgtactatgtcatgcatgatatccttcatgattttgcagagtcactctctagagaagactgctttagattagaagatgataatgtgacagaaataccatgcactgttcgacatctatctgttcatgttcaaagtatgcaaaagcataagcaaattatctgcaagctatatcatttacgcactattatctgcctcgatccgctaatggatggcctaagtgatatttttgatggcatgctacggaaccaaagaaaactgcgtgtattgtctctgtcattttacaacagcagcaagttgccagaatctattggtgagctgaagcacctccggtatttgaacctcatcaggacattagtttctgaattgcctacatcattatgtactctctaccacttacaattactttggttaaaccacatggtggagaatttgcctgacaaactatgcaatttaagaaatctacgacatctaggagcgtactcatcggacgcttatgatttcgtgaatgaaaggcctatttgccaaattctgaatataggtaagttaacatcgctacaacacatttatgtcttttctgtacagaagaagcaaggttatgagttgcgacagttgaaggacttgaatgagcttggtggcagtttaagagtgaaaaatcttgagaatgtcattggaaaggatgaagccgtagagtcgaagctatatctgaaaagtcgccttaaagagttggcacttgagtggagttccgagaatggaatggatgcaatggatattctagaaggtctgagaccgccaccccaactgagtaagctcacaatcgaaggttacagatctgatacatatcctgggtggttactagagcgatcctattttgagaatttggaaagttttgagcttagtaattgcagtttgctagaaggcctaccaccagatacagagctccttcggaattgctctaggttgcgtataaactctgttccaaatttgaaggaactatctaatcttccagtaggccttacagatttatcaattgattgttgcccactgcttatgtttatcaccaacaatgagctaggacagcatgatttgagggaaaatataataatgaaggcagacgacctggcatctaaacttgcattgatgtgggaggtggattcaggagttattaggagagtactgtcgaaagactattcatctctgaagcagttggtgacattgatgatggatgatgatatatcaaagcatcttcaaattattgaaagtggtctggaggaaagtgaagataaagtatggatgaaagaaaacatcatcaaggcatggctcttttgccatgagcagaggataagattcatttatggaaggaccatggagattccattggttctaccgtcaggactctgtgaactttctctttcttcatgcagtattacagatgaagctttagctatttgccttggtggcctcacttcactgagaactttacaattggaatataatatggcattaactacacttccatcagaaaaggtgtttgagcatttgacaaagcttgacaggttggttgtaataggttgtttgtgtctcaaatcactggggggcttacgtgctgctccatctctttcctgttttaactgttggggttgtccttctttagagctagcacggggagcagaactaatgccgttgaaccttgatatggagctcagcatccttggctgcattcttgcagctgattcgttcattaatggcttgccacatctgaatcatctttccatttatgtctgcagaagctccccatccttatcgattggccacctgacctcccttgaatcattatgtctaaatggcctccctgatctttgctttgttgaaggcttgtcttccctgcaccttaagcacctaagtttagtagatgttgcaaacctcactgccaagtgcatctcacagtttcgtgtccaggaatcgctcacgattgcaaggagccgtcagtttcatttgaagaacctgcaaatctctcatccgtcaagcacctgaacttttcatggtgcaaaacagagtccctgcctagaaatctaaaatctgtctcaagtctggagagtctttctatagaacattgccccaacataacatctttaccagatctgccgtcctccctccagcgcataactatattgtattgccccgtcttgatgaagaattgccaagaacctgatggagaaagctggccaaagatttcgcacgttcgttggaagagctttctaccaagaccgcaccactttgaaataaatgagaaggcaccttgacgtcacccctcttctcttgaagctccagagttcaggctcaagtcagaagccaatccgtcgttaattctgccgtccccgcggttccctgtttttgccgcttgtattgctccgctatttcagttgctatatcattcattccttggttgtgcacaattgccaatatgtatttctctgacagaatggagtaataactgtggccagagcttttgttttcatgtgcacaattgctatatcattcatgtggcaattagtataaatactccaggcaatgcaatagagaagatagctcattttcctacacttgtgcttgtggatggtgtggcagagaagttcaccatggaaccagttccagtaatgtgtgtgctacagtcaaaataggtcttaattctctgctacgtacagtcaaaatgtgtctgctacagtccgagtgtttctggagattcgttgttggcggatgatgagctacatttgtacagtatggattgagctcgaggacttgttcatctccttgctctattaccagttaaaaggtgattgcttgttctctagtaccaattggattcgttgttggcggatgaggtgcttgc

SEQ ID NO: 9551 - DNA, 1841 bp, Zea Mays
cgaccttgttgctgtcccctaaccacaactccacgatggcacctacctgaggaacgggccgggcctgtggaacctgggcgactacggcttccggcacctgttcgacggctacgccacgctggtccgcgtgtcgttccgcgacgggcaggcggtgggcgcgcaccggcagatcgagtcggaggcgtacaaggcggcgcgcgcgcacggcaaggtgtgctaccgcgagttctcggaggtgcccaaggcggaggggttcctctcccacgtgggccagctcgccaccctcttctcgggctcctcgctcaccgacaactccaacacgggcgtcgtcaggctcggcgacggccgcgtcctctgcctgacagagaccatcaagggctccatcgtggtcgacccggacacgctcgacaccatcggcaagttcgagtacacggacaggctgggcggcctcatccactcggcgcaccccatcgtgacggacaccgagttctggacgctcatcccggacctcatccgcccgggctactcggtggtgaggatggacgccgggaccaacgagcggcggttcgtcggcagggtggactgtcggggcgggccggcgcccgggtgggtgcactcgttccccatcaccgaccactacgtggtggtgccggagatgccgctccggtactgcgccaggaacctcctccgcgcggagcccacgccgctgtacaagttcgagtggcacctcgagtccggcagctacatgcacgtcatgtgcaaggctagcggcagggtcgtggcgaccgtggaggtgccgccgttcgtcacgttccacttcatcaacgcgtacgaggagaaggacgacgagggccgcgtcaccgcgatcatcgccgactgctgcgagcacaacgccaacacctccatcctcgacaagctccggctccagaacctgcgctcttccaccggccaggacgtcctccccgacgccaggtacggtaccaagtttagatcagagagggaaaggctggtgtctgagtctgacgtacgggccgtggtgttgggcgggacgggacgggacatacagggtgggccgcttcaggatcccgctggacgggagcccgttcggcgagctggagccggcgctggacccggaccagcacggccgcgggatggacatgtgcagcatcaacccggcccacgtcggcaagaagtaccggtacgcctacgcctgcggagcccaccggccgtgcaacttccccaacaccctcaccaagatcgacctggtggagaagacggccaagaactggtacgaggagggcgccgtgccgtcagagcccttcttcgtgccgcgccccggcgccgtggaggaggacgacggcgtcgcgatctcgatggtgagcgccaaggacggatcggcctacgcgttggtgctggacgccaagacgttccacgagatcgcgcgggccaagttcccgtacgcgatgccctacggcttgcactgctgctgggtgcctaggagtacctcagacgcgtagcgctagcagatcgttcgactctgctgctcacatctcccacaccgtacgtgccgactcgaccgacagacatgggcatagtagtacaaacagaaaggtgtctctgctgctttatttcctggccttcggctgaatgggaaaaaggtatacacgtcgtagtgatgtattgacagacatcgtatacgtcttcccagcaaaatgtggctgtagcaattacacgcgtttaattgtacagagctagctcatgtgagcgagcccatagtattgttcattatgtacacatgtagtacagtgttttgtttttttaaaaaagatgcccagtacagt

SEQ ID NO: 9552 - DNA, 2093 bp, Zea Mays
gatcatactagtacacaccacactcccccggctagcaccgtgctctctagctagctagctaagctactactgccctctcctttccaggcgactttgcaaccctagcaagagcattttcgccatgtctcccactatggcttcgtcgttgtgcgtatttgcagcgatgtctggcgccagcggcaggccgtcggccggtggctcggcggtaccgggccgtctgtccagcagcacacaggggggcaagggaaagcgggccgtggtgcagccgctcgcggctagcgtggtgacggagacgccagcgccggccgtagctccggctcggcccgtcgtcgacgccccgccgcgccgccgtgggggccgcggcaccgtcgagcacgcggcgtggaagagcgtccggcaggagaggtgggagggggcgctggagctggagggagagctgccgctctggctggatggcacctacctgaggaacgggccgggcctgtggaacctgggcgactacggcttccggcacctgttcgacggctacgccacgctggtccgcgtgtcgttccgcgacgggcaggcggtgggcgcgcaccggcagatcgagtcggaggcgtacaaggcggcgcgcgcgcacggcaaggtgtgctaccgcgagttctcggaggtgcccaaggcggaggggttcctctcccacgtgggccagctcgccaccctcttctcgggctcctcgctcaccgacaactccaacacgggcgtcgtcaggctcggcgacggccgcgtcctctgcctgacagagaccatcaagggctccatcgtggtcgacccggacacgctcgacaccatcggcaagttcgagtacacggacaggctgggcggcctcatccactcggcgcaccccatcgtgacggacaccgagttctggacgctcatcccggacctcatccgcccgggctactcggtggtgaggatggacgccgggaccaacgagcggcggttcgtcggcagggtggactgtcggggcgggccggcgcccgggtgggtgcactcgttccccatcaccgaccactacgtggtggtgccggagatgccgctccggtactgcgccaggaacctcctccgcgcggagcccacgccgctgtacaagttcgagtggcacctcgagtccggcagctacatgcacgtcatgtgcaaggctagcggcagggtcgtggcgaccgtggaggtgccgccgttcgtcacgttccacttcatcaacgcgtacgaggagaaggacgacgagggccgcgtcaccgcgatcatcgccgactgctgcgagcacaacgccaacacctccatcctcgacaagctccggctccagaacctgcgctcttccaccggccaggacgtcctccccgacgccagggtgggccgcttcaggatcccgctggacgggagcccgttcggcgagctggagccggcgctggacccggaccagcacggccgcgggatggacatgtgcagcatcaacccggcccacgtcggcaagaagtaccggtacgcctacgcctgcggagcccaccggccgtgcaacttccccaacaccctcaccaagatcgacctggtggagaagacggccaagaactggcgtcgcgatctcgatggtgagcgccaaggacggatcggcctacgcgttggtgctggacgccaagacgttccacgagatcgcgcgggccaagttcccgtacgcgatgccctacggcttgcactgctgctgggtgcctaggagtacctcagacgcgtagcgctagcagatcgttcgactctgctgctcacatctcccacaccgtacgtgccgactcgaccgacagacatgggcatagtagtacaaacagaaaggtgtctctgctgctttatttcctggccttcggctgaatgggaaaaaggtatacacgtcgtagtgatgtattgacagacatcgtatacgtcttcccagcaaaatgtggctgtagcaattacacgcgtttaattgtacagagctagctcatgtgagcgagcccatagtattgttcattatgtacacatgtagtacagtgttttgtttttttaaaaaagatgcccagtacagt

SEQ ID NO: 9553 - DNA, 725 bp, Zea Mays
ctagggcgcactcgcaccctccgccggtcctgaactcatcgatcgcagaagcgagagagagagagagaggaggccgtacccacgccgccgcttcgccgccgccgacctccgtctctcgcttccaccatctctctccttttcaccctctctcgcggccaccctcggtcccctccctgagccttacccttgactgagtggtttccaatttcagttccactccctcttccaccactattcacggggaggcgcggcgaatcctgcgagattcctcccggcccacgcgtgcgcacgttggcgatacagggctagagtttcgtctccggcgctttgcggagttaattaggagaaggaactggagaatgtgtaggtggtgggcgctgaaaccctagctgttcgggacgggcgtgcgtgcggggatggcaggggagctggggcagcagacggtggagctgggcgcggtggtgcggcgtgcggcggaggagtcttatctcgctctgcgggagctcgtggagaagtcgcaggcggaggccgaggggaagggcatcggcgccggagccaatggcagctggcagcggtccgacaccgagaagaagattgacttgctcaagttcatcacacgcacacgccagcgcatgcttcgtctccacgtccttgccaagtggtgtcagcagtgtagtgggatagtgaagattggtgattgttgatgaattgtgccagcatttttg

SEQ ID NO: 9554 - DNA, 2400 bp, Zea Mays
  misc_feature (1)..(1): n is a, c, g, or t
naagcttgtcaaatgctcgattgaaggcgcatgcatgaaaggcctctctagtaggacatctgcattgaacacagcatctgaatgtttacatatcctcaggttctggagcagggattatggaagaggcatttcattagctgaaagttcacattcactaacagtgctcgtctcgattgtatcattcttgcaagctgaactgaacatctctgataaaccagcaaatgccactggcatttcttcccgcaattctggatctgcgaatagtaaaaattccaatatttgggatatgaagatatcagcattttcgatgctcgaagatatattgagtaaggttgcatcaaatatgacagaaaatctgtggcagtctgtcatcgaggtcttgaggaaagttatggattttgtcacagcaaggaaccttgttatagagagtagcatcatgtcaagattttatacatcttttcttcgttgtctacatttggttcttgtggatcccaaaggaccactttcagggcatgttgcagggtttgtagcaaatctgcagatatttttcgtatatgggctgaggtcatcttcacctcctacactagctccaaaagaaactagaacagattcaaaacccagagcttcacgtggacgatatagaccacctcatttgaggaacaaggagagaagagagaatgattcactggaaggtcaaaattcagatagtgagtattcttggtatgatatgagctcatcagactcagacctgagtgatagtgatggttatgcaaaaagtggagaccgcttccggagttcgaaggctagattagctgccattctttgtatacaggatatctgccatgctgatccaaagttacttacttcacaatggccagtacttttgcctgagaatgatgttctccaacaaaggaaatatcaagcaactctgatgacatgcttgctttttgatcctataacgaaggtacgtgttgaggcagcatcaaccattgctaccatgctggaacggcaagcattagttttgacacaagttgcagagtacaaggagtcgtctaagcgtggatcattcactacattatcttcctcacttggtcaaatattgatgcaactgcatacaggagcactgtacttgatacagcgtgaaactcaagctactttgcttgcggcattattcagagttctcattcttttgatatctgctacaccgtacgctcggatgccaaaggaattgttgccaacagtcattaaagtattgtgcagtagattactgaacaaacactcgaataagactgaacattatgccgtgctggttactgttctaagttgcttggagacagctttttcaaaagtgccacctactttggatgtctttgcggttctcactgaggattgctgtgctggaccatcacatgagcaggaagaatcaaatgttatagcttttcttcttcattgtatagaggaggaaatgcattacagtgttagacatggagccttccaggtgctgagatcagcggttcacaactacccaagctgtgcaaacatgatttgggaaaaacttcgagacaatgttcttaacttgttgcaaatacaaagttttgaagaccaaaagtatgatgctaactttgggcctcctggagctaaagaagaatcatcaatcaagggaagatgtcttgtagctggaataaaggtaatggatgaatgtctgcgtgtttcatctggattcacaggagcagatgacatcaaagaatgcagattactggatattcagcaaatttctgattgtaccataaataaaactattaagtctgcacctcactttgaaatggaagctgctggatcatcacagaattgcactttggacataacacttggaattaaccgttggatcgaggtgatagagactcatctccctcagggattatcccatggttctgctatggtcaggacagcatccctcacatgctttgctggcatgacttctgatgtattcttctccctgcctgaaaataagagagactatgtgacctcttcttctgttcatgcggcgttaaatgatatggttcctagtgtaagatcagctgcatgtcgagctattggcattgttgcatgttttcctcagatattgtcaagcctaccaggcaagttcatagatgccattgagttcaatacacataactcatcaactccagttcgtgtcaccgctgcatgggctttggcaaatctctgttcttgtattcgttttagagcactggaagtgcatacagatccctatgcaggtgtaggtgtattgagcaaatcaagcatatctcttttggttgaagttgctttgcgtctggccaaagatagtgaaaaaaaaaggatactgtcctcaggtgggattgcactcaacggtggatccga

SEQ ID NO: 9555 - DNA, 3839 bp, Zea Mays
  misc_feature (1)..(1): n is a, c, g, or t
naagcttgtcaaatgctcgattgaaggcgcatgcatgaaaggcctctctagtaggacatctgcattgaacacagcatctgaatgtttacatatcctcaggttctggagcagggattatggaagaggcatttcattagctgaaagttcacattcactaacagtgctcgtctcgattgtatcattcttgcaagctgaactgaacatctctgataaaccagcaaatgccactggcatttcttcccgcaattctggatctgcgaatagtaaaaattccaatatttgggatatgaagatatcagcattttcgatgctcgaagatatattgagtaaggttgcatcaaatatgacagaaaatctgtggcagtctgtcatcgaggtcttgaggaaagttatggattttgtcacagcaaggaaccttgttatagagagtagcatcatgtcaagattttatacatcttttcttcgttgtctacatttggttcttgtggatcccaaaggaccactttcagggcatggtttgtagcaaatctgcagatatttttcgtatatgggctgaggtcatcttcacctcctacactagctccaaaagaaactagaacagattcaaaacccagagcttcacgtggacgatatagaccacctcatttgaggaacaaggagagaagagagaatgattcactggaaggtcaaaattcagatagtgagtattcttggtatgatatgagctcatcagactcagacctgagtgatagtgatggttatgcaaaaagtggagaccgcttccggagttcgaaggctagattagctgccattctttgtatacaggatatctgccatgctgatccaaagttacttacttcacaatggccagtacttttgcctgagaatgatgttctccaacaaaggaaatatcaagcaactctgatgacatgcttgctttttgatcctataacgaaggtacgtgttgaggcagcatcaaccattgctaccatgctggaacggcaagcattagttttgacacaagttgcagagtacaaggagtcgtctaagcgtggatcattcactacattatcttcctcacttggtcaaatattgatgcaactgcatacaggagcactgtacttgatacagcgtgaaactcaagctactttgcttgcggcattattcagagttctcattcttttgatatctgctacaccgtacgctcggatgccaaaggaattgttgccaacagtcattaaagtattgtgcagtagattactgaacaaacactcgaataagactgaacattatgccgtgctggttactgttctaagttgcttggagacagctttttcaaaagtgccacctactttggatgtctttgcggttctcactgaggattgctgtgctggaccatcacatgagcaggaagaatcaaatgttatagcttttcttcttcattgtatagaggaggaaatgcattacagtgttagacatggagccttccaggtgctgagatcagcggttcacaactacccaagctgtgcaaacatgatttgggaaaaacttcgagacaatgttcttaacttgttgcaaatacaaagttttgaagaccaaaagtatgatgctaactttgggcctcctggagctaaagaagaatcatcaatcaagggaagatgtcttgtagctggaataaaggtaatggatgaatgtctgcgtgtttcatctggattcacaggagcagatgacatcaaagaatgcagattactggatattcagcaaatttctgattgtaccataaataaaactattaagtctgcacctcactttgaaatggaagctgctggatcatcacagaattgcactttggacataacacttggaattaaccgttggatcgaggtgatagagactcatctccctcagggattatcccatggttctgctatggtcaggacagcatccctcacatgctttgctggcatgacttctgatgtattcttctccctgcctgaaaataagagagactatgtgacctcttcttctgttcatgcggcgttaaatgatatggttcctagtgtaagatcagctgcatgtcgagctattggcattgttgcatgttttcctcagatattgtcaagctctagcctaccaggcaagttcatagatgccattgagttcaatacacataactcatcaactccagttcgtgtcaccgctgcatgggctttggcaaatctctgttcttgtattcgttttagagcactggaagtgcatacagatccctatgcaggtgtaggtgtattgagcaaatcaagcatatctcttttggttgaagttgctttgcgtctggccaaagatagtgaaaaagtaaaatcaaacgctgttagagctcttggttatctttcaagatttatcagattcaattaccacgccggcacaataaatgacccaagtgattcagttttttatggagatcctgtgtggcttgaaagaatggtgcaggctttgatgtcttgtgtgacaactgggaatgtaaaggtccaatggaatgtttgccatgcccttagcaacttgttcatgaatgataccttgagacttcaagacatgccttgggcatcaagtgtttatagcatacttctacttctaatccgggactcaaacaattataagataaagatgcatgcagctgttgctctatcagtgccagtgtcaaggcttgattacggcagctcgtttccagatgttgttcgaggcctcgtccatgctctcgagtcattgaactcaaacaattcatcgttaccttcaaatttcaaacagagagacaacctcgagaagcagcttacgtttactgctctccatttgcttagttttgtgtcaccaaacgacgatccaagcctgaaagattttcttaccaagaaatcgtcgttcctagaagactggctgagatcactatgcgcatcgttcaacagctcggagcgccagcccttgccaacggaggccacaaacgacgaggacggcttcagcccaaacgtgactcagaaaggcatgctgtcttccgccctgcagtccttgctcggcgtgtacgcgggcaggacccagcaggtcatcacccagagatttgagcaactggctagaagcgtcgcttgaatggtgagcagcgacgagcagtcaggtgtggtctccactccagcctccattaacaagcagcgatatattggtcgtcgtctacccctcaggacggacagcgcgtcaggcagtggatccttaaattctgccgaatcccatgagctccaggcggcacttgtctcggatcttggctgtcatcatgcacaggctctgcaagcctggcttggtcggtgttttcgtcgttgtttacttgaaacatcgttactgtgagtacacacacatatatatatatatatatatatatatatatatatatatatatatatatatatatatatatatatatatatatatatataagttggcagtcttcaaagctcagcgtgaccggacctcagcagcactgggtatctcttaactacttttctggcgttcctgacaaacaggatggcgctgttatgtagatgggccttttccctggtcctggggcttcctgcttgcttgataaaaggttggtatcacccgaccacggtccacgtggacgatattacaagatgttcattgttcttggcaagaggggtcatgaatgccgtccaaatctgttggagtccgtcgctagtgccactgctgttattgagcccatgtgtgtgtgtgcgcgcgtgtgttttgttcatgtaccaaccttcataaattgcttgacgctctgcactgttcgacgatcacttcca

SEQ ID NO: 9556 - DNA, 3845 bp, Zea Mays
  misc_feature (1)..(1): n is a, c, g, or t
naagcttgtcaaatgctcgattgaaggcgcatgcatgaaaggcctctctagtaggacatctgcattgaacacagcatctgaatgtttacatatcctcaggttctggagcagggattatggaagaggcatttcattagctgaaagttcacattcactaacagtgctcgtctcgattgtatcattcttgcaagctgaactgaacatctctgataaaccagcaaatgccactggcatttcttcccgcaattctggatctgcgaatagtaaaaattccaatatttgggatatgaagatatcagcattttcgatgctcgaagatatattgagtaaggttgcatcaaatatgacagaaaatctgtggcagtctgtcatcgaggtcttgaggaaagttatggattttgtcacagcaaggaaccttgttatagagagtagcatcatgtcaagattttatacatcttttcttcgttgtctacatttggttcttgtggatcccaaaggaccactttcagggcatggtttgtagcaaatctgcagatatttttcgtatatgggctgaggtcatcttcacctcctacactagctccaaaagaaactagaacagattcaaaacccagagcttcacgtggacgatatagaccacctcatttgaggaacaaggagagaagagagaatgattcactggaaggtcaaaattcagatagtgagtattcttggtatgatatgagctcatcagactcagacctgagtgatagtgatggttatgcaaaaagtggagaccgcttccggagttcgaaggctagattagctgccattctttgtatacaggatatctgccatgctgatccaaagttacttacttcacaatggccagtacttttgcctgagaatgatgttctccaacaaaggaaatatcaagcaactctgatgacatgcttgctttttgatcctataacgaaggtacgtgttgaggcagcatcaaccattgctaccatgctggaacggcaagcattagttttgacacaagttgcagagtacaaggagtcgtctaagcgtggatcattcactacattatcttcctcacttggtcaaatattgatgcaactgcatacaggagcactgtacttgatacagcgtgaaactcaagctactttgcttgcggcattattcagagttctcattcttttgatatctgctacaccgtacgctcggatgccaaaggaattgttgccaacagtcattaaagtattgtgcagtagattactgaacaaacactcgaataagactgaacattatgccgtgctggttactgttctaagttgcttggagacagctttttcaaaagtgccacctactttggatgtctttgcggttctcactgaggattgctgtgctggaccatcacatgagcaggaagaatcaaatgttatagcttttcttcttcattgtatagaggaggaaatgcattacagtgttagacatggagccttccaggtgctgagatcagcggttcacaactacccaagctgtgcaaacatgatttgggaaaaacttcgagacaatgttcttaacttgttgcaaatacaaagttttgaagaccaaaagtatgatgctaactttgggcctcctggagctaaagaagaatcatcaatcaagggaagatgtcttgtagctggaataaaggtaatggatgaatgtctgcgtgtttcatctggattcacaggagcagatgacatcaaagaatgcagattactggatattcagcaaatttctgattgtaccataaataaaactattaagtctgcacctcactttgaaatggaagctgctggatcatcacagaattgcactttggacataacacttggaattaaccgttggatcgaggtgatagagactcatctccctcagggattatcccatggttctgctatggtcaggacagcatccctcacatgctttgctggcatgacttctgatgtattcttctccctgcctgaaaataagagagactatgtgacctcttcttctgttcatgcggcgttaaatgatatggttcctagtgtaagatcagctgcatgtcgagctattggcattgttgcatgttttcctcagatattgtcaagctctagcctaccaggcaagttcatagatgccattgagttcaatacacataactcatcaactccagttcgtgtcaccgctgcatgggctttggcaaatctctgttcttgtattcgttttagagcactggaagtgcatacagatccctatgcaggtgtaggtgtattgagcaaatcaagcatatctcttttggttgaagttgctttgcgtctggccaaagatagtgaaaaagtaaaatcaaacgctgttagagctcttggttatctttcaagatttatcagattcaattaccacgccggcacaataaatgacccaagtaacagtgattcagttttttatggagatcctgtgtggcttgaaagaatggtgcaggctttgatgtcttgtgtgacaactgggaatgtaaaggtccaatggaatgtttgccatgcccttagcaacttgttcatgaatgataccttgagacttcaagacatgccttgggcatcaagtgtttatagcatacttctacttctaatccgggactcaaacaattataagataaagatgcatgcagctgttgctctatcagtgccagtgtcaaggcttgattacggcagctcgtttccagatgttgttcgaggcctcgtccatgctctcgagtcattgaactcaaacaattcatcgttaccttcaaatttcaaacagagagacaacctcgagaagcagcttacgtttactgctctccatttgcttagttttgtgtcaccaaacgacgatccaagcctgaaagattttcttaccaagaaatcgtcgttcctagaagactggctgagatcactatgcgcatcgttcaacagctcggagcgccagcccttgccaacggaggccacaaacgacgaggacggcttcagcccaaacgtgactcagaaaggcatgctgtcttccgccctgcagtccttgctcggcgtgtacgcgggcaggacccagcaggtcatcacccagagatttgagcaactggctagaagcgtcgcttgaatggtgagcagcgacgagcagtcaggtgtggtctccactccagcctccattaacaagcagcgatatattggtcgtcgtctacccctcaggacggacagcgcgtcaggcagtggatccttaaattctgccgaatcccatgagctccaggcggcacttgtctcggatcttggctgtcatcatgcacaggctctgcaagcctggcttggtcggtgttttcgtcgttgtttacttgaaacatcgttactgtgagtacacacacatatatatatatatatatatatatatatatatatatatatatatatatatatatatatatatatatatatatatatataagttggcagtcttcaaagctcagcgtgaccggacctcagcagcactgggtatctcttaactacttttctggcgttcctgacaaacaggatggcgctgttatgtagatgggccttttccctggtcctggggcttcctgcttgcttgataaaaggttggtatcacccgaccacggtccacgtggacgatattacaagatgttcattgttcttggcaagaggggtcatgaatgccgtccaaatctgttggagtccgtcgctagtgccactgctgttattgagcccatgtgtgtgtgtgcgcgcgtgtgttttgttcatgtaccaaccttcataaattgcttgacgctctgcactgttcgacgatcacttcca

SEQ ID NO: 9557 - DNA, 1467 bp, Zea Mays
tagcgagcagggggtgagggagcgaacagagtggttgtcccctcattcgagatgtaaagtcggccctctccttacctcaatgtactgctcgtctacacaagatgtgaagtttatacaattccaactaacggtcaacgtcgcagctctgataatcaatgtagttgctgctgtcagttctggaaacgtgccgttgaatgatgttcagttgctgtgggttaacctaattatggatactttgggtgcccttgcattggcgacagaaccacctacaaaccatcttatggagagacccccagtagggagaagggagccattgattataaatatcatgtggagaaacttaattatcatggctttgtttcaagtttcatttctcctcactctcaacttcaagggaataagcctcctgcagttgaaaaatgatgatccagcacatgcagataaagtgaaaaataccttcatattcaacacatttgttttctgccaggtgttcaacgaattcaattcgtgtaaaccagatgagctgaatgtattcaagggcatttcagagaaccatctgtttattggcatcatagctataacagttgtactccaggtagaatctctagaatgagtttcctttcttaactaagataaattgatttaggtctaagaaactgttttagatcacctggactttgccacgaataccttttatcagaaaatggggggaacgataaaggatgctggaaaatgaaatatattattatagctaataaattggctttcctggaggaactaggatttggacccagccaagtggccaagtgtatggaagaatcgtgtcgtggcacagacgaccagctgcttgactctccctcttctgtctgatcacatttgtacgcaagatatagatagtactactatacagtggagtcttcttgcagtttgtctattttacacaactgacatagtcttcaggtatctcattgtctgttcttatttagttatattaatgatgtttactattaattttgaccatcacaacttcgacttgtccagctctgcctctatttgtcggttcagctctgcttctataatttttttggtccactgtacaatgggctcctttattacctccttgagaatccttttcagtttggtccactgtctcatcatccatcgaatcacggccgaggcacacaatctaaaaggcaaaagaattatagaggcagagctggacatagtcttcagttgaatttaaggttcctcttcccttgtttggaagaggttatgatcattaggatggtcatcagaatctcaaagatcaagaattgccataaaggtgctgatgagttctttgatgatatatgtaatttcaattacatgaactataagaaagtgcaaattgaataagtagagatgatataatattacatatttatatcatcaaaataatattaatattacgatgatattttatcacaa

SEQ ID NO: 9558 - DNA, 1513 bp, Zea Mays
ggccacggcctcaacacccagccgccgccgcccggcagttccgtctcccttcttcgccttctcagtcaagctaaaacctcgctcgcctcgtccagtcagacatggcatgaaaccctagggcgcccgcctcccctccgcaatttgccattgcgctccgcgatgcaggcatccgcgcgcctctcctactccgtggcctccaggaaagtgatcgcgggtgtctctatcgcgcccccacggtcgtgctatcggacctcccgagggaaggcgcatgcggcgccgctgcctgcgcaggagccgccaccgaaggggctgaagaggattacaaagcaggagcggagggttcgaatagtggaatttgttgagaatgcagttatagggcttcaaacgaagttgaagtcactgaacaccccatgcctaaggatgaagctagagtggttgaaagtcaaggaatactagaagtttctgagcactccatggccaaggatgatgctgaagtggctcaacctcaaggaacagctgaagtttttgagcacttcttatctaaagatgaaggtaaggtggctcagtgtcaaggaacgtttcactttcctgagcactcaagacctaaggatgacagtggaaagactgctcgacatgatatggacacttcagaaacctgtaagactgcagatgccccagctttatctgatctaacagagaatgagggaattttatctgaccaaacagagagtgaggacaaaccagatcctggaaatcagcaaagagaaatagaagctaacaaatttgatttgaagaatttcgaaaaaaatctgaatgcaaatgattcaaacgcatcagatcaaagtggaagtgatacggtgaatgaggcaaagacacatgccaggggagacaacccaaagcttgaggaatccgcgaacacgggtcttttgggcagcctgagatcttttgcttatggcatcagaaacttctggaaaaatatgtaaatctgttgtttttttgccgtgagtcacctaaaattgaaaaggctacagaatcgagaacttgcctctttgtcacgggcttttggttgcataggatcggagaggagagggcttttggttggagaggattgatggtttgtttgggagcaaggggagagcctctccaattcacttgctcccaaacaaaacaagccatgagacaatcccttgctattactagtaagagattatgtctctaaattcccttcaatccttatgcaataaaagccccaagcgtttgtgatactggatcaatttgtaaagttctttttgtgtcacaccaaatggtcatgttccgctatgacgtttcgataaagctagataggagtattattagtactgcccctgttgtggcccaagttcacatggtatttaagtgttggtggtatctaactgtgtttgtcaattgttgtgcacacattgaaggccctatttagaagtaaaatattttttatagtttttaggaaatattacagtttattatagaaatacaa

SEQ ID NO: 9559 - DNA, 1707 bp, Zea Mays
gtgttacgtaaacaaaaatattagttacgcatccagatccagatagacacgtacaagctgaaggtgaagccagggaagacgtacatgctccgcctcatcaacgcggcgctcaacgacgagctcttcttctccgtcgccaaccactcgctcaccgtcgtcgaggtcgacgccgtctacgtcaagcccttcaccgtcgacaccctgcccatcgccccgggccagaccaccaacgtgctcctcgcagccaagcccttctacccgggcgccaactactacatgtccgccaagccctactccaccgccaggccggccaccttcgacaacaccaccgtcgccggcatcctcgagtacgagtaccccgacgcgccatcctcctccgcggcgagcttcgacaaggccctgccgctccacaggccgaccctgccgcagctgaacgacaccagcttcgtcggcaacttcacggccaagctccgcagcctcgcgacgccgcagtacccggcggccgtgccgcggacggtggacagagcgttcttcttcacggtggggctcggcacgcacccgtgccccgggaacgccacgtgcctgggccccaccaacacgacgcagttcgcggcggccgtgaacaacgtctccttcgtgctcccgaccagggcgctcctgcactcgcacttcgccggcctgtccagcggcgtctactcgtcggacttccccgtcgcgcccctcacgccgttcaactacacggggacgccgccaaacaacaccaacgtggccagcgggaccaagctgatggtcgtcccgtacggcgccaacgtggagctggtgttgcagggcaccagcatcctcggcgtcgagagccacccgctgcacctgcacggcttcaacttcttcgtcgtcggccaaggctacggcaactacgacccggtgaacgacccgcccaagttcaacctcgtcgaccccgtcgagcggaacaccgtcggcgtgccagccggcggctgggtggccatccgcttccttgccgacaaccccggggtatggttcatgcactgtcacttggaggtgcacacaacatggggcctcaggatggcatggttggtgctcgacggcagcctcccgcaccagaagctgctcccaccgccgtccgatcttcccaaatgttgattagactcccctctatatatcctgtgctggtcgcttcaaagggaactgtgaattagacttgatcacaatgttgatttttttgtttactttcttcattgccaattgcaattctttcaacttccattttaactagtccgttctattcccatctgacctggactttttgtaattttttcttccatttgcttaccaccctgtaatgataaatgtgtttggtacactattttgagaacaacgaatggcgcggcttgcaccagagatccataaaatttcatctgtgtgtctgcattgttccacgttatttatttccggatggcttctctaaggtagaagtgaaaagtgttatttaaggaagaaaagaacattggtgtcgtttggttcacatatttgtaacgtaatgggtaactgataacgttaaatcatgtttgttttagttcaaccgtaattaaataccacactaaaaattgataccagcttattcaaacttgttaacgccagtaatcgagcgtaaaccattaccattaccatttgcgttacatttcttgaacc

SEQ ID NO: 9560 - DNA, 828 bp, Zea Mays
ctgaaaacaacatacaagaggtgcgtataatgagtgcgggtttcgacaagcagatattggctcagaagctttcgaagcttaatagctcacagcagaccatagagactttatcacattggtgtgtctttcatcatcgttgctgccaacaagttgtagaaacatgggattctgagttccatgcagctcctgtagagaggagggtatctttgctgtaccttgcgaatgatattatgcagaatagcagaaaagaaggtaatggatatatagctgaattcatgagggtcatccctgctgccttgaatggagtgttgactgtaagagatgattttgggcggaatgtcccaaaaagactgattgacatatgggaagaccgtaaaatatttgatacccaggcacaaagcctgaaagatgattttttcaggaggttaaaggacattagaaaccagttgaaaaatacaggcagtgagcagctggagaaggttgtctctagctacaaacatgtcctgaatgctcctatggatgaggatactctgatgcgaaaatgccaagcagctcttatcaattttgatgaactcaataaaacatatggaaataactccattttaggtagtagcaatcgttcgggctttatgcaggagctgcaggaacaacatagcattctcagaaactccatcgaacaacttaaagtgtcagaatcactcagggccaccctgatttttcatttgaaggaagcgttgaatgagcaggagctcaaagtggaacacctcagaagccagcttcagggaaagaagcagtttaccagattactaatggttttccattatgaat

SEQ ID NO: 9561 - DNA, 904 bp, Zea Mays
ttggcttccaggcgcatctgtggtttaactttggttatgttttttaatgggttccttttcagaacctgaatattcggtgcagtcacaatgtctgaaaacaacatacaagaccagggtgcgtataatgagtgcgggtttcgacaagcagatattggctcagaagctttcgaagcttaatagctcacagcagaccatagagactttatcacattggtgtgtctttcatcatcgttgctgccaacaagttgtagaaacatgggattctgagttccatgcagctcctgtagagaggagggtatctttgctgtaccttgcgaatgatattatgcagaatagcagaaaagaaggtaatggatatatagctgaattcatgagggtcatccctgctgccttgaatggagtgttgactgtaagagatgattttgggcggaatgtcccaaaaagactgattgacatatgggaagaccgtaaaatatttgatacccaggcacaaagcctgaaagatgattttttcaggaggttaaaggacattagaaaccagttgaaaaatacaggcagtgagcagctggagaaggttgtctctagctacaaacatgtcctgaatgctcctatggatgaggatactctgatgcgaaaatgccaagcagctcttatcaattttgatgaactcaataaaacatatggaaataactccattttaggtagtagcaatcgttcgggctttatgcaggagctgcaggaacaacatagcattctcagaaactccatcgaacaacttaaagtgtcagaatcactcagggccaccctgatttttcatttgaaggaagcgttgaatgagcaggagctcaaagtggaacacctcagaagccagcttcagggtttgaagagactcttgattcccctt

SEQ ID NO: 9562 - DNA, 1671 bp, Zea Mays
aaagacagccagcgccgtgccgcggtctgctagatacagtgacagaaacgatccgcaacgcaggcaggcccgccgcgcagcccaggatccatccatccacctcacaccgcgtcgtcgtccagctcacactccccggccgcgcccccgctgctcctcgccgcggggtcacgcgcgcaggcaggcgagcgaccagtaactgacgtctctccttcctcccccccctgctccggcccctctacaaatccccgattaaaccctagacttccctccccacccaaatgcgcgccccctcctaggcggcgcccctcgaattcggcaccggctccgccgaagggtgcgtataatgagtgcgggtttcgacaagcagatattggctcagaagctttcgaagcttaatagctcacagcagaccatagagactttatcacattggtgtgtctttcatcatcgttgctgccaacaagttgtagaaacatgggattctgagttccatgcagctcctgtagagaggagggtatctttgctgtaccttgcgaatgatattatgcagaatagcagaaaagaaggtaatggatatatagctgaattcatgagggtcatccctgctgccttgaatggagtgttgactgtaagagatgattttgggcggaatgtcccaaaaagactgattgacatatgggaagaccgtaaaatatttgatacccaggcacaaagcctgaaagatgattttttcaggaggttaaaggacattagaaaccagttgaaaaatacaggcagtgagcagctggagaaggttgtctctagctacaaacatgtcctgaatgctcctatggatgaggatactctgatgcgaaaatgccaagcagctcttatcaattttgatgaactcaataaaacatatggaaataactccattttaggtagtagcaatcgttcgggctttatgcaggagctgcaggaacaacatagcattctcagaaactccatcgaacaacttaaagtgtcagaatcactcagggccaccctgatttttcatttgaaggaagcgttgaatgagcaggagctcaaagtggaacacctcagaagccagcttcagaggatacaaactcgtggggatgcgtcaccatgtgttgtagagctcaggaaactgttctattgttgtacattcagccagtcagcgtgcaacagtcaattttctgaactagttctggtcttggtcccagagtagaaagtgtagagcctgtacatgtcggctgctagagggaatttggaattccgagagcccggacccggagcaaatggctgcgtcagtttaatgatcgactgatccagtagttcctggtctaggcggtggagtaaaaactgtagattccgacagcttagggagaagatatggaacccaatagccgaagacagatgttgtagcatgacatgttgtaactcatcacagttgtgctcttcgctagatcatccgagaacacgtagatgttcttgtgatgtcttgagcgtgtaatcctgctgtttggtgtaagatatggcttcagctgctgtcgatggtcgaatctcttgctctgtttttaattacccttttttgctctcggctattctagcgccaataccttttgcgtctactttcgcatgtgttcccaaggaatttagtggtctgtcttg

SEQ ID NO: 9563 - DNA, 2475 bp, Zea Mays
cgcggtctgctagatacagtgacagaaacgatccgcaacgcaggcaggcccgccgcgcagcccaggatccatccatccacctcacaccgcgtcgtcgtccagctcacactccccggccgcgcccccgctgctcctcgccgcggggtcacgcgcgcaggcaggcgagcgaccagtaactgacgtctctccttcctcccccccctgctccggcccctctacaaatccccgattaaaccctagacttccctccccacccaaatgcgcgccccctcctaggcggcgcccctcgaattcggcaccggctccgccgaagggtgcgtataatgagtgcgggtttcgacaagcagatattggctcagaagctttcgaagcttaatagctcacagcagaccatagagactttatcacattggtgtgtctttcatcatcgttgctgccaacaagttgtagaaacatgggattctgagttccatgcagctcctgtagagaggagggtatctttgctgtaccttgcgaatgatattatgcagaatagcagaaaagaaggtaatggatatatagctgaattcatgagggtcatccctgctgccttgaatggagtgttgactgtaagagatgattttgggcggaatgtcccaaaaagactgattgacatatgggaagaccgtaaaatatttgatacccaggcacaaagcctgaaagatgattttttcaggaggttaaaggacattagaaaccagttgaaaaatacaggcagtgagcagctggagaaggttgtctctagctacaaacatgtcctgaatgctcctatggatgaggatactctgatgcgaaaatgccaagcagctcttatcaattttgatgaactcaataaaacatatggaaataactccattttaggagctgcaggaacaacatagcattctcagaaactccatcgaacaacttaaagtgtcagaatcactcagggccaccctgatttttcatttgaaggaagcgttgaatgagcaggagctcaaagtggaacacctcagaagccagcttcagctcagccccgattcaagagagcttctgagctctgcgtggggcttggaagcaacatggaaaggcgtcagccatcaaatcaagggcttaagaggtccagtctctccgatccacttagcactgttgctccagaagctgtgaaatctcttcaaaagggacaatcaagtgcagtgctgtattcacaggagggaaatggtgttgagcacagcgtgacagagacaaagcttgctgcaggtgctgcttcagatgatatacgtggtggtgctttgtcttcacgagtcaatgggggcaacactatgctgaaaatagaagagcacacttctggtaacaagaggcagaagctagaggatgacgcacatatttctcagcctcggtcagagtcaccgccgccgccgccacccccattccctcatcctgatacatttcaaccgcctccgccaccacctgagtatcctcgatcgccagatcctagcccaccaccgccacggacttcactgccaccccatataatccccccaccgccgccgccaccacccgcaatgccactccatatgttctcacatctaccacctccagctggtacatttgtaccttttcctgctggaccacctggcccaatgtattgcacttatccatcttttactcctgttgtcaactttcccatgaccagcccacctggtttccgtaatctaaccccgcctccatcttttcgaggattagctggtacattctatggccctcggttccccaccgcgcccccaccagcagacaggaaataagagtagtaacttacctgcagacttacagtgccagcagctttggcaagtatcataccagtttttttctgtttcaacagaggatacaaactcgtggggatgcgtcaccatgtgttgtagagctcaggaaactgttctattgttgtacattcagccagtcagcgtgcaacagtcaattttctgaactagttctggtcttggtcccagagtagaaagtgtagagcctgtacatgtcggctgctagagggaatttggaattccgagagcccggacccggagcaaatggctgcgtcagtttaatgatcgactgatccagtagttcctggtctaggcggtggagtaaaaactgtagattccgacagcttagggagaagatatggaacccaatagccgaagacagatgttgtagcatgacatgttgtaactcatcacagttgtgctcttcgctagatcatccgagaacacgtagatgttcttgtgatgtcttgagcgtgtaatcctgctgtttggtgtaagatatggcttcagctgctgtcgatggtcgaatctcttgctctgtttttaattacccttttttgctctcggctattctagcgccaataccttttgcgtctactttcgcatgtgttcccaaggaatttagtggtctgtcttg

SEQ ID NO: 9564 - DNA, 3478 bp, Zea Mays
aacacggcgagggcccccggtaggccgggacacaggaccttgacgcgagtacacgacacagctgaaggctgcgctcccctcgacccctcctccccttcgctccccagctccacaccaactcgctcaccgcctgcccgcctcgccggccaagccaagcgacccccttctcatcccctctctcgctgtcgatgggccctgcggcgctcctctgctccggccctccccgcaattaatcctcggcgtccgtgctctccccactctccgcgcacgccccgcccgtgagtcgtgatctcgccgtctccctcactcccatcctctgcctcaccgcacgagccccgtgcggtggcggtggtaaatggcgagcagcggggtgaggaacggggtggggtccaggatgagcgcgaagccggaccggcagggcgccggcgccacgcccaagacggccgcggggaagcaccgcctctcctcggcggcggcggggggcggcgcgtaccggcggaccagctcgggcccgctccacgcggcggcgggcggccgcgcggcgtcggatggagtttctagtagagtaagggttgctgtaaggcttaggcctaggaatgcagaagagttggtggcagatgcagattttggtgattgtgttgaacttcagccagagctcaaaaggttaaagcttcgtaaaaataattgggagtcagaaacatacgaattcgatgaactgctcactgagttttcttcacaaaagcgagtgtatgaagttgttgcaaaaccagttgtggagagtgttatggagggatataatggtacagttatggcatatggccagactggtactgggaaaacttttactctgggaagacttggtgaagaagacaccgctgctaggggaatcatggttcgtgcaatggaggatattctagcagacataacacctgggactgattctgtctcagtatcatatcttcagttgtacatggagatgatacaagatctccttgatcctgtaaatgataatatagccattgtagaagacccaaggactggggatgtttcattgcctggagccacagtagttgaagttagagatcaaaaaagctttgtggaccttctaagggtgggtgaggctcaccgtgttgctgcaaatacaaagttaaacactgagtcatctcgaagtcatgcgatcctcatggtgaatgtcaggaggtctgtaaaaggtagaactgaaatggatgtcagcatttctggtgaaaatgggcattcattgtccatgatggggtctttgagaccacctgttgttaggaaaagtaagcttgtagttgtcgacttggctggatcagagcgcatagacaagtcaggaagcgagggtcatacgttagaagaggcaaagtctatcaacttgtccttaagtgctctgggaaaatgcatcaatgcgcttgctgaaagcagtcctcatgtacctgttcgtgattctaagcttacaagattgcttaaagattcatttggaggtactgcaagaacatcattggttgtaacaattggtccatctccaagacatcggggggaaactaccagtacaataatgtttggacaaagaaaaatgaaaggcaaaggaagtattttgacgatgaagttgagagaataagagatgaagctcagtgccgcattgctgaggccgaaagggaatgcaaaatcacattagagaatgagaaaacgaagtgccatcaagaatacttagactcaatcagaatactggaggagaagtggaaagtacatcaacaatcacccaagaaacaaaatgaagaggccgagtctacatccaatgataccagagaagtgcataacttactgcagaatgagaaaatgctacgtcaatcggctgaagatgaggccagtgacctcaagaatcaagtatcacactggaaaaaactggaggctacagctacagctgaggtagtaaaactacggaaaatgctagatactgaagctagccagaaagagaaacttgaagcagaaatagatattttgagaagtcagttattgcagatgagtatggaagcagatgagacagggagtcttgataaaggaaatggaccaggaaaaatatttcctggtttagattcattggtgtctcagactcgaagctcacaattcagagagcagagcaatggaccaaagcaaccaattgccaaactctttgaacaagttgggttacaaaagatattgtcattgctcgaatctgaagaacctgatgtccgcgttcatgcagtgaaagttgttgcaaatctggcagctgaagaggcaaatcaggaaaagattgtagaagcaggtggcctcacttccctccttatgctacttaggagctctgaggatgagacaattcgtagagtagcagcaggagcaattgctaatcttgcaatgaatgaaacaaatcaagatcttatcatggcagaaggaggtgtaaccttgttgtctatgacagcatctgatgcagaggatccacaaactcttagaatggtggctggagcaatagctaacctttgtggcaatgacaaactgcaaatacggttgaggggagaaggtggaatcaaagcattgcttgggatggttaggtgtgggcaccctgatgtccttgctcaagttgcacgtggcattgcaaattttgcaaaatgtgaatctagagcagctactcaaggaaataaggtgggaaaatcactattaatcgacgatggatcgctcccttggattgtaaaaaatgccaataacgaagctgccccaattaggcggcacatagagctcgcactgtgtcatttggcacagcatgaagtaaattcgaacgacattatcaatgaaggagccctatgggagcttgtacggatttcaagggactgttctcgagaagatataaggaagttggcataccggacactgacatccagccccactcttcaagcggagatgaggagactgggaataaaactgtgatgacagagcaacaaagtgcagctggggctggcactatgaagttccatttctcgtgcactttatagaggtacccgttgctctgagtgctggtaatcgacttacctggtttcggcaggcaggcatacacgggcaccacaccgactaatcacaagaggcagtggagcaactttctcctcgagagttcatttttctttgttctgaggggggcagttgaaagcctggacaacactagcaattcatttatttgtaatgatcctagcatagcagatgttgttacctacccaatgcagcgtttgtaatttttttgctgtaaaaatatcaaaggcagaaaaaagtactttcgcagtatacctgttttccgtgaacactagaaagtttttttgtttttgttttattcatatactgcagacgagtcatgtttgctagccgtgattttcttgctttcttaatgcgcgttgacgctttcgtttcttttaccatgtatgctctcagataatct

SEQ ID NO: 9565 - DNA, 3422 bp, Zea Mays
gtaattgatgtggatatggagccttgatattgagcagatattgaaggaagcacaacaccgatggctacgacccgctgagatatgtgaaatacttaaaaattacagaaatttccacattgccccagaaccaccaaatagacctccaagtggttcacttttcttgtttgatcggaaagtattgagatatttccggaaggatggccatagttggaggaagaaaaaggatggaaaaactgtcaaagaagctcatgaaagattaaaatctggaagtgttgatgtgcttcattgctactatgctcatggtgaaggaaatgaaaactttcagaggaggagttattggatgttggaggaggattttatgcacattgtacttgtacattatcttgaagtcaagggcggtaaatcaacttctcgtattagaggacatgatgatatgcttcaagctgctcgtacggatagccctttaagccagttgccttcacaaactacagagggtggaaactctcttagcggacaagcctcagaatacgaggaaacagaatcagatatatattcaggaggagccggataccaccctttctcttggacgcagcaccatgaaaatggaggtggacctgtgattggcacttctatcccaagctcctacgttcctgcactgcctctaggtaaccttcaaggtttcccagctacagtgactaatacagacatttattctcgtcaagatgccttaccagttactcttaatgagcctggacttgcaattgaattcaatggagcagataatcagttggatccatcatcattgaatggccttgttaaacctttcctccaaatgtccacacctcaaagtactgttccctcagaattatttcctttcactgaagaacatggaaatgaatccttcacatttcatgaagtatatagtaatggattgagtatcaaggatgcagagattgtaggcaccaatgaagaatcagtatggaagctacctggtgctatcagctcaattccttcagaggacagtttccagcaaaatgatagatcgttggaggaaactattagttaccctctcttgaaaactcgctcgtctaatctttctgaaatgctgaaggacagctttaagaaaagtgatagtttcacgagatggatgagcaaagcacttggtgaagtagattcccaaattaagtccagttctggagtgtattggaacagtgaagagaccaataatatcattgaaacatcaagttgtgatcagttggatcaatgtactattgacccagtgctcgcacaagagcagctgttcagtatagttgatttttctccaagctggacatatgcgggctccaagactagggttctcattaacggtaaattcttaaattctgctgagcttaaaagatgcaagtggtcatgtatgtttggtgaggtcgaagttccagcagagatttcagctgatgggattctcagatgttattctccgtcacacaaacctggcagggttcctttttatgtcacatgtaccaacaggttggcctgcagcgaaatccgagagtttgagttccggccaagtgttactcaatacatggatgccccaagtccacatggtgctacaaacaaaacatatctccagatgcgtcttgataacctgctgtctttgggacacaatgagtaccaggcaacggtatctaaccccactaaggagatggttgatttgagcaagaagataagctcattgatgacagacaatgattcctggtcgcagttgctaaaattggctagtgataatgagcctgtcactgatgatgatcaggatgagttctttgaaaagcacttaaaggaaaaattgcatatctggcttgtccacaaagcaagcgatggtggcaaaggccccaatgtgttagatgacgaagggcaaggtgtacttcatctggcagctgccctaggttatgattgggtgataaggccagcagtttctgctggtgtgaatataaatttcagagatgctcatggatggactgcactccattgggctgcattttgtggcagagagcgaacagttgttgcacttatcgcacttggtgcggctcctggagctttgacagacccaacgccaattttccctacaggaagcacaccagctgatctggcatcagctaatggatacaaggggatctctggtttcttggccgagtcttctttaacaagtcatcttcagaccctcgatcttaaggaaggcaaggggagcaatccgccagaaatatccggtctgcctggtattggagatgttactgaaagaagagcatcaccattagcaggtgaaggtcttcaagctggatccatgggagattcactaggtgctattcgaaatgctgcccaagctgccgctcgtatatatcaagttttcagggtgcagtctttccagagaaagcaagcagttcagtatgaggatgacaatggtgcagtatcagatgaccgtgccatatcactcttatctgttaaaccatctaaacctgtacagctcgatcccctgcatgctgctgcaactcgaatacagaacaagtaccgtggatggaagggaagaaaggaatttctacttatcagacagcgcattgtcaagatccaggctcatgtgcgaggtcaccaagtgaggaagcattatcgtaaaatcatttggtctgttggaatagtggagaagatcatattgcgttggaggcgaaaaggggccgggttgcgtggatttcggtctacagaaggtgcaacggtgggcagcagtagtaatttgatccaaaataaacctgaggatgattatgatttcttacaacaaggacggaaacaaaccgaagaaaggctgcagaaagctcttgccagagtgaagtcgatggctcagtacccagacgctcgggatcagtatcaaaggattctgactgttgtgactaaaatccaagaatcgaaggccatgcaagaaaagatgctcgaggagtcgaccgagatggacgaaggcttctttatgagcgacttcaaagagctatgggatgacgacataccaatgccttcttggtcatagcaacttgtgtgtttatgcttgtaaattacttacatgtatgttagtgttaccaaactgatgacccgtagttgcattgctaagttaaccatatctagcgtgtatatattttagtttggttcagctcttagtcatttagctgtagtgttttgtacagtatatgttgtacagaaggaaaaacatatttactgaggactccttgggaatgggatggatatatatctacggctgacttgtttaaacttccgaccagtttgcataaacaaatgtttgtgtattaaacatgtcgaattgtccttgattctgtaaagtctgttcagttgagggctttggttcaagccccctcgcttgtaaattctac

SEQ ID NO: 9566 - DNA, 5352 bp, Zea Mays
atatggagtaagataaggagtataataaaaaaaatctggtgtagatattattagtccaccacagctgtcagccgggttccctgagcgcgcagcgcagcctgtggaccatacactttcacccgccccgacccgtcagtaatcgtgccatgattgcttttcgacctgttcccagggccgatccaagccgtccgtctcctcaccaagcggcccggatccctcctctccggccaccccaaaacacgcccgacgccagcgccaccgaaatcccccaacccatgcagcgcaagcattaccataacctcctcgcatatcggcccgcgctgctgccggaagcagatcggagcagcctcttcggctcttggcgacggatgttgctcgcttcgtttaccacgaccagatctgcgatggcttctgctcgcctcgctcgctacccaccagatcccggcgcctcccccctcgtcgctcaattctgctccgccgcgctgcgatcgatccgctcccagacgacgatcgcccggcgcggatcagcagccgccggggctgctccggcgtcgcgaatggccgcgctcgccgggccgacaagcagcgcagatcgtggggctcgccggcggcaccggcttcggcctcgtcttccgtggggacggcaggcgcgaggcggtgccctgcccgccgcggactgcctctgggagttcgcttccgttacggcacctgccatcctggccgtcggtcgggggctggcgttctcgtgaatcccgtggtgggccgggggcagaagcggtaactcgccgggccagcacctgaagataaatcatgtgaaatgacaccaaatacggtcactaactctactaaagatgtcttggaagctgatgtacatgtaagctgctccaactgaaggaaagcatttccaaggagattgaaaagactgaactccagattgattcattggaaggcgaacttaaatctgtgaatactgaggctgtaactactcttgaaagttctcccacaggggtgacacatacagaaaatctgtcaccttctggtgggacatcaaaggttcctggaagtgccgagatctgtgatacatttgatatgataaaagaaccgggggagctcattgtttctcctaaggtacctgtggtgcaggatgctgatgtcaaaggggtcgatatgatggaggttgaaacagctccagttcgcaatgcaaaaacagttccttcagaagagagtgctgtaactcctggagttgctgagggtaaggcatgtgcagctgctgatcttagctcattgatagcttctgaagaagctgggtctcaaaatgatattgacaatgacaggccgaaaacttctttgtgccatgctgattccatgaaaattaaagttagtgatgaactaccagtgaagcaatggacatactgtgatcatatgtctgatttacacagttctttcacatctgcaaataatgatatagccaaagaaatgaatgaggtgctatttaaatcattgcctgctggtacatctgcccttgatttgttggcatcaagtgatcttcttagccaacggaagattgatttgattgtcaaagaaagacttggagtacgtaaaaccaggctgaggttgaaagagcagattcttacaatgaagttcaaggcatatcgtcacttgtggaaagaggatgtacggctactttctgcaaagaaacagcgattgaagtctaataagcgcattgatcagaataaccgaacatctcaaattggatctcagaggcaacgcttttctaaccgctcacgattagccatgcctgctgggaatttaagtacattctcaactccggaaatgtcagatgttgcaagaaagttgttttcagaatctcaaattaagcgctgcagaaactacttgaaaatgcctgcactgattattgatgagaaagagaaggaacacctgaggtttctgaccaagaatggactggttgtggatcctgttttagttgagaaggaacggatcatgataaatccgtggactcaagacgaaaaggaaatttttatggagatgcttgctaaatttggcaaggatttctccaaaatttccagtttcatcacacataaaactactgcagactgtgtggagttctactacaagcatcataaatcagacagcttccgagaagtgaagaaactgttggaccttcatcaacagctgcctgccagcaattaccttggagcgaaatcaggacagaaatggaatcctgagtcaaatgctgcttctcttgatatgcttggggtagcatcagctgaagcagcccatgaccttgaatatgcaaacaaagtggagaaaatttctgtgaaatccctcatccggactgcatatgggtccaatgtttcatttgtgaccaaaaaatcttctgataaggagtgcattgacaatgtgcctttgcatgagagagaatctgtagcagctgatgtactagcaggcatatgcggcactccttctcctgatggaatgggctcatgcattactagttctgctgatcctggcctgaagatcagcatgaaaagagtggagcatgtcttatcccaagaaaatgacaaaaatgttaatgaggaagaatctctctctgatcaagagtgtgaatttgatccagttgattggaatgatgatgagaagtcaattttcattgaggcaatgaataactacggaaaggatttttctcggatctcgtcttgtgtgaagagcaagtcatatgaacaatgcaaagtgttctttagtaaggctcggaaatcacttggtttggatttgatccatcaaggggcagccgatgttagtatgccagctagtgataccaatggagggaggagcgatactgacgaggcctgtgctgtggaaatggattcagctatctgtaggaagcagtcttgttcaaagattgtgcaagatgtttgtcctactgaaggagccattttagggcctgactctgttttaatctctaagcagacagaaggagatatatcaaataggtgcattgttgatgttaaaattgaggaagatgataaggaagctgataaaaattgcagcaatgttgatgataagaggtccagtgatagtactcatcaagctggccctatcaacatcaattgcccagaaagtacagataagctgcaaggaactgatgatgccgttgaccaagtaaacatgcatagtagtgtcctcaactcttcaaatgagcatgcaatggccatgcactcagaagtgagatccagtttacactctgtagatgtacttcaaacagacaaagctgaaggtactggtactgatcctagccaggtggaagaatgttcacatcatgctgtctacacaccgatgacagctgggaattctggttcctcagctttcttaacttcagatagtggtatcaaggacaatgttcacatctcaaacatgtctggtgcctccactgttagtcctgcattcacttcaaactatcaacattctctgccaggagatatgcccctgtcgaaaccaaagccactagtaacctcccttaccccaaaggatttaatgcctgtgcagttcagttcagttcttcctgatcccactgcatttcgttttgagggcataaagcccaactttgaggacagcagtggcaacaaagtcagcagtgccctaggagctaaagacatttgcaagtacccagcttttaaagacccatctgataatgagcatgacacattgtttcgtaatattgatggttatatgaataatcatctgacaactgaattgccagttttttctcaaagaactgcaagtggcactgtgagtacttcgcagacaaaattccagaatggcaggtccagcagcgtgtgccttccaaacagttctgaggggattcaatggcccaggaaacctgaagaagtaccggaagattctttgaggccttgcgctcgcaatgcaaaaactgagggtggtgagaaacaaaagcgacctggtgatgtcaagttatttgggcagattctcagccatcagccaaccttgccaagttctggctcgttgtgtaatggtagccagagcaagcctccctcaccaaagattgacaaaacatctgtgagattgaccaacaatccaagggatcttgtagttttttcttccaggcctggtgtcagtccacatgtgggtctggaggaaagatcagtgaggagctacggccatctggatggaagcacgatacagcctgagcctctgctggtgatggcgaagtgccagagatccttggccagtgtaccattttactcggctaagaacagcacggttggcgtgtttccagattatcaacaaccttcaatgcagccacatcaattagatcccaagccgctggaaatgttttctgattcgcagaagaggaatgggctggaactcgtctcgggtttcggcggtgctggtatccttgttagcaacgtctcagaccatgtggctgctctcaaggctcggtatggtcccggttctaagataatgggcagtgacgcggatccttggaaagacataggaagcagcaccataccctttggtagcttgacatgtcaacagcggcccagcgccaccgtgggctcgttagaggtgattaccaggtgttttgtcagcagggtttgatgttgtcagtctatggaaattccttattctcagtatcctagtatgatggatggagttttggttgagatttgtccttgcattggccgttgtttcaacttcttctgtcagcatttctacgggtttatcacttgtgcagctgtgtctagatgcatggatgcactgaacattggctggaaggacatcgactgtgtttcctggtcatcctgtcctcgaacgtgtagggtttggtggtcctggtccagcagcaacagctactacgccagccatgacattgatgctttgctcgcttcgatcaaatcgtgtcagatgaagcctgaagatgatccacggccgctgtagcttgtagcttttttttgccgtttttttaaagttcctgacttcaccttggctacctgcttgcctctcacaatgttctccatcactagctacacccaccatccatacaatctcctccatcgtcatgcccaccatcacattgctctggcgctctggcaatgtacacttttttatgccacctcactagacatcattttaggtctgttccatcagaacctcaaacaaccccagcctaacacatgaactcaatccctaattcgtggggacgtcgaaccacatatgtagcaatttctttagaagtttttatgtgtgattttcaatgattacacatgaactcacggagcaagcaagaaaaaaagggtgctcacgataatgaag

SEQ ID NO: 9567 - DNA, 6105 bp, Zea Mays
atatggagtaagataaggagtataataaaaaaaatctggtgtagatattattagtccaccacagctgtcagccgggttccctgagcgcgcagcgcagcctgtggaccatacactttcacccgccccgacccgtcagtaatcgtgccatgattgcttttcgacctgttcccagggccgatccaagccgtccgtctcctcaccaagcggcccggatccctcctctccggccaccccaaaacacgcccgacgccagcgccaccgaaatcccccaacccatgcagcgcaagcattaccataacctcctcgcatatcggcccgcgctgctgccggaagcagatcggagcagcctcttcggctcttggcgacggatgttgctcgcttcgtttaccacgaccagatctgcgatggcttctgctcgcctcgctcgctacccaccagatcccggcgcctcccccctcgtcgctcaattctgctccgccgcgctgcgatcgatccgctcccagacgacgatcgcccggcgcggatcagcagccgccggggctgctccggcgtcgcgaatggccgcgctcgccgggccgacaagcagcgcagatcgtggggctcgccggcggcaccggcttcggcctcgtcttccgtggggacggcaggcgcgaggcggtgccctgcccgccgcggactgcctctgggagttcgcttccgttacggcacctgccatcctggccgtcggtcgggggctggcgttctcgtgaatcccgtggtgggccgggggcagaagcggtaactcgccgggccaggtttcttacgggttaggagcaggaggtcagagactccccagagttggcttcgccgcgcgcatgcgatttgcggcggcggccgaagcctcgtacagccgccgctgggacgacgacgacaacggcgacgtggatgcctccgccgccgccggatcgaagggactatctataccgggagggccgcaggcacgacggcggcgtcggcgactcgctcctgccgcctgcccccacgccgccgcgctggcgggactcgccgtaccacccgccgccgccaccgccccttcgggaccccgcgcggccctcgccgcgccgtgcgccgccgttggcctcctcaggtgggcatgccccccgcgaatgctcagatctgaggccgccgccgcctcgccgaccccctctggtgcccctaatttcctccaaccgctctgctatttcagaaggctactaccgacagggtggcggcgcgtacgaccgttcctaccctgatgacccgccgtctgtctacacgccgtcgcgctcggaccggtactggccggaagacgacgacgggggatacaagggtttcggtcggtatggcagcggtggccgcagggacggccgtgacatgaggggttcataccggaagtccccatacaggggcggctacggaagcgacttctccaggaaccactcagagcagccccctccgccaccacccaggaggtctcccttgaggtcagttgccgttccgatctgctatgaccctccgggcaatagaattaacagaggggacagggacaacctcccacgggtgacaccatggcggagaagggagagcagatctgaagtagccgatgctgatggaccgctttctgttggccaaagtactcggctctctgcttcagggaaggaggcttcagctcagcctctggccgcggcaggtcctcacgggacggaagacgaggcaccaaggaagaaggcacgccttggatggggtcagggtttggccaagtatgagaagcagaaggtgcagggtccttcggatcccgctgaagttgttgctgatgtaagttcaggtgatggcgaacagaagacctcccttgcgcctgcgccttctgttgcatctgtatttcctgctgcaccactgcctgagtctgcaccagcacctcctgctgctcttgcactttcgtctgctcctatgcgatgctcatctccagttactgcaccgccatattgttcctcagcacctgaagataaatcatgtgaaatgacaccaaatacggtcactaactctactaaagatgtcttggaagctgatggtaaaactttcaataatgaattttccatcaagttagatcagctcggtgatgatcctattaatggccttacaaacattctcgttgaacttatgcaacataatgattcttgttctggggattcaaacggcccgaccagtacatgtaagctgctccaactgaaggaaagcatttccaaggagattgaaaagactgaactccagattgattcattggaaggcgaacttaaatctgtgaatactgaggctgtaactactcttgaaagttctcccacaggggtgacacatacagaaaatctgtcaccttctggtgggacatcaaaggttcctggaagtgccgagatctgtgatacatttgatatgataaaagaaccgggggagctcattgtttctcctaaggtacctgtggtgcaggatgctgatgtcaaaggggtcgatatgatggaggttgaaacagctccagttcgcaatgcaaaaacagttccttcagaagagagtgctgtaactcctggagttgctgagggtaaggcatgtgcagctgctgatcttagctcattgatagcttctgaagaagctgggtctcaaaatgatattgacaatgacaggccgaaaacttctttgtgccatgctgattccatgaaaattaaagttagtgatgaactaccagtgaagcaatggacatactgtgatcatatgtctgatttacacagttctttcacatctgcaaataatgatatagccaaagaaatgaatgaggtgctatttaaatcattgcctgctggtacatctgcccttgatttgttggcatcaagtgatcttcttagccaacggaagattgatttgattgtcaaagaaagacttggagtacgtaaaaccaggctgaggttgaaagagcagattcttacaatgaagttcaaggcatatcgtcacttgtggaaagaggatgtacggctactttctgcaaagaaacagcgattgaagtctaataagcgcattgatcagaataaccgaacatctcaaattggatctcagaggcaacgcttttctaaccgctcacgattagccatgcctgctgggaatttaagtacattctcaactccggaaatgtcagatgttgcaagaaagttgttttcagaatctcaaattaagcgctgcagaaactacttgaaaatgcctgcactgattattgatgagaaagagaaggaacacctgaggtttctgaccaagaatggactggttgtggatcctgttttagttgagaaggaacggatcatgataaatccgtggactcaagacgaaaaggaaatttttatggagatgcttgctaaatttggcaaggatttctccaaaatttccagtttcatcacacataaaactactgcagactgtgtggagttctactacaagcatcataaatcagacagcttccgagaagtgaagaaactgttggaccttcatcaacagctgcctgccagcaattaccttggagcgaaatcaggacagaaatggaatcctgagtcaaatgctgcttctcttgatatgcttggggtagcatcagctgaagcagcccatgaccttgaatatgcaaacaaagtggagaaaatttctgtgaaatccctcatccggactgcatatgggtccaatgtttcatttgtgaccaaaaaatcttctgataaggagtgcattgacaatgtgcctttgcatgagagagaatctgtagcagctgatgtactagcaggcatatgcggcactccttctcctgatggaatgggctcatgcattactagttctgctgatcctggcctgaagatcagcatgaaaagagtggagcatgtcttatcccaagaaaatgacaaaaatgttaatgaggaagaatctctctctgatcaagagtgtgaatttgatccagttgattggaatgatgatgagaagtcaattttcattgaggcaatgaataactacggaaaggatttttctcggatctcgtcttgtgtgaagagcaagtcatatgaacaatgcaaagtgttctttagtaaggctcggaaatcacttggtttggatttgatccatcaaggggcagccgatgttagtatgccagctagtgataccaatggagggaggagcgatactgacgaggcctgtgctgtggaaatggattcagctatctgtaggaagcagtcttgttcaaagattgtgcaagatgtttgtcctactgaaggagccattttagggcctgactctgttttaatctctaagcagacagaaggagatatatcaaataggtgcattgttgatgttaaaattgaggaagatgataaggaagctgataaaaattgcagcaatgttgatgataagaggtccagtgatagtactcatcaagctggccctatcaacatcaattgcccagaaagtacagataagctgcaaggaactgatgatgccgttgaccaagtaaacatgcatagtagtgtcctcaactcttcaaatgagcatgcaatggccatgcactcagaagtgagatccagtttacactctgtagatgtacttcaaacagacaaagctgaaggtactggtactgatcctagccaggtggaagaatgttcacatcatgctgtctacacaccgatgacagctgggaattctggttcctcagctttcttaacttcagatagtggtatcaaggacaatgttcacatctcaaacatgtctggtgcctccactgttagtcctgcattcacttcaaactatcaacattctctgccaggagatatgcccctgtcgaaaccaaagccactagtaacctcccttaccccaaaggatttaatgcctgtgcagttcagttcagttcttcctgatcccactgcatttcgttttgagggcataaagcccaactttgaggacagcagtggcaacaaagtcagcagtgccctaggagctaaagacatttgcaagtacccagcttttaaagacccatctgataatgagcatgacacattgtttcgtaatattgatggttatatgaataatcatctgacaactgaattgccagttttttctcaaagaactgcaagtggcactgtgagtacttcgcagacaaaattccagaatggcaggtccagcagcgtgtgccttccaaacagttctgaggggattcaatggcccaggaaacctgaagaagtaccggaagattctttgaggccttgcgctcgcaatgcaaaaactgagggtggtgagaaacaaaagcgacctggtgatgtcaagttatttgggcagattctcagccatcagccaaccttgccaagttctggctcgttgtgtaatggtagccagagcaagcctccctcaccaaagattgacaaaacatctgtgagattgaccaacaatccaagggatcttgtagttttttcttccaggcctggtgtcagtccacatgtgggtctggaggaaagatcagtgaggagctacggccatctggatggaagcacgatacagcctgagcctctgctggtgatggcgaagtgccagagatccttggccagtgtaccattttactcggctaagaacagcacggttggcgtgtttccagattatcaacaaccttcaatgcagccacatcaattagatcccaagccgctggaaatgttttctgattcgcagaagaggaatgggctggaactcgtctcgggtttcggcggtgctggtatccttgttagcaacgtctcagaccatgtggctgctctcaaggctcggtatggtcccggttctaagataatgggcagtgacgcggatccttggaaagacataggaagcagcaccataccctttggtagcttgacatgtcaacagcggcccagcgccaccgtgggctcgttagaggtgattaccaggtgttttgtcagcagggtttgatgttgtcagtctatggaaattccttattctcagtatcctagtatgatggatggagttttggttgagatttgtccttgcattggccgttgtttcaacttcttctgtcagcatttc

SEQ ID NO: 9568 - DNA, 4974 bp, Zea Mays
atgaacttgctggtgggattgctggtagtagtggaactgcatgtggtggttctggttctgctacttagtgattgtgtgatagttctggttctgatactacttagtgttggtgcttatcctggtctgtgtgttggactttttgtcaggctatggactagcctgacctatttttttgtgccgtgctcagtgggttggctgggtaaaaaattctataggtctgtgcttgggctgaagcgcacgatcggacgtcgcattgtcttctacttctcgttctctcattctctggcaacacctggggctgagcggctgagcagtacgccgcactctggcggtctggccgagcggccagcgggcagcggggacaggacaggacaacgtccagccgtccaccactccaccaagcaccaggcgtccaggcaccagcaggtgatggttaaagaaaatgagaaattagttacagaagcaagactaaggcttacgactaccatcaattccattaggtttgttgatgtgaccaaatctcgaaataagaatgataacaccatcgtttttcatcattataaatttgatgtgtttaatgttgaaattgatcaacaactgaatgagatagaagatcgatttggtggccaagcgacagaccttttatcactttgtgcttccttgaatccaatacttggctcttttgacatagaaaaggaccgcaatggcaacttgcgggaaacagaacttgaagtctacctgtgctttaaagcaacccctgatcgtcagtcatacgacgccccagcagcttccagggatcaaccaggttcagcatggctcgctcagcatgcaccaaatggactagtcatgtttgttattttgaactaggcagcgtaaaccagcaccacacgcaacgcaaacccaactctgcaccattattttgccaagtgctaacaccaattccgacaacccctcaagattccctaaccaacaagcaattggatcccattcatgtatttgaatcgtgagctaatggaccgtgcaaagtgctatatggtgcatgacaaagtttcccaatgtacacgtcattttcaaccaattctctagaggaacattaaagaaataataaatagcaatccatctttttattcctgacagggagcaaggatggtttgagaatgtacctgaagatatgaagagtaggcttgtaacatcataactatttattgactaattaaaaatgaccttgaatatcttgcttattttgatctcataaatttcttaaaggtgtcccaatcaatcatcacataacataagtgtaaattttgataatttgatactacaccatttttttctggatacagaaaatctagaaacaaagctaaaatacagcaaatctagaagcaaagctgcaaaaaaaatcatcaaggcaggtctttcaggaaaaaaaatcaaggtagctctagtcattaagacatctaacttcaagcccttgccaaagatcagtaactacataatcctatatactgatacattgttttgcacgaaggctgcataaattccaagtatccaacctagaactttaacaagtcaggataatgcagaaatatgccataaaagtcacaatcaattcatacaactccaatcaattgtcgtttgttttgcactgtaagttctatcaatagcaatggcaaataaacaaacaactttggctacttccatttggaggatctgtgttgtattgctcaaagcagtccaatccttggtacattttttgtcttaactgctgacagcatctctaccacagatagaatgagcccaacagaaaagataaaatagcccacaacaaaatagaaatgacaaaacaatgaaatatcaaggagttccaggtatcaatgcatcatcttattttccacaaaattgctcttctttagtttttcctaaggtaatgctctcaaagataaatttgatggcatggtacaacagtgcaacagtcaatgcataaagccaaatacaataaaaaatggcagatgcaatgacggaggcttccacataagtaaggtctagggaaggaataaactggggcgaaccttctcccacaaatgcagattgactgtttcgaacccgtaacctgatgacttagtgaaacagctctcaccactgcaccagccacatacaatgcacacagtccaaaattgcaatttcaagttaatcaggacaagcaaaagctacattaaaaaataaatttgaacagtaaacgcagtcattgttgattcattaacgctgtgaatattgcaattacaaagggtaatatgcagtactcaaccctcatattaaatggccaccatggaatttacaagacattaagggctagtttgggagtccgaaaactgaaggggattagaggggctaaaatcaccttcttattcaaattaaataagaaggtgattttagctccttcaatcccggttttcgggctctcaaatgagcccaaaggctagtttggtgaccagggaattggtgggggtctatggaggaggaatccctttgctatttaatgaatatatcaaggggatttctactttatggatcccctccaatttccgggtcaccaaaccaaccctaaccgaatggacaaccaagtaaacaaaatcatccctagaataaaagccataattgctggggacaaataacaagcttgtccatagcgctacaacaatgttgcaagcttgacgatttgtacttgacaatgtcatcccttcaaatcttacggataacttcattaacttataaatgaagaaaatagtaagcatagggtacatagaaacattgtcttttgcgtacttggccctgatgtataggttaagtgacagtgccaaagccaactaataattttgtccaggaaacagctatggaatgctatattttaagtcacagcacacagcagtaagtccattaatgacatcataaattcatttaacgaaagatatgctgtggacctcaaagtggtgcggaaagggattttgacatcttcaaatagtcaactatcacaaaacacaaaaaatacaccatgactatttacattggatagctttgctctcatcaaatttcatttctacaagccagctcatccaaggttcctatccgatgaacttcaaatcaagtgggttctaaaatttgttcctagtaaaatacatataaaacctaaccctcccatatgagaagaaagtaccaaatacagccatgtgcaaatatggtgccaaataatcatcagaatatgtgcaagcacactgacaaagaaaggcacatactcaaattatttttagataagttgtcaaaaaagtattatggcagctttgtacaggttcgtttgcttaatacaaaagtaccatatcccttccaaattccaaaatattttgttcttgtagaaactacaaagcacaaggatttgtagacagctaatctgacgctgttctaaactagcaacattttctgcacatcaattcaaatgaaaaacaagattcaatactgcaattgcaaagaacaatatgcaattacaaaaaggacacatctgtgtttccaaagatgatttggcttaaaaactttacaagatttcatggttgtaacataaaaaaactcgacctgtgggggtaagcatagggcctctagctgagttggttagttggtctgagtagcattccttatgtccttagttcgaatcccagctggagcgaattttaggctaaggttaaaaaaggtcactcactggttcccctgattgtgtgcatacgagatggactaacctatagagggcggatcctcgggtgggggctgggagagctcaaagcacgagtaaaaatctgatctatagggggggggggcgaaccctcatgttgcacgggggactagcttttgtgaccttttattgatcggggctccgattgaactttttcttaatataataccgtgggggcggtctttcccccaccggacgagttaagggggtaagggagccggccccctttttatcttttcagtggtaaggtgtaaggtgaggcgacaccttactaatatataaatataggaacatattcttaaataggtagggataataataccaaataggagtacaagttcaacataaaccaacataatagaattaaaaatccaacataactaatagatagtagtagaatattaggaaaaaatgaatacataactaatagatttactggtttaatagagaagtaaaaagaaaagaaaaaataaaggagatgggccaccggcctgctgtttctcggcccagccagcccactacttgacctaacttatcctgctccatagtacccctcgaggaagggaggggagctgccaccttgcaaccaccagagagaggagagggaggaggggaggttgttgaccgtctaagagatagagagaggaggacatgtgccagcgcctccgcgaaggaaggaccgagccgcacaaccgtggaagggagggtagagctgtgccgtcgtggaagggcggactggtgagcggagcaagaccctgtgcgcccacgccacagcagaaggcaaagaagggtcaccgccgtcaacagaaaagccaccgccaccaccaaaggaatggtggtgcaggtctagaagatcggtcgccaagatattacgcaagggattcaattttgtagttattcttgttgactgggaagtttggaagcacaagaatgctgctgttgtttgaaggaacttctctgaatgtccagtttgttcttcaaatgatagaagagggatgccaaatgtggcatttgccggtgcttctgctcttcgggagctcatcctgaggtcgcttgctctatacggggccccatagtttgggttatatgtctgaatgtatgcactcaatgctatggggccatttgaaccaacagtgacttgtactggattatgagtccaacatctacatatactagtacaatgtccgtgcattgcgaca

SEQ ID NO: 9569 - DNA, 1577 bp, Zea Mays
gttcgtgcatcctctctcccaaactcacgtggaagctttggcagccctgtttggatggtctgctccagtagatttctgcgcagattagcagagtgaggacatttaaatgtatctctgatgaagaaactacgtcatccaaatattatactcttcatgggagcagttgcatctccagaacgactttgtattgttacagaatttcttccacgggggagtttgttccgcttacttcaaaagaacactgccaagctggatccaagacgacgagttcacatggctatagacattgcaaggggtatgaattatcttcaccattgtagccctcctattgttcaccgtgatttaaaatcgtcaaatttgttggtagacaagaactggactgtaaaggttgcagatttcggtctttcacgtctaaaactcgaaacgtttttacgaacaaaaactggaaaaggaacgccacaatggatggccccagaggtgttatgtaatgaaccttcagatgagaagtctgacgtgtacagctatggggttattctatgggaacttgtgacccagaagataccctgggataatctcaatacaatgcaggttattggagctgtcggctttatggatcagaggttggacattccaagcgatacagatcctaaatgggcatcgatgatcgagagttgttgggataggtaagcatattgtttttccctactaagcaacaactagttgaatgcatatggtggagatcatgtttgaagaccataggaagcccaaatcaattttttttgagaaaatcatagttccattctgatgaacagtgtgattagaagtccctgatacatgtatatccttttatttgagcagcgacccgcagaaacgcccttcgttcctagaggtcctggacaggcttagagatctgcagaagcagtacagcctgcaggctcagatgcagcgtaacctgtccgcggatgctctcctgaaaggcgctgtgaaatgagcgtcgaggaatgctagctctcggaatgtaatggaacatggcactggacacattgacagcgaccagggcaagcgttcatcgacatttgtagcgtctgcgtgctgatgaggaaggctggctacgtgcatcttggtggccttcgtatagaagaggaggagctacagtccggactccggaggctgtaccggcaaaggcggccggtgcatgcatggcttcatgtatctcaaggcctcaacgaagcttcataatgcggtaatcttcggccaagaaggccggacacttgtgaaacgagaatggctaagaaggccggactactttttgtattaacgccccagtttttcaatgggggaaaaatcgaattgtttataaattgtatacttagtctcgataacgttcttgcctgcatatagaaccgggtgtcttcagacgcatggatgggtggtagtagtgtgttcagatgcatagaaagatggtaagcatgtctctgctgctgctttccttactgaatggacctttgatgtcgtcgctcattgcagcgttttctgaacagtgaccacattacagccggctgcacgcctgcacttgc

SEQ ID NO: 9570 - DNA, 2648 bp, Zea Mays
ctcgcgtccacgcgctcctcttccgattatccatcatgcatcacacgctcccctagttttttttcttttcacaatacgctccccgctcgcccaaaaacctcacacctaggccccccacgtcgccggctcccggcgatggcgccgctgcccttcctgctgggtttcctcctcggcgccctggcgctggcggctgtcgaggcggcggcgatccttctgctgctccgccgcctccgccgcagtcaggctgcggcgggggacgcgctaccagccgccgacgagctgcccggggaacgccccttcccctacgagaagcagggttttctgtggatactggagccagaaaaaatgccaaaactcagtaatgaccgcttatcggctggaggtcctagagagacaaaagacaagaagaatattgtggaagtttttcctgcaaagaagatggctaaaatcaagggaaactctctttgtttgtctggtcctgatggctcccaagcaaccattgagcttttgaactgcacggtacttgcagtttctgcatcaagtatgccctcgcgtaaatgggccaagaggttcccagtaaaattagaaagcaaggacaatgagatttataatggaagcaaggtgtgctatctttatacagacacttcctgggagaaggaatcatggtgtaaagcactccgtattgcagctactgctgacaaggaaaaattaaattggcatgccaagctgagcgaaaaattcctcaattacatatcatcattaaattctgaatacccatgttttctaaagcctccaatactctctggtgaggatcatgaggttatggacaagacatcaaagactgatgggtcttcaaaagtacgtcttttcctcaagaagttggcgaagaaggcatctacgaaggctgccttagagagcaaaacaagttcaggaatgtcagtgcaaggtgaaaaaaagatacttgataaattgcgcagctatcagggtgcaccatttattgaagcattaataggtccacaagaggacaagcttggtggcaattcatcgcaagatactgtaaaagccactgccccgcctgctgcattgaatcaaattggacagctttcaacttcacctgatgtgaatgcggatgaccgagttgcggatgaaggcacactttgttggaacctcggactttagccttggagaacttccaccttatgtgcatgcgatgagagtccttccgctggatcttaatgaattatgggcctttgaagttgactttgagtattcgggtgggatactgctgcacattgaaacaaggcttgaggttcaggaaccagagttgcaaaaggacatcatgaaaagtaattttggagcagatgctaatggagatgttgattctgatcttcttgagagtattgaacagtatggtaaccaatttaaaggctcgcacaattcagcttcttcaattggggagaatgatgaagcagatgcttcaagtcagtcaaagagcattggatggacttcagcatatatatcaagatggaaaactatcctgcactcaatagccgaccatgtctcacaggttcctctttctctggcaataaggatttcatctgttcgaggtatcttgcggatacaaatgaagccccctccttctgatcaaatttggtatggatttacgtcaatgcctgatctagaatgggatttggaatcttctgttggggataggaaaatcaccaacagtcatatcgctgcacttattggtaacagattcaaggcttcgcttcgagatagcttagtgcttccgaattgtgaaagcatctccatgccgtggatgttggctgaaaaggatgattgggtacctcgcaaggatgctccttttatttggctaaatcatgagcccactgagatgagaatccatgccacagctacagcatcaactcagtccgaggaaggtggcttgaaggatggtgggagtgaggaatcatcgagagtagtggcatccattgacgaggcaaaacaagagcccaaggcagaggcatcattgcacggccagtcttcatctgctccaggcagtgaatctgcccacagcgatgcaaatgatgagctgaggaaaccgctgttgatcacagagaaactccaggaagaagcttcagaagccgcaggtgtcagcatcacccattggagaggacgcgaagcgaaaaagcgggaggcgagctcggatgatggatttcgggaagaggatgggggacaagctggaggagaagaggcggaccatcgaagagaaagggaggcacatcgtggagaagatgcgagagaatgctaggaccaacagcatggagaggaccagtagctagcgaggatgcaaggatcggcatcttgtttcgttgatttgggaagtggtgtataggctgaacttgtatgttttctttgtagagttgtgcaacatttagggttccacgagagctgatctattatgtgggtgtggcggcggcaaatatgcatggatgggatgagcggtgtacttgtgacctcatgttagtatcagcttgtggaatactatgaaaaatgcaggtgccaatgcctttcaccatgctactagttagtttgtctgctacttgttcccaagtttaagaatgtgatcaactgtgacaccttgttta

SEQ ID NO: 9571 - DNA, 1006 bp, Zea Mays
atacgactgggtcgctttgacttacgtaggacactcccgactctagcctcctgcggcttccgcatcctccgcttcgtgtcgtctgccctgctgcccaagcctccggaggttctagcggagccggctcactctcgcgacaccgccgcggcctccggctatatatggacggcgaggaggcgccccttggcgcgctcaacctggctgagtacgcccccgccggcgcccgcaccgtcgactgctacaggcgcatccgcaagatcggcgagggcacctacggtgaggtgtttgaagctgtggatattattactggggaaagagcagcacttaagaaaataaaactggatgatggcaaagaagggtttccacgccaaatcttgcgtgagattaaactattaaaaaagctggatcatgagaacatcatcagattgaaagagattgtagtatctcctggttctgcacatggaacaggcggatcagatgatcacatctataggggagatatctacatggtgtttgaatacatggaccatgatttgaagaaagtattgcaccatagtgccccatcccaagtcaaggtttatatggggcagctgctaaaaggattgcagtactgccatgccaacaatgtacttcatcgggatatcaaaggggctaatcttctaataactggtggtaagttgttaaaactcgcagattttggccttgcaaggctgttcactagagacggaactttaacaaatcatgtcatcactttatggtaccgaccccctgagttgcttcttggtgccacaagttatgctgaacctgtggatatttggtctgtcggttgcatatttgcagaatttttacttaagaaaccattatttcctggcagaactgaggcaccacacaaggagcagctccattcatggccgcatccccgccacttccctcaatcaattccaaatccctctcacccataggtcctacaccttcctagttccctcccaaactagttctaccccag

SEQ ID NO: 9572 - DNA, 1458 bp, Zea Mays
atacgactgggtcgctttgacttacgtaggacactcccgactctagcctcctgcggcttccgcatcctccgcttcgtgtcgtctgccctgctgcccaagcctccggaggttctagcggagccggctcactctcgcgacaccgccgcggcctccggctatatatggacggcgaggaggcgccccttggcgcgctcaacctggctgagtacgcccccgccggcgcccgcaccgtcgactgctacaggcgcatccgcaagatcggcgagggcacctacggtgaggtgtttgaagctgtggatattattactggggaaagagcagcacttaagaaaataaaactggatgatggcaaagaagggtttccacgccaaatcttgcgtgagattaaactattaaaaaagctggatcatgagaacatcatcagattgaaagagattgtagtatctcctggttctgcacatggaacaggcggatcagatgatcacatctataggggagatatctacatggtgtttgaatacatggaccatgatttgaagaaagtattgcaccatagtgccccatcccaagtcaaggtttatatggggcagctgctaaaaggattgcagtactgccatgccaacaatgtacttcatcgggatatcaaaggggctaatcttctaataactggtggtaagttgttaaaactcgcagattttggccttgcaaggctgttcactagagacggaactttaacaaatcatgtcatcactttatggtaccgaccccctgagttgcttcttggtgccacaagttatgctgaacctgtggatatttggtctgtcggttgcatatttgcagaatttttacttaagaaaccattatttcctggcagaactgagttatcaaaaatatttgaactgtgtggatctccaaacgaggaaagctggccaggtgtttccaagctaccattgtataagacaatgactatccgtcctgcgactcctaccaaacgaagcctgagagatattttgcagaactttgactgtcctgcagttgaattaattgaacggatgttgatccttaatccttcacagaggatttctgcacaagatgctcttggtgcggcatacttcatcaactaaactcatatgggggtgtggggtgtgtgtgtgtgttgggggggggggggggggtatagattcgctgttcttttcgagtgcgactaagttttgtttaccttgtcaggatgggtctagggatctctaattggtgtaagtactacctgaagactgaaagtcttgtttctcctgctgacattggatttaggactagcaagcagtttaactttctctgttctagctttaaacataatatatatagatgcattgtacattattactcatggggaaaaatgtatttgattattaattaatagcaagtgattcttggtatattttcatatgatagcgtttcata

SEQ ID NO: 9573 - DNA, 1571 bp, Zea Mays
atacgactgggtcgctttgacttacgtaggacactcccgactctagcctcctgcggcttccgcatcctccgcttcgtgtcgtctgccctgctgcccaagcctccggaggttctagcggagccggctcactctcgcgacaccgccgcggcctccggctatatatggacggcgaggaggcgccccttggcgcgctcaacctggctgagtacgcccccgccggcgcccgcaccgtcgactgctacaggcgcatccgcaagatcggcgagggcacctacggtagatgttgagtggccgtgggatcgtacggccggcggcggaatgatgatccgtttggtccatggatgcacgattcatggcgtacttggagccaattgtcggcggagactttgttgaggtgtttgaagctgtggatattattactggggaaagagcagcacttaagaaaataaaactggatgatggcaaagaagggtttccacgccaaatcttgcgtgagattaaactattaaaaaagctggatcatgagaacatcatcagattgaaagagattgtagtatctcctggttctgcacatggaacaggcggatcagatgatcacatctataggggagatatctacatggtgtttgaatacatggaccatgatttgaagaaagtattgcaccatagtgccccatcccaagtcaaggtttatatggggcagctgctaaaaggattgcagtactgccatgccaacaatgtacttcatcgggatatcaaaggggctaatcttctaataactggtggtaagttgttaaaactcgcagattttggccttgcaaggctgttcactagagacggaactttaacaaatcatgtcatcactttatggtaccgaccccctgagttgcttcttggtgccacaagttatgctgaacctgtggatatttggtctgtcggttgcatatttgcagaatttttacttaagaaaccattatttcctggcagaactgagttatcaaaaatatttgaactgtgtggatctccaaacgaggaaagctggccaggtgtttccaagctaccattgtataagacaatgactatccgtcctgcgactcctaccaaacgaagcctgagagatattttgcagaactttgactgtcctgcagttgaattaattgaacggatgttgatccttaatccttcacagaggatttctgcacaagatgctcttggtgcggcatacttcatcaactaaactcatatgggggtgtggggtgtgtgtgtgtgttgggggggggggggggggtatagattcgctgttcttttcgagtgcgactaagttttgtttaccttgtcaggatgggtctagggatctctaattggtgtaagtactacctgaagactgaaagtcttgtttctcctgctgacattggatttaggactagcaagcagtttaactttctctgttctagctttaaacataatatatatagatgcattgtacattattactcatggggaaaaatgtatttgattattaattaatagcaagtgattcttggtatattttcatatgatagcgtttcata

SEQ ID NO: 9574 - DNA, 2627 bp, Zea Mays
gtgcgcctctgcaatcctctgtctctctttcctctgacttcgctgcctcctcgtccgtctcgcccggtcctctcactcgaagactctcgcttcgcttccaagttcaccccaatggcgacgcaaccgcttacatcaccgcgcgcttgagcgagagaccgatagcccccaccaaccgcgcgccttcgcggagcatggcggcgccggggctggacaaggtcatggcgttcctcaccgaccacggcttcgccggcgcggcctccgcgcttcgtgacgacgtccttgaacgcaccgccgccggggacgaaagccacgacgccgcattagatccccacctcccgccgctccggatgcccgcctccgccggcggtgccggtgccggtgccggtgccggcgctggcgctggcacgccgacgcccgcgagccccggttccagctccggttcggcgtcctcatcagctttcgtaagcttgcgctccacaccctcagggctgttgaatccgtatggactatggtcgccgcggcattcgcagtcggacgcgtcttcatcggagatggagtttggtacagcgcgccagtacgacaccaccgacctcttcttccaagaggattggctctacgacgatcacctcttccctagcaagctggacgatgaggatgacgaaggcaaagaggaggacaaatttgtactggatgctcacgatggttcggagcaggttgaaataggcaagcttggtgcaggccataaccaccgtcacgaacacatcggtggtgaccgatgcgagggttgtgctgaggtgtacatatgctcatcgccactctgtggttgttgtggagggggactcaagaatgatgggcttgatgtggccaggagctcaagctccactgtgtatgggagatacaagatcatggatgaccagacagagatattggatgattgtgcgcaggatgcgtttcagttgaagcagagtagagatattatgtttgaatgcggtatgacgagggatcctggacgaggatatgatgattcagggctgagtgttgtggagaaggagcttcaaatactcagttcatttgatactgttgtgaatcacggtacatatgatttcacggaaaatggtgagctcaatggcagctgtgacaaaaatctgaaaagcagcattcataaagaatatccgaaaggtcataggatacagccattccctgaaagtggtgatcttgatgaagctgatgagtttcgacatgttggatcattaaatacagatgttcaacattctactgctcttaaagctgaggaagatgccgagacaaatattgatcttgctctctctgattttcaccgagaatatgaggtatttgaattgagaattatccaccgcaagaacaggactggatttgaagaaaacaaagatttccccatcgtcttaaattcggttgttgctggaaggtattatatcactgaatatctaggctcagctgcattcagcaaggttgtgcaagcacatgatcttcgtacaggaatggatgtttgccttaaaataattaaaaatgataaggacttcttcgaccagagcttggatgagataaaacttctgaagttcgtgaacaaatatgatccactagatgaacaccatgtgttgcgcctctatgactacttttaccatcaggaacacctttttattgtcactgaactactgcgagcaaatctatacgagtttcagaaatataatcaagaatctggtggtgaggtgtattttactttgcctaggatacaggttatagctcggcaatgtttggaggccttggtttacttgcaccgtctgaggatcattcattgtgacctaaagccagaaaatattcttatcaagagctacagtagatgtgaaattaaagtcattgatctgggaagtagttgcttcttgacagacaacttatgtctctatgtccaatcacgctcttatcgagctcctgaggtcattctaggcctaccttatgatcagaggattgatatttggtctcttggtattatttcctaacgagcctgtgtccgtaatgcttgctcaaatgattgggataaccggcccaattgacatggaaatgctagaattgggacaggagacacagaagtatttcactgatgattatgacctttttaccgagaatgaggagacagatcagctagagtatttgatcccggagaaatcctccttgcgacaacacatacaatgtcctgattcagagtttgtcgattttctgtcttatctactgcaaattaaccccaggaaaagacctacagctgacgaagcactacagcatccatggctttctttctcgtactaatgagaagccatccggtgctttcttcacatataaagaatagccctccttttctgggtgcaggattcttctttttttgtgtcttcagggtaattcttgcgtttcctttttctgggtccaggattctttttttttgtcttcagggtaattcttggtgtgaagtgtgaacccctgccctggagtgattcatgagtgtatgtaaatatcagaaaattttccgcggagtaactgtacagttgtaagcccactcttgtactcctgatcatgaatgataacatgggaatttcaaaata

SEQ ID NO: 9575 - DNA, 1857 bp, Zea Mays
cttggttctgcgtcaagccacccgccgcgtgcggtgcgggcaactctgccgtcagcgctgcgtgcgagcggagcgcatcagcagcaccagattcgacgcccgaattctccctcattggctcgccaccgccgcgcccttgactagcccgcctcatccaatctccctcctcggggtcagggtcctgacggcgacatcctaccgcacacgcagccgcagccgcagctgagaaacaaacagggctgggctgggcaggaggagagcagcggcgggcctgctcgagcgagcgagcgagcaaccagcaccagctccttagtcagcagcagcgacagggggtcggatcaggccgctctctctgctacactcgggcgcctccaccagcagcagcagcagcaggaggatcaaaaggccaatgggggcgcacgccaccgcggccgcggccgccgtcctgctcgtcgccacctgcgtcgcggcggcggcggcggcgccgctgcagcagcacgagcccggcaggatctcaggggacgcggtgggcgtgctggacgacgaccccgtggggaagctgaaggtgttcgtgtacgagatgccgcgcaagtacaacaggatgctgctggacaaggacagccggtgcctgcaccacatgttcgcggcggagatcttcatgcaccagttcctgctgtcgagcgcggtgcggacgctggacccggaggaggccgactggttctacacgcccgcgtacaccacctgcgacctcacgccgcagggcttcccgctgccgttccgggcgccgcggatcatgcgcagcgccatccgctacgtggccaccacgtggcccttctggaaccgcaccgacggcgccgaccacttcttcctcacgccgcacgacttcggcgcctgcttccactaccaggaggagcgcgccatggagcggggcatcctgccgctgctccgccgcgccacgctggtgcagacgttcggccagcgcaaccacgtgtgcctgcaggacggctccatcaccgtcccgccctacgccgacccgggcaagatgcaggcgcacctcatcagccccggcacgccgcgctccatcttcgtctacttcaggggcctcttctacgacatgggcaacgaccccgagggcggctactacgccaggggcgctcgcgcgtcggtgtgggagaacttcaaggacaacccgctgttcgacatctcgacggagcacccgtcgacgtactacgaggacatgcagcgcgccatcttctgcctgtgcccgctggggtgggcgccctggagcccccggctggtggaggcggtggtgttcgggtgcatccccgtcatcatcgccgacgacatcgtgctgccgttcgcggacgccatcccctgggaggacatcagcgtgttcgtggcggagcgggacgtgccgcgcctcgactccatcctcacctccatcccgctgcccgacatcctgcggaggcagcgcctgctggcgcgggactccgtcaagcaggcgctgctgttccaccagcccgccaggcccggggacgccttccaccaggtgctcaacgggctggcgcggaagctgccgcacggcgagggcgtgttcctgcagcccggggagaaggcgctcgactgggacgccggactccagagcgacctcaagccctggtagtggactggactcgttgtacatctcttcgtgttcctttgtactctttcatttgacatgacatcgatggatggatggatcacgcattagtttttgtaccacggcccgtttacatgcagcagcaatatactaatatatagtgtattttccctgctctccactatttacaacgacatgccatgcctcgctgacatccg

SEQ ID NO: 9576 - DNA, 1455 bp, Zea Mays
ctagagacttcatcaccgcaggcagtcgcgcggcggctctcctccccgcaggcagtcgcgcggcggcctcatccccgctggcgagcctccactcccctccgccggagtcagggttctctcaattgcgaatgctcactcttgagtaaagggataggctaaagagcagctccatccagttcgacgaccatagtttttgcgagtgggtgcacaacctcaaattagcaagtacatgcctacatcgtcgacaactaaaggcaattactgagggagctcggtggggaagacctaaaggtgaagacgcggaaaaactcagggagaagctgaggcaggagtgcctgtggaaggggacggaactggcacatggggtggctgacgccctcttcgctgtatcacccaccgaggacctcgacggccctattgtacacctcccaccgcccgctgttcgactcccgcgcgagaagcatcttggtgctgggacctcactgccaggattagtagctgcaaagatacttgtgttgccaccttatcagggtgaaggctatggtcttggtcttcttgaagcaatcaattatattgcacagtctaagaacatttacgatgttacaatagaaagcccttctgattccttgcagtatgtgagatcatccattgactgcctctgtttgctcatgtttgatccgatcaaacctgcactcggtgctattgtctcgtctctgaaggagaccaacctgtcaaaaagggcccaaagtttgagaatggttccaccagctgacctgatggagactatatgtcagaagctgaagataaagaagaaacagttccttcggtgctgggaaattctgatcttcctaagcctcgactctcaggatcataagagcgtggacaactttagggcctgcatatatgacttcatgaagggggagatccttggcagtgcctctagaactaacaggaagcgtctgttgtagatgccaaccagtttcaataaggaggcatcttttgctgtgtattggacacatgagattggggatgaggatgaacaaactgttgagcagcagccagaggatctgaggacgcaggagcaacagctcaatgagctcgtggacatccaaatcgaggatattgctggggtcgccaagaacgtcacttcacgtggcaaggataagatggcagagctggcggttcaatgaatttgggtgaggttcctacttcaaacgacgttaaaatgttgtcgtagcttatctggtgaggtctcttttacgggttggcttcttggtagaaagggaatgtcacagcataggcactgagtagattgtcacggcagattattatgtacttcaattctggaatatttgatgggaatgctattttagattgcttggtaagtgggaaccgcctcaaatcacagaagtagaagcagcttccgattcagccggaaccatttctccaaaaatg

SEQ ID NO: 9577 - DNA, 5179 bp, Zea Mays
aaatatataagagattagtgtagcacggttctgccagtgccatccgcgccctcagccgaggatctccattctcctccccacgcagaatccaccgcgaggttgcagtggtgtcgtgctccccagatctaccacgggcgcgtgcccggatctggcccgacgaacagcggtggagctcgcgcggtgttccattcatggattgggatctcaagatgtcggtctcctaggacctccgcgacttcccccgcgacagcgtcgggcattgccgccgcagctgccgcgccttccctcgcgacggcgccgagccgagcggagtgctccgtcgacctcaagctcggcaggacgacaccaccacgaaggagccggtggctgcaaccgcagcgccgtccgccagcccgatgggcggcgtcgggcattgccgccgcagctgccgagccttcccccgcgacggtgctgagccgggcggagtgctccgtcgacctcaagctcggcgggctaggcccaggagcagcccccggccccggggacctgcgacctgtacaagggccgctgggtgtacgacgagtcccgcgcgccgctgtacaaggagtccgactgcagcttcctcacggagcaggtcacctgtatgcgcaacggccgacgcgacgacgactaccagaagtggcgctggcagcccgacggctgcgatctccccaggtaccaccgccttgcttcctcgcttgcctgccactgattctacagaaacggtgcctatacgtatacgtgtacggtttacgcggcccggcgcgcgtcgtagggtaggtgcgcgttttcgtttgcgggctggatactgtgaattctagcaaaattaccttaattattagctgagcacacctctgtacaccataattatccgagactgagttgaatctgtatgtagaacctgctatgggatggcacttcttgtgactatgttagcagtagattcgtgtttgactgtagtagtaaaataaattgttgatcccaatggattgttctacaacctgtatctattttatgagtcggatccaatgccatctgccgccatgtcaaagcgaggtaagcagcctcttttaccaactggattcggccatttctcgtcgctcgatctggctataaatctcgcctgctcgtgcatgtgacatagttcggctgcttcaaggtgctcggaaaggggatgctgttgtccaaccccatcattgttagggccaagctcatctccaagatcatcgagaagaggatcaatgttactggaggcactgtcttgctgaccgccacataggtctttatgcatcttgttttatctatctgtgataagaaagctttccatttctttttgtggatcatgcgttgtgagataatattctctggtacgtctaattgtgggcatgtattgtccttttctggtgtatggttggaaacgacaaaatcaattgatttcagtctttatcactaatctgagatgcagatgctgtcgacggatatgcatagaagagaacatatatgcataaaagggagtaaaactaagatttggatattttcatccggacacagagtaaagaattctccactctcttgacttgacgaggctatataaccagaggccatcagaggagaactgaagactgagagcattctctgcttataatctttattcctctatattctaaattatttttttcaatccccttccacctggattcgattcgaatcccacaccaccacgtggtgttcttcctatatcgaataaacgttgtttcgcttgtctaatgatcgatagggcactgaaagagtcattcctagagactctacggaaggacacaacggagatggagcagcctgcttgagaagaggcggcggaggagaaggaagcgctcaacctagactcgtggtcgtcgaccagcatgcgccttgacgtcctcttttttgattcatttatttgattttttgaacaaaattgcccttgtctttgtccttcctcccttttttcattttcttaatgccctcatgtaaaatataaggcatgtgttgttcaaatctttcttttaaaactacatgtatttcgtgtgttctatgatgatatatacagaaactggtcttcttgatatgttgatagtggtctgtttgctcttgaaccatggccattcagtgtaatccgtgaatgtcatatattatactccctctattttgaaatatagaacattgaggacatgctacaactaattagcctttttattttgaatcaagttttctctttctgccaaatcttgctattaagcaatagtgcatgcatattttttttctaaatcagaccattttctataggacaaaggagggcatatggaaggacataaaggaaggagggatactggatgaacatatcgtgcatgagaaagaaattgctatttctgatattcaacaaactgttgaatctgttcagcttgacatcaagcaccttcttgaggcagcagcagcaaaagtggcagaagttcagctagaggtgaatcaactttatggttttgctgaaactctgaattcacttaacatcatccaagagcatgatattgttttcaaggatatgcttcattcagagctgactggactaaccaataccatcggggagagctacaggattcaaggtactacggtaatgaattcctatgtctcgggatttttgtgccagggaggccataatctgtcagagacgaaaacaagaaagaacccaactcagtttctttgaagcacatatcacctccttcctattcacctcttcagatgaatgcaagctcccaatgcacatatcgcctgacgtgaacctcgatcggcatcaggaggccaacggaggatcagagcaggaaggcgtggagcttgagctgcagcgagagcttgggcgtgagctgcaagaccaatgcaggcgtctcagtcagcaatacaaccgcacaactctcctactgtctatgaggtgtcagatgttcatgcatattccagtaaagttgaacagagccatcaggagtgcgtacatacagggcatggaaattatctccaaaggccgagccatcttgtagctctgctatggattcgagtcaccgtgggttgccgtgagaagcatgagagccacacagcctgcagatgcgagcagcagtcttcttaatgataaatatgtctacagcttcagtcataactatactgatgcattttaactgcaacgtcactcatcacaataaacatgaaggacataagctttatctcagacactcaatgttgtgcgataacctaatcaggtcacatatgttgtctggatcgtattaccagatgtcatctgataatgtgcaattttagagagtgttgaaggcttctttataacgttctcgagttgtagggttctaaggtccgactggcacgaggctcgttcagtcgtctcgaggagtagcaccccaagatgtaagaatggcattaagggcctgttcgtttcgcatggaatgaaggggtgaaataaatctgccttggattcctttaataattactataagtttgttaattgaaatacaatgagcaggtattttcttcttgtgaaccttacagtttgggttgtctgaatttattgcacttatgtgatctaaacagaaacatgttgtcctgttgccgcccagtttgttaatagaagactgtttctattttcaggagtcagggttctctcaattgcgaatgctcactcttgagtaaagggataggctaaagagcagctccatccagttcgacgaccatagtttttgcgagtgggtgcacaacctcaaattagcaagtacatgcctacatcgtcgacaactaaaggcaattactgagggagctcggtggggaagacctaaaggtgaagacgcggaaaaactcagggagaagctgaggcaggagtgcctgtggaaggggacggaactggcacatggggtggctgacgccctcttcgctgtatcacccaccgaggacctcgacggccctattgtacacctcccaccgcccgctgttcgactcccgcgcgagaagcatgtgtccgaggaggccggaaatcatctctttgtggaatcctgcattcctctgcacgacttcacgtacattattatttcacatgacaatgctacagttacactcttatctaattcacacgtatcatttttgcagcttggtgctgggacctcactgccaggattagtagctgcaaagatacttgtgttgccaccttatcagggtgaaggctatggtcttggtcttcttgaagcaatcaattatattgcacagtctaagaacatttacgatgttacaatagaaagcccttctgattccttgcagtatgtgagatcatccattgactgcctctgtttgctcatgtttgatccgatcaaacctgcactcggtgctattgtctcgtctctgaaggagaccaacctgtcaaaaagggcccaaagtttgagaatggttccaccagctgacctgatggagactatatgtcagaagctgaagataaagaagaaacagttccttcggtgctgggaaattctgatcttcctaagcctcgactctcaggatcataagagcgtggacaactttagggcctgcatatatgacttcatgaagggggagatccttggcagtgcctctagaactaacaggaagcgtctgttgtagatgccaaccagtttcaataaggaggcatcttttgctgtgtattggacacatgagattggggatgaggatgaacaaactgttgagcagcagccagaggatctgaggacgcaggagcaacagctcaatgagctcgtggacatccaaatcgaggatattgctggggtcgccaagaacgtcacttcacgtggcaaggataagatggcagagctggcggttcaatgaatttgggtgaggttcctacttcaaacgacgttaaaatgttgtcgtagcttatctggtgaggtctcttttacgggttggcttcttggtagaaagggaatgtcacagcataggcactgagtagattgtcacggcagattattatgtacttcaattctggaatatttgatgggaatgctattttagattgcttggtaagtgggaaccgcctcaaatcacagaagtagaagcagcttccgattcagccggaaccatttctccaaaaatg

SEQ ID NO: 9578 - DNA, 2159 bp, Zea Mays
gtcactaggcactagccacccgacctgcctgtaggctgtagctgtctcctatatgctgcgaccctagcctgccttgtcttcttcatcaatcatcaccgcaagcgtgcgcgcaacccagctcccaccgacgactgcaccggccgtcgctgccgcgctacttcggccccttttccggcgacgagcaccaccaggaatcggttggtgtttatcgctgttcttaaaggtgttgttccctggccatcttagtgtcaaagcagtgaagggtgtagaagaaagaagtgtgacagggaatcaaaggagggctagtcatcctgtcggtggcagtagggtatggtgtcaacagaaaaatgagtgatgttctgactgctggggtgaggaggggagtggtggtgtggtagcactgtatcacattgaggtaaaagcgctgcatgaaggtcggggcctacatatctactcttggtgaagggtgtatttgatagctacagctctccaagagtatgcccaggacactcacacaagacacaaacggacattggatgctggtggaacgactgcagcttttctgtttcctctatttatacagagctgaatgttacattcaagtagctgctaatggagattgacagcctcagagaaggatttgatcgagttgctgagaaacgttcattatcttctgctaaagctctggaagttgttgatcaaatagtgaatgaaattgagcaggctattgtgaagctgcagatgatgaatacagattctactggaaatgttgaccacccatccatccttgcagaactgaaagctaagctcaatgaaatggcaccactaaaccagcttgaaggcagccaaaaggagctcaatgttgctctgagcaaatatctcaaactccttgagaagtctttcaatccagatatatctaaggcatacagaaatgtggattttgaggtccatacagtaaacaatatcatagcgaatcatttctaccgccaaggcctctttgatcttggtgacatgtttgtccatgagtgtggggaactaggcggagcttccttgaagctaccgtttcaggagatgtatgctatccttgaagccatgaaagcgagaaacctcgagcctgctctcagttgggctgccaaaaaccatgatcagctgttgcagaatgggtctatgctggagttcaagctttatcagcttcagtttgttgaaatattgtccaaaggcagtaggggtgaggccaaagatgaggctcttttatatgctaggactcacttggtcccctttgcagccgtgcacaaggaagaattccagaagctaatggcttgccttctatgggttggccggctcgatcaatccccatattctgagttaatgtcatccgcgcattgggagaagctagctgaggagctcacccatcaattctgtagccttctgggccagtcgagggagagcccgctgagtgttgcagtgtcagctggttttcaaggactaccaactctgctgaagctgacgcaagtcatggctgcgaagaagcaggagtggcaagttatgaagcagcttcctgtccccatagacatcgggccagaattccagtatcattctgtctttgtgtgcccggtgctcagggagcagtccagtgacgagaatcccccaatgcggatgccttgtggacatgttgtctccaagcagtccatcatgaagctgtcgaaaagcagctcgagggccttcaagtgcccctactgcccctcggaggctatggcgtcgcattgcaagcagctgcatttctagatgtgttaatcttttctggctgcgcaaaactgcaaacctgttgtgtgttgcttaagtctcttctggagattaaaggaattcgaaagtgttggtggacaagtggacgtggactgtttgggagtatttctgctagactatagagaccttgctagtaaacactagccattagatgcgtgagaacatagaggttatacctttggtttggtgttggtgagggatgtcattaaggtggggagagtcggtgagggtgtgtttgtttgaggaataagtaggccatcatcttctcattctttactttctttttatttgtggaatataatgagttgattcagcactatttcattctttataagctaatactaccttcgttctcg

SEQ ID NO: 9579 - DNA, 2898 bp, Zea Mays
cagaatggcaaggagttcacctcactataactgcgtattcatgatgatttgccatgttagggggccatggagttgttctactaaacaaccgtgatgctggtacactttcagttacaaatttccgtcttctctttgtgagccaagcaaaaaaatgtgtcatagagctgggtaccattccactgacgacaattgagaagctaaatgacgatgtgaaactccaacccttgccccacctctctgataagaaccacccccgtgaacttcttcaagtaattggcaaagacatgagaatcattgtgtttgcttttatccccagaacacagcagaaaaatgaagtgtttgatgctttgaggagatacactaaacctgctaatttgtgggatctatatgcattttcttgtgatccatccaccattaagcatgattctgagccaaagtggcgtctcttgagggaatactttcgtctttttaggagaagtttaccgctacagggagtcgaggaagtttctttgtgtaatgaatggtggaggctaactagagttaattctagttattcattgtgttcaacttacccctctgaactcattgtaccaagaagcataagtgatgaagatttatttcaagcctccccatttcgatcaggcaagcgcttgcctgttatttcatggtgtgaccctgggtctggagctgttctggcaaggtcatctcagccgatggtggggttgatgatgaactttagaaacaatgcggatgagaagcttgtctgtgctctcagcagcagaaccatcgatgagaaaggatctccaaggaaattgtacataattgatgcccggccaagagcaaatgctatagcaaatggggcaaagggagggggctcagaatcatcttctaactaccataaatctgaggttctgtttttaggaatacaaaacatccacaccatgagagagagtctttctcgccttagggactatgtggatgctcatggctcaatttcatcaaatgggagcccttcagctgtatctgttgttggagatcggaggaaccgtggatcaacctggggtggaggcaatctaaatagcatgacatcattttcttcaacactgggggaatggctaaaccatatccagaatattctggttggtgcttcatggattgctgcacaaatttcagaagaagcagcgtcagttcttgtacattgcagtgatggatgggaccgcacaacccagttggtttcacttgcttgtttattgcttgatccctattatcgaactttcagtggattccaggctcttgttgaaaaggattggttagcatttggtcatccatttgcagagagaatgggagttccaacagtagctgagaatggggggtcacagtatgagctactaaggcaaccttcgctcggaaatttaagcagttccccgagtaggaacactttagggccgccagggccatcctctaattctccagtgcaatcccagacatcaaacaacacttcaccaatattgttacagtggcttgattgtatctcacagttgttacgtctgtacccatctgcatttcagttttcatctaaattcctagttgattttatggattgtgtgctatcgtgtcgctttgggaacttcttgtgcaatagcacttgccccaacactctggccccagttttttttgaggtggacatgccccattgagtcacaaggtggtgatcttgaatcccagtggcatgctatgaataaaaaatatgcagatacaatgaaggcaaaggatattgctgagtggagggcaaaggatatcaaattgaaattggaatctatgaaacaagacctgcagagggagaaacgtattaatagtacagctctagccgcagcccgaagtgctcaaagggagaatgctgcaattaagaaggcaatagaatctatagggtgcacaattaaattttcgacaagcgaaaacgaggacagaactgaagtgctgtcatgttcattaggaagaggcacagatggtagagctcagcaagatgaaaacggtgacttctctgtagcaattgaggacagcctggtctcggatgcaccggcggaccatttttgcgaatcactctgccccttccgcacaagagaagggtgcagatggccagatgctccgtgtgcacagcttggaagtcagtttgttggtttgaaggcaaattttgatgcttttgaccggctgtcaatacatgactgctattttggaccggagtagttgatcatgaaccagccgtgtcagtacacgcttggcagttgccaatggattttttcagtagttggcacctccaggtcggcatcaatagcaaaagaatgctgagaaacaactcaatgatgcatatttgacgagtatttacaaattccttgattcaatagtttttcactgtctgggtcctccgaatctgcatcaacagaataacctggaaagcaaattaaggatgcgtacctgatatgcatcggaggatcttttttttttgttccaatggtattataagcttctgtgagggaattccagcgttctttgttagttagcaatttgtaggaaccaccgagatagaaatcaatccctttgtatagtttggcaagccattcatactataagcaaaataaagcgaaacatggaagacggtagtagtttgttactctttttctgatagtacagtgttcgacttgtaactcttagctttagaataagatccatgcaaatcctgcttggaaaggaaatgttgtacatgaaggtatagacacgtggactggttcctgatccctccttatagttgtaacgatatagattttttcaagtgccattgccttcctgatgttaactgtgggtaagactgtcaacaggtcttaaaacctgcttctttagcag

SEQ ID NO: 9580 - DNA, 2167 bp, Zea Mays
atgactcatgagacgacggcagtctccgtctcccgctgttattggacggcgctttcggcattgacgagcaccgatgccctaatccgcatgctgggcccggccgtcgcttttcccaaggccgccgatcccgacgacgacccaacaaagtggcagccagaaaactcggcagagcatctcgcttgcgaaacaaaggacggcgcgccagaggaggggaaaggaaaacaaccaccacgaccccgtccattccgttccacttccacccgagctcagcgatcgcggcggcggatgcggatgcggatggggaaggggccgtcgtcgcgggcggggtcgcggcaccggcagttccgcgcccgagccatgacccgcgtcgacgacctccaggaggtcttctcgggcctgcagtccgcgcgcaaggactcacgctccgcggacgccgccgtcctcgaggcgcagctccagcagatgctgcgggagtggcgctccgagctcagcgatccctcccccgcctcctccctgcagggcaacgccagggaactgtcggatccgccttccgatactcttcgtctgctgcagttggtggtggccgaggaggaggatgacgccacgagcaagatggtcgagcagcagcagcagcagcccccacctccgctcccagctaaccggagccaggggcacgcgcatgttgtgtgccagggcatgaagccggagccgcgcgaggaagcagttgacgtcgctgtggaccagccgcagctgctgagtcagggggttctgcctaatggtgctgctaccgcgtctgcgatgttccatgatcagctgtactatgtgaaccaggagctcacggtcgaggattttctttatgatgatgattacaagatagatctttctgggtctaatctggatgtcattaataacctagaagggattgttcagctggaatatccagatcacaatttgccgcaagggaagagggccctccaggcacaatgcctgtgatccgtccaagaggcattgatctgaaagatggccccctgtttgctgctcttagtgcaaaagtccaaggaaaaaacgttggggtccctatctgtgaaggagctgccactgcaaagtctccatggaatgcacctgaacttttcgatctttacatatttgaaggtgaatctatcagagaatggttgttttttgacaaaccaaggagggcatttgatagtggaaatcggaagcagcggtccttgccagactacaacggccgtggttggcatgaatctaggaagcaggtgatgaaggactttgggggtctgaagaggtcctattacatggatccacaaccatccaacggctatgaatggcacctatatgaatatgagatcaatgactgtgatgcttttgccttatatcggcttgaattcaagtcttcagatgcaaagaaaattgcaaaatccaaattaggttgtaatccactgaatgaaattcagcagcaaatggatagactcagtgcagacagtcctgtcgacaccaaacggacggcccggagccggacagagcctaacccgatagatgtcaatactaacatctattcagttccaaacaccacagttcaaactgatgttccaaatgcttatcagccagggtcacaagtggaccagatgacatatttgaacggtagtgtcgtttatgggcctcatctgccgtacggttactcgactgaaagaagtgacttctattggaactcaaatgatgggacatgagaagatataaacacatgttcgatttatggcatatttggccttcaagttctaacaattcccgttatgattattgggtcaaatctattagcatgacccccatcttcttgtaattgtagttggcccaatctacaggaaacatctctgaaacaagggatgccaataggcaatactgcagttctattttctgtggcaactttgtcgttgtaatatagccatatcatgataatagcaccctcctcgatgtgcagctgtatgtaacatatatctctggcttggtggacgataaccgttaaccagtcacgttggtgcctccatttatcggttacgttgtatgtgtaccattattcctgttctgaatctgggtgcaatctttatcctcaaactccgattgcacttgggtcagatggagtaaaaaccagccc

SEQ ID NO: 9581 - DNA, 3293 bp, Zea Mays
atggaccggcggcagcgcgcggcggcgcgggtgttcgaggacttcgacccggaggtggagtggaagctggcaggggaggagcaggacgtggtggagatcgcgctgccggggttccgcaaggaccaggtgagggtgcaggtggacaaccacggcgtgctgcgcgccaccggcgagcgacccgccaggggcggccggtgggccaggttcaagaaggacctccgcctccccgacaactgcgactccgacggcgtccgcgccaggttcgagggcgagaagctcatcatcacgctccccatcgtcgccgcgctgtcgcactcgccgactccgtcgccgtcgccacctcctcctcctccacaacaacaaccacgccggcgtccatcgccgccagagccgtccgttcctgctcctgaaccgccgccgctgacacgccagaacccatcgccaacgcaggcgcctcctctaccacctcaaccacgtcggcacccatcgcgcccagaaccttccattcctgctcctgaaccgccgccaccacaaccaccaccacctgccgctgaagagctgacagaggccggcaccgaggaacggaaacaatcgccaccgccacaccagacgccgggtgctgctcctgggccgaagactcctcccccgtggtcgtggcagccgccggtccctgtctcgcctccttctccggcgccggcgccgcctcatggtgcagaggaacagccgaagaagaggcagaagcaaccgcaaccgcaagagaccaacgccacgaaacgggcggaagagctaggcggtggagcgagaggcacgaaggtggacagccaagctggggcatcgccagcggtgccgagtcacgctcagacgacggagaccgtgaggccggagccggcgcggcagctgctggtgaacgctgcggcggcggtggccgtgctcgctggggtcatcgcggccgtatggcgcaccttgcaatgaacagtgtgtgtcgcttgtaactatgtggtgttttaactaaacgtctgttgtacaccatgtcaatggccaaagctaaatatgtaacaaaacagagtaccctgctgatctaccacaaaccatctgaatgcaaccaactggaagaagaaaaaacctggcaatgcaagtgtatatagttgcacacagtggagcatttagcttgccgatacgacatctttctttgagccgtgaaacagcacacctcgggggagtggtggcagatgaaacgatgcagatgtcccactcggtttttacgatacaagtacacgggcaacttcctcagaaaccaccaaacagagagtagtaaaacaggtaccgcgtgggggcgagatcaagaaaactactaacctaaccacagacggagtacaacagaacggcgggcacagccctgtttattggaaacaaattggcatcgacgacgccctcctcggaaacgaaaaaggcaaaaaaaaggtgctcacttggcgctggcgagctgggtgcggatgagcttagcggcggagaccatgttggtcagggcgggcttgacctccgtgtacttgcgggtcttgaggccgcagtcggggttcacccagaggatgttggtgtccagcaccgccagcatcttgtcgatgcggtcggcgatctcctcagccgacgggatcctgggggagtggatgtcgtagacaccggggccgatgcccgcgccgtacttgacgccctcgcggaacacggagagcagcttctcgtcggaccgcgagttctcaatggtgatcacgtccgcgtccatgtcgatgatcgagtggatgatgtcgttgaagttggagtagcacatgtgggtaatgacctgggtggtgtcctggatctcgcagttggtaattctgaaggagtggacagcccagtccaagtagaatgcatgctcagccttgcggagcggcagcccttctctcagtgcagcctcgtcgatttggataacctgaataccaccagcctcaagatcctcgacttccttcttgatcgcaagagcgatctggtagcaagtctcaaacctggaagatgggaggagcaacgtcagtaccaaaaacggaagaagaaaacggtgctctgagcaccagaaatcaaaccgttcttgctctagttactgacctcggctggtcattccggacgaaggaccagttgaggattgtgactgggccagtcagcatccccttcattgggcgagacgtcatgctctgtgccgtcttcgaccagaaaacggtcatggggttggggcggctcacgtcaccgtagatgatcggaggcttgacgcaccttgacccataagactgcacccagccattggcagtgaacgcaaaaccggagagctgctcaccgaagtactcaaccatatcgtttctctgtagaacataggccaataaagtcaattaaatgcgactacactcatggtatgggggtttatcttcttagacatcaaaaaccagcagaatggattcaagagcactgacctcaggctcgccatgcacaagcacatcaatgtcaagctcttcttgaagcttaacgaccttgttgatttcctccttgatggcagtgacgtattcctcctcagagatcctgcgatgtgaatctccaataagaaaaccagccaaaatacagacaagtgaagctaggtattaaatgacaactcacttttttgccttgtactcacggcggaccctcctgagctcaacggtttgtgggaacgaaccgattgtagtggtgggaaggatggggaggttaagcttcttctgctgggcatccaatctagcactaacgttggtcccacggcggtggtcagagcccttgagagcagcagcctccttctggacttcttcattggtcacacggggtgaggatttcctcgaggcctgagcagcagcatttgctgcgaaccatacctcatccttttgaccagccaatgccttagcaagagcatcaacctcaacaaccttctgggcagcaaaagcaagccaagacttaatctcgctgtcaagcttagtctcgttcacaagatccacagcggtgtgcatgagcgagcaggaagttgatacgacaagcttgtcttcccaacaacagcctcaagagactggagagtgctgagagatgtagcaagatcatcagcccagatgttgcgtccatccacaacaccagcaaagaggtactttccagcagggaaaccagcactcgtgacaagcccaagagtttgggttccacggacaagatcaaaaccataagcagtcacactgctcagggatgttagggtcctgcat

SEQ ID NO: 9582 - DNA, 3919 bp, Zea Mays
atgcagccggccgaaagcctgactggctgcattcgggcctggcccttgtgccacttcctccgcaacgcctcgccagttgcaaggactgaatatcccccgaccgcaacggcgccggtctccctcgctccatccttctaggcaggccctcgctctcccgtggatcctccgccgcgccgccgcccctttatctgagccatccagcggagcggagatccatccgttggggcgtggattcagtcccttcccttctcggtggttactcccacagtgagggtaactcgaataactgtgagtgctactgtgagatgggtggtgtgctctctcttttagcttggtgatcatctgaaaaaaggaagtgctgtttatttctgtaagatagaaagcaaaccattggttcatgaatggtttagtcatgctaagaaaaacaaagttctaagaacacatatacagtgcacgtgcttgctggcaatatgaatgaaaactctgccattattatttcggatagtgatgatgactcaattggctcaatattcgatgatgacgaccagccagcgtctgcaatcgcaaggcttgatcaaaatgctgaaggacgaataatcaattttgaggatgaagattggcaaaggagcgctcctgctccaccatcgactaagcctactgagaacaacaatggtcaatacaggattcttccagcatcccttacgaatggtagacatgctgagagtagtcgttatacatttggttcagtggacaggattcatccccatgcaaatccttatatggctatgcgaccgggccattctacttccagtagaattgatagcgtagtggaaaagcacaacagttctacagcagatgcaaatgacaataacaagagggtccttccatcatccttttcaaatggcaacacatcaaaatctatgcatccaattgttgctagcgaaacacgcaagctcccactgcctttatccaccaaaaagtcaccaaatattggtgaaaacagaatggggacaaatattgccaatggaaatttgcagccttcatcttcaataatggcaagaggaacttctagtacacttaatacccataaagtggatgatgatgatgatgtcattgtatatggaggttctagctcacatagggtactgccttcaacgtttgaggcaaccaattctaataacagtgaagttgctaagggctttgagacacacagtcgccttaatcctgaaaatagggtcttagattacgctgagagagcagtatatcaagaagccctgcagaatattagtcgcgaaaaaagtgaagatgatctgcctgagggtgtgctagcagtacctctgcttagacatcagaaaatggcattggcttggatggtttcaaaggagaatagctcacattgtgctggtggaattcttgccgatgatcagggccttgggaagacagtgtctactattgcccttatacaaaaacagaggatggaacagtcgaaatttatgtttgttgattcagatcgtttgaaatctgaagcactaaaccttgatgaagatgatgagggagaacaaactgttagcaatgaacctaaaaaggaccaaggcgcttgttcattgtcaacatctgctggtactagtgctgaactttttgttaatcaaccgaataatgttgtgaataaaatggttgaaaccaaagcagaacgcaagaaaaaagctaaagtttccacatcatctgcatccacctcacgttccatgacaaggccagctgcaggtactctagtagtgtgccctgctagtgttcttaagcagtggtctaacgaattaactgacaaggttagcgaaagtgctaaattatctgttttagtctaccatggtggtgcaaggaccaaagatccacatcaaaagaacagtgaagaaccctctgctagcaataaaagaaagccatcggcgaatatgcaaaacaaggctaagaaaaagaagaagaaacttaaggactcaaactttgaccttgacagtggtccaattgcaagagtgcgatggtttagggttgtgcttgatgaagctcagacaataaaaaacttccgaactgtagtggccagagcctgttgtgggctaagagcaaagcggagatggtgcttatcaggaacacctatacaaaatgcaattgatgatctgtttagctatttccgtttcttgaaatatgatccgtattgcacgtataactcgttttgcacaatgattaagcacccaattgctagagatgcaattaatggatacaagaaacttcaggctgtgctgaaggtagttctcctgcgtcgtacgaaagaaactgtgatcaatggcaaaccaataataaatttacctcctaagacaattaatctgaataaagtagatttcacacaagaggagcggtcgttttatttgatgctggaagaacgctctcggcaacaattcaaggcatttgctgcggctgggacactcaaacaaaactatgccaacatccttttaatgttgctgcgacttcggcaagcctgtgatcatcctattcttgtaaagggcaatcagtcagaatatggaggtgatggttctatagaaatggcaaagaaacttcctaaggaagtggtgatagatttgcttgcaaaactggaagtggggtcaacactttgtggcttatgcaatgatacacctgaggatgctattgtgacaatttgtggtcatgttttctgctatcaatgtatacatgaacgaataacgactgatgagaatatgtgccctgcccctaattgcagtagaacattaggtcttgaattgttattttcgtcaggagctttaaagatttgcatctctggcaaatcgagttctgcagtagctagttcatcatcagataacgagtcatcttcaatcagtcaaagcagctttgtctcatccaagatacaagcagccattgatatactgaattcaatcattgtcatggatcctcttactgaaagttatacaatggaatcaagcagaagtggactaggccctgtgaaagccattgtcttttcccaatggactggcatgctggatttgctggagctttcactgaatatcaactgtatacagtacaggagactagatggaacaatgtctctcaatttaagagaaaaaaatgtgaaggattttaacactgacccagaggttagagttatgattatgtcactgaaagctggtaatcttggtctcaacatggtttctgcttgccatgtaattctccttgatctctggtggaacccttatgctgaggaccaggcagttgatagggcacacaggattgggcagactaggcctgttactgtatctcgcttgaccgttaaagacactgtggaagatcgtattttagctctgcaggaggaaaagagaaccatggtgaactctgctttcggtgatgacaaagccggcggccatgcgacccggctcaccgtggaagacctgcggtacctatttaggatatgattgcgagggaactctctcaatgcctcggtcaacttgtcaggtcatgatgcgttgtaccttgtaatcgtagtccggcaaaagggcggtgtaccattgcgagggtaggctcattggtccatgtccgccacgccttgctgcagctccagttttgtggtgctcagatttctagatgggtaatctagggctagatagcatgtgtaattataaccccccaaccccccctccccggggcatggaggagagttccgcagtgccaatgctttatgatttagtgtatgtatatacatgatcaccatgtctaacttgcaatgagttgttttagctcgagatgtgagactgatactgccagcgggtcagcattttgtaccttctgtgttatgtccctttgcccgtcatcagaaaatccaaaaaatcaaaacttttgttggtgtcca

SEQ ID NO: 9583 - DNA, 3981 bp, Zea Mays
atgcagccggccgaaagcctgactggctgcattcgggcctggcccttgtgccacttcctccgcaacgcctcgccagttgcaaggactgaatatcccccgaccgcaacggcgccggtctccctcgctccatccttctaggcaggccctcgctctcccgtggatcctccgccgcgccgccgcccctttatctgagccatccagcggagcggagatccatccgttggggcgtggattcagtcccttcccttctcggtggttactcccacagtgagggtaactcgaataactgtgagtgctactgtgagatgggtggtgtgctctctcttttagcttggtgatcatctgaaaaaaggaagtgctgtttatttctgtaagatagaaagcaaaccattggttcatgaatggtttagtcatgctaagaaaaacaaagttctaagaacacatatacagtgcacgtgcttgctggcaatatgaatgaaaactctgccattattatttcggatagtgatgatgactcaattggctcaatattcgatgatgacgaccagccagcgtctgcaatcgcaaggcttgatcaaaatgctgaaggacgaataatcaattttgaggatgaagattggcaaaggagcgctcctgctccaccatcgactaagcctactgagaacaacaatggtcaatacaggattcttccagcatcccttacgaatggtagacatgctgagagtagtcgttatacatttggttcagtggacaggattcatccccatgcaaatccttatatggctatgcgaccgggccattctacttccagtagaattgatagcgtagtggaaaagcacaacagttctacagcagatgcaaatgacaataacaagagggtccttccatcatccttttcaaatggcaacacatcaaaatctatgcatccaattgttgctagcgaaacacgcaagctcccactgcctttatccaccaaaaagtcaccaaatattggtgaaaacagaatggggacaaatattgccaatggaaatttgcagccttcatcttcaataatggcaagaggaacttctagtacacttaatacccataaagtggatgatgatgatgatgtcattgtatatggaggttctagctcacatagggtactgccttcaacgtttgaggcaaccaattctaataacagtgaagttgctaagggctttgagacacacagtcgccttaatcctgaaaatagggtcttagattacgctgagagagcagtatatcaagaagccctgcagaatattagtcgcgaaaaaagtgaagatgatctgcctgagggtgtgctagcagtacctctgcttagacatcagaaaatggcattggcttggatggtttcaaaggagaatagctcacattgtgctggtggaattcttgccgatgatcagggccttgggaagacagtgtctactattgcccttatacaaaaacagaggatggaacagtcgaaatttatgtttgttgattcagatcgtttgaaatctgaagcactaaaccttgatgaagatgatgagggagaacaaactgttagcaatgaacctaaaaaggaccaaggcgcttgttcattgtcaacatctgctggtactagtgctgaactttttgttaatcaaccgaataatgttgtgaataaaatggttgaaaccaaagcagaacgcaagaaaaaagctaaagtttccacatcatctgcatccacctcacgttccatgacaaggccagctgcaggtactctagtagtgtgccctgctagtgttcttaagcagtggtctaacgaattaactgacaaggttagcgaaagtgctaaattatctgttttagtctaccatggtggtgcaaggaccaaagatccacgtgagctggcaaaatacgatgtagttgttactacatatacaattgtggccaatgaagtacctaaacagatggctgatgatgacgcagatcaaaagaacagtgaagaaccctctgctagcaataaaagaaagccatcggcgaatatgcaaaacaaggctaagaaaaagaagaagaaacttaaggactcaaactttgaccttgacagtggtccaattgcaagagtgcgatggtttagggttgtgcttgatgaagctcagacaataaaaaacttccgaactgtagtggccagagcctgttgtgggctaagagcaaagcggagatggtgcttatcaggaacacctatacaaaatgcaattgatgatctgtttagctatttccgtttcttgaaatatgatccgtattgcacgtataactcgttttgcacaatgattaagcacccaattgctagagatgcaattaatggatacaagaaacttcaggctgtgctgaagaaactgtgatcaatggcaaaccaataataaatttacctcctaagacaattaatctgaataaagtagatttcacacaagaggagcggtcgttttatttgatgctggaagaacgctctcggcaacaattcaaggcatttgctgcggctgggacactcaaacaaaactatgccaacatccttttaatgttgctgcgacttcggcaagcctgtgatcatcctattcttgtaaagggcaatcagtcagaatatggaggtgatggttctatagaaatggcaaagaaacttcctaaggaagtggtgatagatttgcttgcaaaactggaagtggggtcaacactttgtggcttatgcaatgatacacctgaggatgctattgtgacaatttgtggtcatgttttctgctatcaatgtatacatgaacgaataacgactgatgagaatatgtgccctgcccctaattgcagtagaacattaggtcttgaattgttattttcgtcaggagctttaaagatttgcatctctggcaaatcgagttctgcagtagctagttcatcatcagataacgagtcatcttcaatcagtcaaagcagctttgtctcatccaagatacaagcagccattgatatactgaattcaatcattgtcatggatcctcttactgaaagttatacaatggaatcaagcagaagtggactaggccctgtgaaagccattgtcttttcccaatggactggcatgctggatttgctggagctttcactgaatatcaactgtatacagtacaggagactagatggaacaatgtctctcaatttaagagaaaaaaatgtgaaggattttaacactgacccagaggttagagttatgattatgtcactgaaagctggtaatcttggtctcaacatggtttctgcttgccatgtaattctccttgatctctggtggaacccttatgctgaggaccaggcagttgatagggcacacaggattgggcagactaggcctgttactgtatctcgcttgaccgttaaagacactgtggaagatcgtattttagctctgcaggaggaaaagagaaccatggtgaactctgctttcggtgatgacaaagccggcggccatgcgacccggctcaccgtggaagacctgcggtacctatttaggatatgattgcgagggaactctctcaatgcctcggtcaacttgtcaggtcatgatgcgttgtaccttgtaatcgtagtccggcaaaagggcggtgtaccattgcgagggtaggctcattggtccatgtccgccacgccttgctgcagctccagttttgtggtgctcagatttctagatgggtaatctagggctagatagcatgtgtaattataaccccccaaccccccctccccggggcatggaggagagttccgcagtgccaatgctttatgatttagtgtatgtatatacatgatcaccatgtctaacttgcaatgagttgttttagctcgagatgtgagactgatactgccagcgggtcagcattttgtaccttctgtgttatgtccctttgcccgtcatcagaaaatccaaaaaatcaaaacttttgttggtgtcca

SEQ ID NO: 9584 - DNA, 3303 bp, Zea Mays
cgacgattaaagaagtagtgtgtgtgctgttccttcgttctaattaatcagctgctggcatttccattccttcgcatatttgcgtggtttttactagcaaatcgatccggttcagcagccatgcccatgtatatgtacagaaacgggggtgtatgcagtatgccaccaggagaagaagggagtacccatggaaacatcgctgatggggatgcaccaaggagacgtcaacgtcgccgccgcatattcaggcgttccacggagaggaagaacccagagaatttagagtttgaacgtcaagtagctgcattcgaggctaggcaggaacaacaacggcaggaccagatgactgatgcttttattggatcattgagtttcaaagtatattttcctcatctgaaaatattgtcagacgatgtgcaagatggagacagcactcagccggctggtaaaggacggcttctaaaagattcagctaagccacctgatgatacagatttcctggaaggtacttttatcaagataaattcagacaaacagaaagctacaagaaataagaagagcggcaagaacaacaaaaagaagaaaaagggcaagagcaagggcaaaggcaagggtagaaaacagtcacatgcttcagaaatgcagactgggtcacccacccaacaaccttcttccacatgcgctaacgcgaccggtggcgaaacctcggcgtcctcgtccagccgtgttgccgttcgggtgccactactggaatacagttcttcctcctccagctgtcgggtgacagcaaaacttgtcatcacttctgctgtaaacagtgcatcttctggtaacgagaaggaactatctgcttctagcagcagtgatgacttcaaaagctttgagagcactacttcatacaccactgctgctagtcgttcatctgctaatgactattatactggtggcaatgcatggaactgcaccatgggtgattatgctggcagcttgtcagatgcgagaagtgagccgtcattgtctgcatcagattattctacagattcacgaggttttaggcgcaagacgacgagtggtgaaggaaacagaccaaatgttcaccatcaaagcttcagtttattagcagtcggtcctggctgtagccaagaagccttgctctgcagcggttattctagcaatggtggtgatttccaggaagttgtctccaggaaagcagcacagaagatgaaaaggatgcaacgatcaactcctgctacgactagttcatctaccatggctgcttcaggacctattgtagcacgtgcacacttcccaagagctccattccgtgaggtcattacaataggacattacataaatgatgatacattttatgctagaaaaccaaaccagaaaaagggtaaataccagaaggcccgcagtttcagtaacatgtcgtcaaagaccggttatactactgatcatggagataatgtttcagctggtagcaacagaatgcttcttataacgacagtgcaccaagcaaaacccaggagtggtcatcatgttaccctagaggctatcgaggaaactagttctccaagctgtcttcccaatcccaaggcaggagagctgaaagccatggctccagttggtgatggcatcatcaaggacacagattcaaaaacaccatcttcttctgataaactttcatcactactaggtcatctggataactcttcatgtgttgatagtagggaaggacagaaaaaagctatggcggccccagtcgatggtgacaccgaagacgcaagagcaccaccatcttctgataaaacttcatcactagataatctggataatccttcatacgttggcaaggaagaacaggaagaagttgtggctccagttggtgttggcactgaagcagacagagattctacagcaccaacttctgataaaacttcgttactaggttacatggttaattcttcatgtgtggatagggacgaagaacagcagaacaaagcaaaattcagtactgatgcatcatcgtctgagttggataagattattgaagccgttaataatgcatatggagttcagcaagcagcatctgatgtgtacatgatcagtgccggtatccatgccgatattgaaaacttcttacatgcggccaccccagtgattggacagacatcttgcacaaaaggtaacatgagcttgcaagatctgcgtctgtggaacgtgtggagctggtatgaagaacctgagtgctgtgggattgaagttcagatgcagggaaagaccaattctagctggccagaactttctacatattttgtacctcttctatctgcggttcagttgtttggacagccagctgggaagtcacaaagtcacggcagcggactcgtctttgagtacttcgaatcggagaatcccttttcacggcctccaatcttcaccaagatcaaacagcttcggcacggcgtaaacctctctgctggtaatccaatatttggggatcctaagcaacttgaaagtgtcaagctatctgatcttcatcctgcttcctggttctgtgttgcctggtaccctatttgtcagatacctgcagctgcagggagctgccaagcttcattcctgacataccactccctaggaaaattggttccacaaatttgctctacggataataaggctgatgcgtatgatcgtatgatctgtccgattgtgggtctgcttgcctacaaagaccagggagagaagtggtttcaactgagagaacaacaactcaggatcaaaccaaggccaccctcgggaaccgaccatgctgaactcctgaacaagaggctgagggcactgaggcaatgtgcatcaatcatgtcgaaggcagtggtgccaagggcgccatctggagaagccatgaactatcattcagattacgagttctttttgtcaaggtcgtctctgcagtaagcatgcgcgttatgtattgcatatctaccgatgcgcgcggtgtttcgaatgggctgatataatctctcccctcgcatgaccaacttaagtttgtgtttttttcccttggcactagtacagtacccagatgacatggggtttaagttggatgttctatatatgttctaaagccttgacatatattgctgttggcttgtggatccctaagatgcatttgacgacaaagttttattttgatttgtgtttgcttgtgtggtaatttcaactgttgaacatttgttgtcttttagtttttttttgtctaaagtcaaaattgttgtaaacattgagaagcctgccctaatt

SEQ ID NO: 9585 - DNA, 1820 bp, Zea Mays
cttccctcgccccgaccgtgatccccgccggaaaacccaaccatcatcctcctcccccgcctcccttccatcctagcccgcgccttccatactcctcccaacatccctttcatcctcgttcgtgctccaccgatccacatgcgcgccccttccatccttgcccgcactcctccaatccacacatgctaccatgccaccgcctctcgccctcctcgaccgtgatccccacccccaaccgatgcccgccctggccataacccccacgcgatgcccgcccgcgcatcccctgtgatgcccatggacgagaggagggagatggatccggtggcggacgcccaccgcgtcgcgtggctccaacacggcctcctcgtgctcctccatatccaccctatccgcctccacctccacggggacgtcgccgtccatcgtcctaccacggaggacaactgctactacctcggttgccacctcaccaacatcaaggccatgcggaacctggtacgcgcgcccgaggcgtcctccgcatgcatgctcttcttccgtgaccgtgccgcagggtcgggggaggggtccgatgccaccgagctgttgtggacgacgccgatgtggtccagggccaagtccaagtagtaagaggcagaggcagtcatcatcttttcttttctttttccccctcgggattctgagaccttgtgcgggcaaagaggggcatgcggcggcccgggcactgggcgaggtctggcgctggggctccggtcaacagtgtgaagccaggagaaatatcgggcgggtgagcagcccaacaacagctctccaccttcctcaccctttcctcctgatatttcctcctttctccatcccttcccctggcttcacggctctccatggtgaagagggcgtccaccgcgatggctacgacgacggcggtggagcggcttggcgctcccaacaggtgttgacgatgaacgggctcgccaaggacgtgccgacggtgaacgggatgcacaaggagcccacgaccgcacatcccagattgctcatgttgcctactgcgcatctgaaaagaaggttcacatgagcatctgagcaggcctttcgaatcataatctgcatggttcagttcaaaaataattatgtatgttgtttacaaggaacaactttggctgaagcaagctgtgaccaacactctcatggctagattggaggtccaaagatttagttccctaggtctgacaccagcaggagtttccggtcactactatcatcaccgttgggaggcttctgtatgatcttgatgtcatttgtgcttcgttgctcgatcatgtgcttcactttattgtccagatccaaaaacagtgctagatttggttcctagagcattctttacattcttcatgggccatctgcgctacagcagttgttgtagtgtatggctagcttacagtttaatgtttaggtaactgtttgcttattttattgttttaatacctcactaataaagtacttatgttataactaaacgtcaatggtgtctgatgttataaaagtcttgtgctaataaaaggagggaagattacatcttttgtatatttggttcaaaatatggtctggtatctgatattgtgactattagttcatttatcttttgaaaacatgatgtattccattatgtacaacgtacattctttgaattcttttacatctcattcgatgcttctttcttgcattaacaatggtcgagaaatgaccctaatacaaactttgttggtccgaaatgataaactttatggggaacacttggattctaatgtcatttcaag

SEQ ID NO: 9586 - DNA, 1839 bp, Zea Mays
atattgtttttggattttgattactgactctcaggatctgtggttgattggacaagaacgacaactgagtcgaataaagaaacgataaattgcagtaaaagactgcactgaagctatcgtctggtgatgataatgaattgcatcatataatatcaatacttcttggttatgatgaatataaaactgtacagacgagagattacagtgaaaaaatggacgagattgttactttacttgaagaaagtgcttatagtcatctcttggaggtgattgtggaggttgccccagacgaattgcgcaatggtatgcttgcacgtagtctgaagggtgcattatttgcaatctcatctcaccactgtggtaactatgtggtgcaagctttcatatcatctactaaaacctcagatcagatgaatcaaatatgggaggaacttggtccaaacatgaaggaattgcttgaactagagttctcaagctcttgctgcagcgttaagttcagattctgagtctactaagagcattgttgcacgtatactttttcttgagaactacctacatgagagatctaattggaaatggattcttggtgcaaaaatgagcattctgggttgcttgatgctgcaatctattttccagtacccgcatcaatatattcgcccatatgtcgcaagcttgctggccatgggggatgatcagatcctccaaatttccaaggattcaggaggttgccgtgttcttgagtcttttctaggttcaagtgccactgcaaagcgtaaatttaatgtttttggaaagttgcaaggtcattatggagatattgctatgaatccttctggctcattcttagtagagaagtgctttactgccagtaacttttctcataaagaggctatagtggcagagctgttggctgtgcaatctgatctatctaaaacaagacacgggttccacttgctaaagaagctggatgtcgatagatatgctaggcgacctgagcagtggagggctagtcgaacttcaaaagaaacaacccaaaaaaagtttgaggcagaatttggctcaaacagtcaatctactgggcagattgttaaagaaaagttctctcaaagtcgcacgaagaagcgtaagcagaaagagaaggttgacaaaattactgaggatgccaggagcaacaaaccagacttctctcagaaaggaaacagtaagaggccaaaatctggcaacgcaacttctgagaaccccctgagtgaaggtgctagtgctagcatggtgttcttgaagggctctgtcaagaggaagtccccaggtttcctttcagataaaccgagcttcaagaaacaaaaacctcacaaacccgattctggtagaccagacggcaaacgttttgttcgagatagtgatactagcgcaccgttcgtcaagaatgccggcaaacagaaacagtccattgctgagctcgcggacctggctggtaaggagaagctgactgcgtctgaagttcgcaaattgctgaagcctgaaatgtcaggcaagagctaatgagtttagggtgagcagaggcagcaattttgttggtcgtttttcctcgtatgttgcggaaagaaactgtggcacgtgatatgggtttgtttcagtagaaacgtattcgtgatacctgtcctgataccggtttctcttgctagcgaatctctttggctttgcatatgtttgtttgatccgctgcttgctgatatagtgcaaaacatgtagaaagatgcagccccgcccagggcaacattttccctgctaagaccaaatactcgtaataacatgttaatgcaggaaatgccaagagactat

SEQ ID NO: 9587 - DNA, 2916 bp, Zea Mays
aacccaattgtcgtcggccactgctcttccacttgcagtcttccgtcgccctcgcccctcgcccaggcacagccgcacagcaagcatagccgccaccgccagtcgccactgctcagctcggcgctccatggcgtgcccccaaattccgtgacggcgtgactcgtcttcctcctttcctctctgccgggctgcacgtgcagaccacggacgaacacactgcccccaaggccccaatccaagtaagcagctgctgtcgaagtgtacatgagcaatggtttgtgttgggtccaaggcaattagacccaaggggagcacaataaatggcttgggagatggagctttagacgatagctcacacaagaagaggacaaggaaggatacgagcgagaaacacgggaaagggggtcacagctcaagtaaaggaccttctgtagggaaacctcggcatgtgaaggataggaagcagaggaaagatgatgggaagaaagggaagggtcgacgaaaggaccatcattcaggaagctccgtgatggtgaatcccaggacgaagaacctcaacaatcaggatgcggtaccatcctccgatacatcaaaaccagtacaaaatgttcttaggttcttatagaaggctgtgagttagagcagttatgcacattcctacgcaattgtatcgactatttttcggtcattgccgtggacaaaaatgggtcgcatgtggctgaagcagctctcaagtcactcgcaacacatcttgaagatgaagcctccagggccatgatagaagggatactgaacaaaatatgcaaggttattgctgtggatgctgttactgtgatgtccagctgctatggttcacatgttctccgcactctactttgtctttgtaagggtgttccatcagattcactacaagacttccatactactaagagatcttctgttctagctgagcggctcagttgtgggacaaatcagtctagtcgacatgttccaaagaattttgaaaatggtttctcaggcatgtttaggtcttttgtcagagaaatgctacataatgcaaaagctgacattgcaactttacgagttgacaagaacagtagccttgttttacagactgcactgaagctatcgtctggtgatgataatgaattgcatcatataatatcaatacttcttggttatgatgaatataaaactgtacagacgagagattacagtgaaaaaatggacgagattgttactttacttgaagaaagtgcttatagtcatctcttggaggtgattgtggaggttgccccagacgaattgcgcaatggtatgcttgcacgtagtctgaagggtgcattatttgcaatctcatctcaccactgtggtaactatgtggtgcaagctttcatatcatctactaaaacctcagatcagatgaatcaaatatgggaggaacttggtccaaacatgaaggaattgcttgaactaggtaaaacaggggttgtagcttccatgttagcggcatgtcagcggcttgaaacttatcgccttgagagttctcaagctcttgctgcagcgttaagttcagattctgagtctactaagagcattgttgcacgtatactttttcttgagaactacctacatgagagatctaattggaaatggattcttggtgcaaaaatgagcattctgggttgcttgatgctgcaatctattttccagtacccgcatcaatatattcgcccatatgtcgcaagcttgctggccatgggggatgatcagatcctccaaatttccaaggattcaggaggttgccgtgttcttgagtcttttctaggttcaagtgccactgcaaagcgtaaatttaatgtttttggaaagttgcaaggtcattatggagatattgctatgaatccttctggctcattcttagtagagaagtgctttactgccagtaacttttctcataaagaggctatagtggcagagctgttggctgtgcaatctgatctatctaaaacaagacacgggttccacttgctaaagaagctggatgtcgatagatatgctaggcgacctgagcagtggagggctagtcgaacttcaaaagaaacaacccaaaaaaagtttgaggcagaatttggctcaaacagtcaatctactgggcagattgttaaagaaaagttctctcaaagtcgcacgaagaagcgtaagcagaaagagaaggttgacaaaattactgaggatgccaggagcaacaaaccagacttctctcagaaaggaaacagtaagaggccaaaatctggcaacgcaacttctgagaaccccctgagtgaaggtgctagtgctagcatggtgttcttgaagggctctgtcaagaggaagtccccaggtttcctttcagataaaccgagcttcaagaaacaaaaacctcacaaacccgattctggtagaccagacggcaaacgttttgttcgagatagtgatactagcgcaccgttcgtcaagaatgccggcaaacagaaacagtccattgctgagctcgcggacctggctggtaaggagaagctgactgcgtctgaagttcgcaaattgctgaagcctgaaatgtcaggcaagagctaatgagtttagggtgagcagaggcagcaattttgttggtcgtttttcctcgtatgttgcggaaagaaactgtggcacgtgatatgggtttgtttcagtagaaacgtattcgtgatacctgtcctgataccggtttctcttgctagcgaatctctttggctttgcatatgtttgtttgatccgctgcttgctgatatagtgcaaaacatgtagaaagatgcagccccgcccagggcaacattttccctgctaagaccaaatactcgtaataacatgttaatgcaggaaatgccaagagactat

SEQ ID NO: 9588 - DNA, 1925 bp, Zea Mays
atcacattccctccctcccttctcgacgccgccaaaacaagccatctcgtctcttcactcttcttctgcagtcctgctgccggtgctcgccctcgccctcgaccgtcacggagaaaacgaagagacccctagatggggtctgcggcggaggtgcctgttgtgatcagttccgacgaggacggcgcgcagacgcccgccgctggcaagcgccagtcaccggaagacgccgcccttgcgtgggcggagggaatactggcccaagacgactacgacgacaacgcggtttgtgagggagtgggttatccagcgatgatgctggagctgttggattccctgaaggatgaaacagggactgttgtgggtgacaaggaggttgcggttggtgccaagaacacgaacaccatgcctgatgctcgttgcgacgatgatggcgatgattgcgtcattcttgacggtgaccctgataagccggttgccgttgcaaaggaggaggggggaccgccacgagatgcccctgaggatgaactgcagatagttgcggagaaaggagagttagcatgcagagatttccctcatccacgacatctatgcgctgccttgccattcagcagcagttctcatgcaagtcattgtagcatgtgccattgttatgtctgtgattgtcctgctccctgtgccctatgggacaagcattgtcatgctacggacaaggatagaaagtggaagagacttagggaaatatccaaaaataaaagccagccaaatcctaaacgaagaataccccagcatttcaaacgctcagtcacgacaggaccatcatcctcacagtattccgcaaatatgactggttttactggaagatttcctgcttcgggtactgcgaaccaaattcaacaggtggatatctctgttatggttgcacaggatatggtgaggggtatcagtctgccgagtgcaccatctcctacgccaagaactaaaaatcggagctatggatccaaaggaggtcatgttagcgctaagacttttcagagtaacccatctcagttttgtgttcgtgcaccaatgggatctcatggacacaggtaccgaccaccatcatatcctcagcctcctcctaacacagttgttggcactggtgtgcccctctcacggtgcgcctcgctgaacgctgaggctcagggaacacaacgcccacaagttccgccggcaggtacaatatcgaaggaatcacttgcaaatttggcacgtcggctgggattaccttattacaatactaatcagccattaggtcagcagtcaacgagcacatctcaatttctgcatatgcatcctcacgagatgctacctgctcaaggtgctcaaaacacgacctggcaagcttacgttaagaaaagtgtggcaacaacttcacaaatcgtgccttctagtgaacataattcgtcaattcatgcacctgggagcactgttcttccatctggttcagttcagatccagcagcctttgcgccaattcaaatcgggcactgttctatcatctggtgcagcccagatccaccagcagcctctgcgccaactcgattctcagagcagtgttactccgagtgaaaccgttccaagtactctctaccttccgcagccatgaagtttcatcggaagtgttctcatcctagactattgttcctttctttagtgtacttgtagtttttttatatcatagataatcattgacagatatcttgctatcctaacctttctgctgtaatggtttaaagctgagaattaatggtcaaatcttgcggtggtcgggtggtaacactgatttgcaacatactatagctggtgaggtttcagcaccttgtccaatggtaaaacaggtgctcgttttatacgagtgaggttagacgacgagagttaataatgatg

SEQ ID NO: 9589 - DNA, 2725 bp, Zea Mays
ggagcccttctcctccaccacccgtttctctttctctaggctcgcgcctgccccgccttcgttgtcgcgcctgccacctgctcgacgaatcgccgcttccgccccacgccgcgatgccgacgcccctcgccgcggcgctgctgccactgcccgcctctcccgcactgcactttccgcggccgcggcccggtccctcatggcgtgcgcggccggccgtggttagggcggccgctctccgcgccctgccacggcgcctcgagctctgtccgccgtgccttgcggcggtcgagagtaacccggccccgccacccttagctccgccaccgccggacgaggcgagcgccggctcaggcctcgatgcgagggccgggggaggtggcggtggtggtgacggaggtggcggcgctgatcttgggtggttgagggctttcccgcatgtgttcactgcgtcaatggcaaacttcctattcggttaccacattggggttatgaacggtccaatagaagatattgcaacccagcttggttttcaaggaaatccgttcctccaaggtcttgtggtgagcatattcattgttggtgccttttttgggagcttaggctcatctgcattagtagataagttcggctgcaagaggacccttcagatcgacagtattccattgattattggagctctcctgagtgcacaggctgattctttggatgagatgcttttgggaagattccttgttggcatcgggatcggcgtaaacactgttcttgttccaatatacatctctgaggttgctccaacaaaatataggggcactttggggactctgtgtcaaattggaacatgtctaggcataattgctgcactttccttggggataccttctgagagtgatccacattggtggcgaacaatgctttatgctgcatgtgtacctgggattcttattgttgctgggatgcaatttgctgttgagagtccacggtggcttgccaaggttggaaggttcgatgatgctagaaaggttgtagagagcctttgggaaccttctgaagttgagaagtccatggaagagatcaaagctgttgtgctaaatgatgattcacggggcagctggtcagaccttctggtggaaccacataatagagaatgcatgtttgggtgtgcgtatgttcacgcttggttgttggactgcactgcatgtacattcgtctgattctgccatccttaaaggcccatactggacgatctattatctgggcactaagtttgcttcttgacttttgctatgatgagttattgctgagatgttctgtcataatatttggaacattcatgtttcacacaccacaacaatatctacatgtttctgcagttgcattgattggaggatcccttttctttctgcaacagtttgctggaataaatggtgttctttatttttcatcattgacattccgtgatgttggtatcagtagtggtgctttagcaagcttatatgttggaataaccaattttggaggggcactagttgcttcaaatttgatggacaagcaagggcgaaagaagcttttgataggaagctaccttggaatggcttttgcaatgttccttatagtatatggtattagcttcccgcttgatgaaggagttgcccacagcttatcaatcgctggaactcttttgtatgtgctttcactttctattctctctagcaaaccccttaggggcttgggctggtttggtgacaagggaattggaggggatccatggaggaggaaatccattgctatacaaaattgttgttcttcactagcagaaggcttgcttagaaccttttgtggaaattatacctgtgggtttctcaatgtatggaaatcatttacttacatcatgaacaatgtgaaaggttttctagtacgatctctgcttcatgatatgatgataaatgaattacaccttgttaatgtgtaaagaaaccactaattcagaatatttattagaaattccacttataaaatttgtgtttataatttttaaaaagattgttagttgcgagatctattttttttcatttgcaggtacatttttacttttgcaattggtgctggaccagttaccggtatcattataccagagctcagcagtgctcggacacgctcaaaagttatgggcttcagtttcactgtgcattggatatgtaactttctggtgggactatttttcctggagcttgtgcacaagtttggggttggagcagtctatgcaggttttggtggggtctccctgctgacagcactcttcgcctacaatttcatagttgaaacaaaaggacgttcgcttgaggaaattgagatgtccatgagcagtgctacccctggcaagcaagagtagaacatctcaactgtatggacaaactgaacaactgacgggaggaatttaataagagaagagggggcctaatcccatgaatcttcagcagcagcagtttgttgcaaacaacatcaactcctatagataatgagcacaatcaaattcagcttttctttggtagcatgagaatcgttgtacaatattaaaaagggtgaagaaaacgacccttttaatttgttttttgtacatctgatgtatatattttacgccttctgtagtacgtaaaataaagggaacagatctttctgatattacttgattgatgaatttggaatattcgcatcctttgttctggca

SEQ ID NO: 9590 - DNA, 2940 bp, Zea Mays
tctcctccaccacccgtttctctttctctaggctcgcgcctgccccgccttcgttgtcgcgcctgccacctgctcgacgaatcgccgcttccgccccacgccgcgatgccgacgcccctcgccgcggcgctgctgccactgcccgcctctcccgcactgcactttccgcggccgcggcccggtccctcatggcgtgcgcggccggccgtggttagggcggccgctctccgcgccctgccacggcgcctcgagctctgtccgccgtgccttgcggcggtcgagagtaacccggccccgccacccttagctccgccaccgccggacgaggcgagcgccggctcaggcctcgatgcgagggccgggggaggtggcggtggtggtgacggaggtggcggcgctgatcttgggtggttgagggctttcccgcatgtgttcactgcgtcaatggcaaacttcctattcggttaccacattggggttatgaacggtccaatagaagatattgcaacccagcttggttttcaaggaaatccgttcctccaaggtcttgtggtgagcatattcattgttggtgccttttttgggagcttaggctcatctgcattagtagataagttcggctgcaagaggacccttcagatcgacagtattccattgattattggagctctcctgaggtttttacttccactttaccgtgttctatattcctgaagtcctgactttgcatagtttctgctgaccagtgttatgcccggcctataatatcagaggcgcaggacccatggggataagcccatatcagtagataagagataatcaccattagtggataagaacatatgacagttagttagatggatagctgccttatcttatcataagattattagatcttgatagattagatggatagctcccttatcttatcggatggttgttaagatgtactaggcggccttggctatataatgccagggaagaaaggaataaagcaagcaatttgcaaccaatctggactcacctgcgcctcctgttccctcccgcagcctgtgatcacgacgcccaagcgccaaccacaacctgcgaccaatcgcttgccagcccctcatctcttttccctatgccatcttcccgagagggcaaggaaccctaacaagtgtagtgtttacttgtattgaatttggccatcaagtttcagaacttcctctcagcagcatttctatttcatacattaccatttgttgtatattaagttatcatatttttttccttaagggaaagctatgttacagtgcacaggctgattctttggatgagatgcttttgggaagattccttgttggcatcgggatcggcgtaaacactgttcttgttccaatatacatctctgaggttgctccaacaaaatataggggcactttggggactctgtgtcaaattggaacatgtctaggcataattgctgcactttccttggggataccttctgagagtgatccacattggtgaggcatctcttgttggcatttatgcatcttaatgatgtggcgaacaatgctttatgctgcatgtgtacctgggattcttattgttgctgggatgcaatttgctgttgagagtccacggtggcttgccaaggttggaaggttcgatgatgctagaaaggttgtagagagcctttgggaaccttctgaagttgagaagtccatggaagagatcaaagctgttgtgctaaatgatgattcacggggcagctggtcagaccttctggtggaaccacataatagagaatgcatgtttgggtgtgcgtatgttcacgcttggttgttggactgcactgcatgtacattcgtctgattctgccatccttaaaggcccatactggacgatctattatctgggcactaagtttgcttcttgacttttgctatgatgagttattgctgagatgttctgtcataatatttggaacattcatgtttcacacaccacaacaatatctacatgtttctgcagtttgctggaataaatggtgttctttatttttcatcattgacattccgtgatgttggtatcagtagtggtgctttagcaagcttatatgttggaataaccaattttggaggggcactagttgcttcaaatttgatggacaagcaagggcgaaagaagcttttgataggaagctaccttggaatggcttttgcaatgttccttatagtatatggtattagcttcccgcttgatgaaggagttgcccacagcttatcaatcgctggaactcttttgtacatttttacttttgcaattggtgctggaccagttaccggtatcattataccagagctcagcagtgctcggacacgctcaaaagttatgggcttcagtttcactgtgcattggatatgtaactttctggtgggactatttttcctggagcttgtgcacaagtttggggttggagcagtctatgcaggttttggtggggtctccctgctgacagcactcttcgcctacaatttcatagttgaaacaaaaggacgttcgcttgaggaaattgagatgtccatgagcagtgctacccctggcaagcaagagtagaacatctcaactgtatggacaaactgaacaactgacgggaggaatttaataagagaagagggggcctaatcccatgaatcttcagcagcagcagtttgttgcaaacaacatcaactcctatagataatgagcacaatcaaattcagcttttctttggtagcatgagaatcgttgtacaatattaaaaagggtgaagaaaacgacccttttaatttgttttttgtacatctgatgtatatattttacgccttctgtagtacgtaaaataaagggaacagatctttctgatattacttgattgatgaatttggaatattcgcatcctttgttctggca

SEQ ID NO: 9591 - DNA, 526 bp, Zea Mays
gttgtgcatgcctgcgagctgtagagaagagggggcagtctggatccgaaccctcagcaaggattttgcagctcctactagagaatggcattagagtaaatgaactaacaaggatagaggttgctctcgtcgtcccataagtgaagctcgagtcgtccactggtggcttatcttctctgcctggtgagagctggcactaccgtttggtgtcgtgaccttgctgatgcttgttcgcctagtgaagagtttggggcatattcagttttacagagtttgggccatcacccatcaggctggagctttatagagttaatgaacacgaagttgagttcaacatgcaatttctgccgtgctcttcactaaccaccacacatgcacattgacatgatgtaaacaaagaaccgattttgttggatttgattgtgtattatgtgctgtaaatatctgttttatatgattgtcctgccacctgggctgctgtaatttgatggatatggtaatttttatgataaaatatggacatggt

SEQ ID NO: 9592 - DNA, 779 bp, Zea Mays
gactgaaggccccaccatacaatcagataaagcattagcgggcttgccacagtggccttggccgtagcagcagcacgccacgagcagcgacgccagagaagagggagttccaaatggcgattacaatgaagatcagacgacaaaagacatgagcgagtattagtgtccaataaactaggtgctggaaatccacatgcagcacacctatcagtttatgtttcagggcttattggctgctccgccgaggtcatgcaatggccctactgggagctcgacgagatggacgacacactcacctacagaggggagctagggattttgcagctcctactagagaatggcattagagtaaatgaactaacaaggatagaggttgctctcgtcgtcccataagtgaagctcgagtcgtccactggtggcttatcttctctgcctggtgagagctggcactaccgtttggtgtcgtgaccttgctgatgcttgttcgcctagtgaagagtttggggcatattcagttttacagagtttgggccatcacccatcaggctggagctttatagagttaatgaacacgaagttgagttcaacatgcaatttctgccgtgctcttcactaaccaccacacatgcacattgacatgatgtaaacaaagaaccgattttgttggatttgattgtgtattatgtgctgtaaatatctgttttatatgattgtcctgccacctgggctgctgtaatttgatggatatggtaatttttatgataaaatatggacatggt

SEQ ID NO: 9593 - DNA, 2459 bp, Zea Mays
aggttcaatgaaaatgtaatgaacaagccaggttttgtggatgtatatccagcttcacgaataacaaggaatatacagcatcatttcgagtctgtttcccgttttaatactagcaaactgatgaacactgagaagcaaaaaggcctaaggattgtaacagaaccaagaaatctgtcatcagcactaagatggatttctgatgaggaagtcagaaaacaggtatatatcgttgggaactctgaacctcgtgaaaatattggcgttcttaatgaacttatacatgctcgtgatgaacttgcaaagattatgggatgcaaatcttatgctgaatttgctattcgtcctaacatggccgcgtcagccgatgtggttatgtcatttcttgaaaatttgagcaacactgttaagcataaagctgaagaggtttgaatggatccagctaatactggcatattttggcaaaatgcactgcggctcctgttgaaatgcatcattaaattctatgatccatctctcttgataacatctcttatgcaggaatttaagaccatacataatttcaagagaagaacatgtaatgaaaagagtgccgatctagaaccctgggatgaggattacttcattggaatgatgaaatcatctgtatatgacctggacgcttcagttattgcaaaatactttcccttgtcgcagtgcctaaaagggttaaatgttctcgttgaatcattatttggtgcaacatttcatcaaattcctatgagggatggggagtcatggcatccagatgtgataaagctccgtctccatcatcctgatgagggtgatttaggattcatgtatctggacctctactccagaaaggggaaacatccaggatgcgcacattttgctatccaaggggggcggagattatcagactcaaactaccaattgccggtgcttgtagaaaaactgcaaggcttaaccatggggatgttgaaactctttttcatgagtttgggcatgcccttcactctctgttgtcaagaacggaatatcagcatttctctggtactagggttgctcttgatgtggctgaaaccccctcaaacctatttgaatattatgcctgggactatcgtgtcttgaagacatttgctctagatgaaacaactggagatgcaataccagaaaagctggtaaaggcactaaatgcttctcggaacatgtttcctgctactgagctccagaggcagatcttctactctataatggacctaaccttgtttggcgagcaatcatccaagcctatggacacgatttccactgttgccgatttgagaaggaagcatacaagtgggaaatacgcagaaggcacacactggcatacacgatttactcatctcgtaacctacggtgctggctactatacctatctatatgctagatgttttgccacaactatatggcaagaagtatgccaagaagacccgttgtcccgcagtgcaggcagtgccatcagggacaaattcttgcggttcggcgggtcaaaggacccatcatccctgctgaaggattttgcaggtgatgccgtcattagaaactccgggagtggaataatcccgaacgctagttccttgtgcaaagaaattggattgtgaaatagcactgtgggggcggaggctggcatctttctgcttgagcttggctgaagggccaagaactaaacctcgagggcttgaggtagtttgagggagattggagatgatttaatcctctcctattcaattcacctctaaccggacaagtccgaacaagtcatgaaggggcagagtcgctggagttccggtgcttgacctctcggcatacattaatggtgtggtgctagcggaagatggttctcctagacatactttcttcaaagtttcacctgcggatggttttgcaatctgtcaaattttactagaggacggttgacggtaccatattattactcccattgcctgggatttttccttcaaaatgttatgatgaagtctgtcagccctgtagcttatagcactgattcataggagccataggtcttccttgctcgtttcatggaaatgagaccccgtttggtaaagattagtgcctttatttttgtcctatttagtctctgaattgccaaaaggtgggactaaaacataaacagaactattttagtctctagtctctcaaggagtgactaaaagagagtaaaccacataaatttcaccttttgtctctcctttattttagttgtactaatagtgtgagaatgctaaaagatattttgacactcttatatatgttttgaatacttttagtctctacaaacaaacagggtagagactaaactttagtccttggcttaaaggaaccaaactgggcctaagaaagatcttgaatgcaaggcagctttgtatcaccgacctgaacagcctgttcagatacttgtt

SEQ ID NO: 9594 - DNA, 1260 bp, Zea Mays
atggcaatgggcctcgatttctcacatgggaattcctctattaagggatggggaatgtggaagtttctcccacagggaaaaaattctcctccgacgggatcaaaaagaaaagaagcagcacctattgttgatatggtttgcttcccttcaaatcgaagaacaaaccagggacaaggattgagtccttcctacagaagaacgagagcatacatccgaaaagatacacctacgcggacgtgaaaagaatgacaaaatccttcgctgtgaagctaggccaaggtgggtttggtgctgtatacaaaggcagcctccacgatggccgacaggtagcagtcaagatgctcaaggacacccaaggtgacggcgaggaattcatgaacgaggtggctagcatcagcaggacttctcatgtcaacgtcgtgacacttctagggttttgcttgcaagggtcgaaaagagcactgatctacgagtacatgcccaatggttcgctcgaaaggtatgccttcaccggtgacatgaacagtgagaatttgctaacctgggaaagactatttgacatagcaattggcacggccagagggctcgaatacctacaccggggatgcaacactcggatcgtgcattttgacatcaagccacacaacatcctgttagaccaggatttctgccctaagatctctgactttggactggccaagctatgtctgaacaaagagagcgctatctccattgttggcgcaagagggacgatagggtatatcgccccggaggtctactcaaagcaatttggaacaataagcagcaagtctgatgtctatagctatgggatgatggtccttgagatggttggagcaagggacaggaatacaagcgcagatagtgaccatagcagccaatatttccctcagtggctttatgagcatttggacgactattgtgttggtgcttccgagattaatggtgaaaccacagagctcgtgaggaagatgatagttgtaggtctgtggtgcatacaagtgattccgactgatcgaccaacaatgacgagagtcgtcgagatgttggaagggagcacaagtaatctagagttgccacccagagttcttttgagctgacaaagcgtagatatttttcctatcaaatgttgcttccaggtcacacaaatgcaaaatatttgtggagacgagtgcccattaacctcatacaatgtatctgtatgacaaaagtcccacgactcactggacgcggaaatgtcgc

SEQ ID NO: 9595 - DNA, 3309 bp, Zea Mays
ctcgtccgctttgtcggaaccgttgctggtggctccggggttctgcgactgcgcatagggaatggcgatggcggcggcggttttggaggaggcgctgcgatggggtggaggaagcgttggggacgacaacgtggccgcgcgcagggcagaggaggccgcgataagaaggcatgaagcagccagttggttgcgaaaaacggttgggatagtgtgtgcaaaggacctgccggaagagccctctgaggaggaattccagcttggtctgagaaatggcattgtcctctgcaacgcactgaataaggtccagccaggcgccatacccaagattgtcggagtccagtcagatactgcggtccctgcagatggctcagctttgtgtgcttatcagtacttcgaaaatctgcgaaacttcgttgtcgttatacaagattttggcctcccaacatttgaggtgtctgatttggaaaagggtggcaaaagtgttcgaattgtggactgtgttcttgctctgaagtcattcagtgaaagtaagaaaacagggagacaagctgcatgtaaatatggtggcattttgaagcctttggtttccggaaattatttcatacttaagaattgtgatgcttttatgaataaaaatgcgagaattcacacagaagaggctaccctgaatggttttcgaggagagcaaaacttatctcttgattgttctccagaatcctatgaggtaattacttcagacaaccttagcacgattattcgcacaattctcttagataaaaaaccagaagaaatcccactgattgttgaatcactactaaacaaagttattcaggaatacgagcttcgctttgcaaatcagaacttgatggatgaagagaagcaaaataacttgactacgaaggaggaagccagttttgcagtaaatggtagtaatgcagctcaaaagttccatctgaaggctgaaataaattttgatctacagcacaaacagatcaaggggttgagaggtactgtttcttctatcaagtctggaatggaacaactgaaattgcactactctgaggagttcactaaacttgggaagcatttgtacactatatccaatgctgcttctggataccataaagttcttgaggaaaatcgcaagctgtacaaccagatacaggatcttaaaggaaatattagagtttattgtcgagtgaggcctttcctacctgggcaaataagttccttaagcagtgttgctggaatggaagaaagaaccattacaataatgactcctacaaaatatggaaaagatggaaacaaatctttcactttcaacaaagtctttggtccagcagccactcaagatgaggtcttttcagatatgcaaccattgatacgatcagttcttgatggttttaatgtctgtatatttgcatatggccaaacaggatctgggaagacttatacaatgagcggacctaaagttttaacagaggaaagcctaggtgtcaactataaagcattaaatgacttatttaatcttcaagcacagagaaaggggacaatagattatgatatttctgtacagatgattgagatatacaatgaacaaaaaggacttgcggttccagatgcaagcatagttcctgtcacatctacgtctgatgttgttgaactgatgaatcaaggccaaaagaatcgtgcagtgggttcaacagccataaatgaccgcagtagccgctcccacagttgcttgactgttcatgtgcaaggaagagatttgacatctgggacagttttaagaggttgcatgcatctggtcgatctagcaggcagtgaaagggttgataagtccgaggttgttggagatagactaaaggaggctcagtacataaacaagtcactttcagcactgggagatgtgattgcatccctttcccaaaagaacacacatgtaccttaccgaaacagcaagctcacccagctcttgcaagattcacttgcccagaacttgacgctgctggtgagaccataagcaccttgaaattcgctgaacgtgttgcctccgttgaacttggtgcagccaagcaaaataaagaaggcagcgagattagagagctcaaagaacagattgcttccctcaaggctgcattggctaagaaggaaggagaaccagagaacattctaagcacacggtcaagcccaagcatatacagaattagaaaaggcaatgcaacacctgcaactcctaaagacaggcagccaatggaagaagttgggagcctagaggtccagaatgtcttcactccagctcaaaagaggtcaaaaatgcatttgcttggcatcctcactgagaacaactcgtctaactcggttcagaattgcaatgttcctcagaaggaaataggattaggtggttgggttgacaagatggctcttggagacaaccactttgagaactctaattccatcctagagttggagcctgacacagcacagcttccaacttctttttatcatcaaagatatagtcctgtgcaacaaagctgtaggaccgaatcagtaccatcattgggcctacatggctttgattctgctactagttgttctaaccaagagattgtagtgtcaaccatgggactaaaagcttctggtgttgccaatagaggcgcctcaactgtaaaaaagtatgaagctacatcaacgaggagtacaaatctagcaagcaagtctccattgttgcagaaaaaactgcaaacaccaaccaggaacaggaaccagctaacttcgagcaccataggtggaagaagaacaccaaatggaaaaattggcattgcaaagtaatcaattaatgtgaaggcagatttgctgtgaccatgcttagaatggaaaaattggcattgcaaagtaatcaattaatgtcaaggtgggatagcacggagcctaaaaggactgcggtttttgaacctgcagaaggatcaagatcaatcatgtaaactgatgcacattccgataggtagcacattttatttattacattgaagttggaaacagacaccaaagaggacagaaagatgataaatatgaaggaaattcgaattgaggcttctgtacattttccacacttataaagtaatgttgtatcatgtgcctattagccatgacacatcatcacctgaaagttgcttgtattagacatgtgctaagtttacagtttctctgtctcatgtatgttaccctttctcataatggatcgccactcacagactaagagggtgattggtttcacccaactaaaatttagtcccttttacattgaat

SEQ ID NO: 9596 - DNA, 2517 bp, Zea Mays
ggatgacttgatgcttgaagataaagtcatttagggtgaacttgcattagcttttggtgagctattgagaaaactctgggctcctggaggacgtgcccctgtttcacctagaccattcaaaatgaagctttctcggtttgcatctcagttcagtggatacaaccagcatgattcacaggagctgttggcgttcctattggatggactccatgaagatttgaatcgtgtgaagcatagaccttacataaattcaggggatgctgatggaagatcagatgaagaagttgcagatgaatattgggcaaatcatattgccagaaataattcaatcattgttgatgtatgccaggggcagtacaagtccactttggtttgcccagtctgtgggaaggtttcagtgacttttgacccgttcatgtatctttccttgcccttacaatttgcctcaacccggagcgtgactgccgtggtgttttcttgtgatggtagtgttccaccaacaccattcactgtgaatgtaccaaaacaaggtaggtgcagagatctattacaagcccttggtgctgcatgctcacttaaaaatggggagaaacttctaattgctgaggttggtcattaatgctcacttgagttaatgtactggttggcaggtttgacgattgtgtgtccttaaacattttggttgaatttatctacagatacggaatcataagatctaccgttttattgatgatccagtgcttcagctgtctacaataagtgatgatgatcatctggcagtttataagctcccaaagttggaaaagagggtgaattacattcagtttgtgcatcgtcatgaagatctggaccatggaaacaataacagcttgacatcttggaaaccgtacggtgttcctcttcttgcacaaatttctcgcaatgaaattgtcacgggttttgatatccatgagttggtccataaaatgcttgtgcccgtgctaaggaatccggactctctgcatttggctgttcaaagttctgtttccacaagaactcatagttatcataccgacagcagcaaatgtcagcttctgttggttgatgatagcaacacagtcattgaaaaatcaaatgatgctatcaggatcccacaatcttcacttgcaactgtattttttatcaactggcccaaggcagatctgaaaaagatagacactcatcatttagagtaccttccagaggtgtttatgtatgctccgcctgcgaagagaacccgtggtgaagctctgtcactctatgcatgcttggatgctttcttgagagaagaacctcttgtacctgaagacatgtggtactgtccaaggtgcaaggagcaaagacaagctagcaaaaagttggatttgtggagacttcctgaagtactagtcatacatctaaagagattttcatttagtaggtcaacaaaacaaaaactagaaacttttgttaattttccaatacatgacttggatttgacaaattacattgccaataagaagacttcagagcgccagatctatgagctgtatgctgtgagcaatcattatggcaacatggcaagtggacattatactgcacacattaagcttgtggatgagaatcggtggtacaacttcgatgatagccatgttgcttccattgatgaagatgaggtgaagactgctgcagcttatgtgctattctatagaagggtcagagaacaagacatagcaaggggaactagtaatggatctcagttatatgcaaaaagaagtcacggatatagccataggtaggctgatgattactgtggttcggtgcaagggggattctggaaatgacacccgcacgcctttagtcattgccaggagtatatggcttgctggaaaaaatgctcatcacgtgcagtcaatgcaccgttgtccagttgtcacagaagatatttcgtgcagtgctggtacaagatgggaattttgtatgaggtgagttgaaggagtaattgactctttatgataactgggtagcttcaacaggaacgccggggcttggtggcattttgttcgtctgttttcttctagaagagaaacaaggggaggcaagaaaacatttaggaaacaccttttcgttaatttgattttttatttccatttttagatttagctagtctgtacactgttgttggaaatgggtccgctgttgttggtcgatgcttgtggtggccaataatactacacccaactataccaggctctgcaatggcgaatcatggtgcacattatggtgctctgttgcgggaagaattgtagctgatgttgtacttatatactggcaaaaaggccccagaaatgtaaaaatgtatcgatatgctgacatcttaaaccctattttggattcgtgctctttcctatggatgaaggtgtgcgccatttaggggttgtttgtttgaagaatcaatccattctaggtaggtgattatcacgagaccatttcataaatttggtgaaatgaattcatttt

SEQ ID NO: 9597 - DNA, 3090 bp, Zea Mays
ccagcgactcatctctgacctctgaccaactccggtgatcaagaactgaagaagatgagtacctcatctgaaggtatggtggaggaccaacattaccaagaaaggcaatcaatactggcttttctcaaactgatttggcgatagaagtttatcctctacgactgcagttaattctaatgtcaagaggagagcgaacctttataaggataagcaagaaggtatgcatttgggactattatggtcgaacaaagcattcattgatggatagcttggacaaaacccttgatgatgccaacattcagatggatcaaaacattctagttgaggtaaccactgatgcaagtggtagtctggatggtttggttaagcgaaacaatttttttgagagtgatgctccgaaatcaggattgccagatgagaattttgcagccaacaactatgcttccagaagctatagctctagtctgacaccaagcatctacctgcgatcacccaatggtgatctggataatgtgcatggttctagtggcatgatcacgaggggatcgcccttaggtcttacagggctacttaatcttggaaatacatgctatatgaacagtgccatacagtgtcttgtgcacacaccacagtttactaaatacttctgtgaagattatcatcgcgaaataaatcggcaaaatccactgggtaatgtgggtgaacttgcattagcttttggtgagctattgagaaaactctgggctcctggaggacgtgcccctgtttcacctagaccattcaaaatgaagctttctcggtttgcatctcagttcagtggatacaaccagcatgattcacaggagctgttggcgttcctattggatggactccatgaagatttgaatcgtgtgaagcatagaccttacataaattcaggggatgctgatggaagatcagatgaagaagttgcagatgaatattgggcaaatcatattgccagaaataattcaatcattgttgatgtatgccaggggcagtacaagtccactttggtttgcccagtctgtgggaaggtttcagtgacttttgacccgttcatgtatctttccttgcccttacaatttgcctcaacccggagcgtgactgccgtggtgttttcttgtgatggtagtgttccaccaacaccattcactgtgaatgtaccaaaacaaggtaggtgcagagatctattacaagcccttggtgctgcatgctcacttaaaaatggggagaaacttctaattgctgagatacggaatcataagatctaccgttttattgatgatccagtgcttcagctgtctacaataagtgatgatgatcatctggcagtttataagctcccaaagttggaaaagagggtgaattacattcagtttgtgcatcgtcatgaagatctggaccatggaaacaataacagcttgacatcttggaaaccgtacggtgttcctcttcttgcacaaatttctcgcaatgaaattgtcacgggttttgatatccatgagttggtccataaaatgcttgtgcccgtgctaaggaatccggactctctgcatttggctgttcaaagttctgtttccacaagaactcatagttatcataccgacagcagcaaatgtcagcttctgttggttgatgatagcaacacagtcattgaaaaatcaaatgatgctatcaggatcccacaatcttcacttgcaactgtattttttatcaactggcccaaggcagatctgaaaaagatagacactcatcatttagagtaccttccagaggtgtttatgtatgctccgcctgcgaagagaacccgtggtgaagctctgtcactctatgcatgcttggatgctttcttgagagaagaacctcttgtacctgaagacatgtggtactgtccaaggtgcaaggagcaaagacaagctagcaaaaagttggatttgtggagacttcctgaagtactagtcatacatctaaagagattttcatttagtaggtcaacaaaacaaaaactagaaacttttgttaattttccaatacatgacttggatttgacaaattacattgccaataagaagacttcagagcgccagatctatgagctgtatgctgtgagcaatcattatggcaacatggcaagtggacattatactgcacacattaagcttgtggatgagaatcggtggtacaacttcgatgatagccatgttgcttccattgatgaagatgaggtgaagactgctgcagcttatgtgctattctatagaagggtcagagaacaagacatagcaaggggaactagtaatggatctcagttatatgcaaaaagaagtcacggatatagccataggtaggctgatgattactgtggttcggtgcaagggggattctggaaatgacacccgcacgcctttagtcattgccaggagtatatggcttgctggaaaaaatgctcatcacgtgcagtcaatgcaccgttgtccagttgtcacagaagatatttcgtgcagtgctggtacaagatgggaattttgtatgaggtgagttgaaggagtaattgactctttatgataactgggtagcttcaacaggaacgccggggcttggtggcattttgttcgtctgttttcttctagaagagaaacaaggggaggcaagaaaacatttaggaaacaccttttcgttaatttgattttttatttccatttttagatttagctagtctgtacactgttgttggaaatgggtccgctgttgttggtcgatgcttgtggtggccaataatactacacccaactataccaggctctgcaatggcgaatcatggtgcacattatggtgctctgttgcgggaagaattgtagctgatgttgtacttatatactggcaaaaaggccccagaaatgtaaaaatgtatcgatatgctgacatcttaaaccctattttggattcgtgctctttcctatggatgaaggtgtgcgccatttaggggttgtttgtttgaagaatcaatccattctaggtaggtgattatcacgagaccatttcataaatttggtgaaatgaattcatttt

SEQ ID NO: 9598 - DNA, 3301 bp, Zea Mays
cccgcggggcgcaagatcgttttttccccttcttgctggtgttgtttgttggtggcggaatgcttcggcgccgccgttgaggttgcgcctcggcgtcggcattggaggtggtggcaaagttggattgattacctcattcaagatttgactggtgcaacaagtaatggttctcatcatcatgagtttggttcaaaaactcctagaaggccaggagctattgacaataccgatttaattgatgatgtgccacttgaagtctccaacatggagattgagatacatgataacttggttgagggtcgggattacatactgcttcctcagcaagtttgggaaaagttgcatggttggtatggtggaggaccaacattaccaagaaaggcaatcaatactggcttttctcaaactgatttggcgatagaagtttatcctctacgactgcagttaattctaatgtcaagaggagagcgaacctttataaggataagcaagaaggtatgcatttgggactattatggtcgaacaaagcattcattgatggatagcttggacaaaacccttgatgatgccaacattcagatggatcaaaacattctagttgaggtaaccactgatgcaagtggtagtctggatggtttggttaagcgaaacaatttttttgagagtgatgctccgaaatcaggattgccagatgagaattttgcagccaacaactatgcttccagaagctatagctctagtctgacaccaagcatctacctgcgatcacccaatggtgatctggataatgtgcatggttctagtggcatgatcacgaggggatcgcccttaggtcttacagggctacttaatcttggaaatacatgctatatgaacagtgccatacagtgtcttgtgcacacaccacagtttactaaatacttctgtgaagattatcatcgcgaaataaatcggcaaaatccactgggtaatgtgggtgaacttgcattagcttttggtgagctattgagaaaactctgggctcctggaggacgtgcccctgtttcacctagaccattcaaaatgaagctttctcggtttgcatctcagttcagtggatacaaccagcatgattcacaggagctgttggcgttcctattggatggactccatgaagatttgaatcgtgtgaagcatagaccttacataaattcaggggatgctgatggaagatcagatgaagaagttgcagatgaatattgggcaaatcatattgccagaaataattcaatcattgttgatgtatgccaggggcagtacaagtccactttggtttgcccagtctgtgggaaggtttcagtgacttttgacccgttcatgtatctttccttgcccttacaatttgcctcaacccggagcgtgactgccgtggtgttttcttgtgatggtagtgttccaccaacaccattcactgtgaatgtaccaaaacaaggtaggtgcagagatctattacaagcccttggtgctgcatgctcacttaaaaatggggagaaacttctaattgctgagatacggaatcataagatctaccgttttattgatgatccagtgcttcagctgtctacaataagtgatgatgatcatctggcagtttataagctcccaaagttggaaaagagggtgaattacattcagtttgtgcatcgtcatgaagatctggaccatggaaacaataacagcttgacatcttggaaaccgtacggtgttcctcttcttgcacaaatttctcgcaatgaaattgtcacgggttttgatatccatgagttggtccataaaatgcttgtgcccgtgctaaggaatccggactctctgcatttggctgttcaaagttctgtttccacaagaactcatagttatcataccgacagcagcaaatgtcagcttctgttggttgatgatagcaacacagtcattgaaaaatcaaatgatgctatcaggatcccacaatcttcacttgcaactgtattttttatcaactggcccaaggcagatctgaaaaagatagacactcatcatttagagtaccttccagaggtgtttatgtatgctccgcctgcgaagagaacccgtggtgaagctctgtcactctatgcatgcttggatgctttcttgagagaagaacctcttgtacctgaagacatgtggtactgtccaaggtgcaaggagcaaagacaagctagcaaaaagttggatttgtggagacttcctgaagtactagtcatacatctaaagagattttcatttagtaggtcaacaaaacaaaaactagaaacttttgttaattttccaatacatgacttggatttgacaaattacattgccaataagaagacttcagagcgccagatctatgagctgtatgctgtgagcaatcattatggcaacatggcaagtggacattatactgcacacattaagcttgtggatgagaatcggtggtacaacttcgatgatagccatgttgcttccattgatgaagatgaggtgaagactgctgcagcttatgtgctattctatagaagggtcagagaacaagacatagcaaggggaactagtaatggatctcagttatatgcaaaaagaagtcacggatatagccatagtcattgccaggagtatatggcttgctggaaaaaatgctcatcacgtgcagtcaatgcaccgttgtccagttgtcacagaagatatttcgtgcagtgctggtacaagatgggaattttgtatgaggtgagttgaaggagtaattgactctttatgataactgggtagcttcaacaggaacgccggggcttggtggcattttgttcgtctgttttcttctagaagagaaacaaggggaggcaagaaaacatttaggaaacaccttttcgttaatttgattttttatttccatttttagatttagctagtctgtacactgttgttggaaatgggtccgctgttgttggtcgatgcttgtggtggccaataatactacacccaactataccaggctctgcaatggcgaatcatggtgcacattatggtgctctgttgcgggaagaattgtagctgatgttgtacttatatactggcaaaaaggccccagaaatgtaaaaatgtatcgatatgctgacatcttaaaccctattttggattcgtgctctttcctatggatgaaggtgtgcgccatttaggggttgtttgtttgaagaatcaatccattctaggtaggtgattatcacgagaccatttcataaatttggtgaaatgaattcatttt

SEQ ID NO: 9599 - DNA, 3731 bp, Zea Mays
acaaagcgccagacagcctcctctcctccggccggaaaaaagcaacctcgcagatccgcggccccccctcctccgctcacaggttcaccgcatcgacgccactaccgtttccactgccgcctcgaccccgctccaccaattcttggtcaagccgctccagctaagagacggagagccctgcggaaaggggagacgaggggagggtgcaaaccctagccgtagaccgcgggctcctcctcctcgccggcggcggcggggatggagatggtggtggcggcgccggcgctccccgccgaagtggagagggctctcatccgggacataaccgtcgcggctgatgcccacgccaaggagggagacactttcttcctcatcaccaccaggtggtggcaaagttggattgattacctcattcaagatttgactggtgcaacaagtaatggttctcatcatcatgagtttggttcaaaaactcctagaaggccaggagctattgacaataccgatttaattgatgatgtgccacttgaagtctccaacatggagattgagatacatgataacttggttgagggtcgggattacatactgcttcctcagcaagtttgggaaaagttgcatggttggtatggtggaggaccaacattaccaagaaaggcaatcaatactggcttttctcaaactgatttggcgatagaagtttatcctctacgactgcagttaattctaatgtcaagaggagagcgaacctttataaggataagcaagaagggtacagttggccaactccataaaatggcctgtaaggtttttgacttggcaccagatgaggtatgcatttgggactattatggtcgaacaaagcattcattgatggatagcttggacaaaacccttgatgatgccaacattcagatggatcaaaacattctagttgaggtaaccactgatgcaagtggtagtctggatggtttggttaagcgaaacaatttttttgagagtgatgctccgaaatcaggattgccagatgagaattttgcagccaacaactatgcttccagaagctatagctctagtctgacaccaagcatctacctgcgatcacccaatggtgatctggataatgtgcatggttctagtggcatgatcacgaggggatcgcccttaggtcttacagggctacttaatcttggaaatacatgctatatgaacagtgccatacagtgtcttgtgcacacaccacagtttactaaatacttctgtgaagattatcatcgcgaaataaatcggcaaaatccactgggtaatgtgggtgaacttgcattagcttttggtgagctattgagaaaactctgggctcctggaggacgtgcccctgtttcacctagaccattcaaaatgaagctttctcggtttgcatctcagttcagtggatacaaccagcatgattcacaggagctgttggcgttcctattggatggactccatgaagatttgaatcgtgtgaagcatagaccttacataaattcaggggatgctgatggaagatcagatgaagaagttgcagatgaatattgggcaaatcatattgccagaaataattcaatcattgttgatgtatgccagaacacaggctgcggctctagaacaccagcagcagctccagaacactggcgacgtctccaaaacactagcgacgagatgagctcctcatctcaaggggcagtacaagtccactttggtttgcccagtctgtgggaaggtttcagtgacttttgacccgttcatgtatctttccttgcccttacaatttgcctcaacccggagcgtgactgccgtggtgttttcttgtgatggtagtgttccaccaacaccattcactgtgaatgtaccaaaacaaggtaggtgcagagatctattacaagcccttggtgctgcatgctcacttaaaaatggggagaaacttctaattgctgagatacggaatcataagatctaccgttttattgatgatccagtgcttcagctgtctacaataagtgatgatgatcatctggcagtttataagctcccaaagttggaaaagagggtgaattacattcagtttgtgcatcgtcatgaagatctggaccatggaaacaataacagcttgacatcttggaaaccgtacggtgttcctcttcttgcacaaatttctcgcaatgaaattgtcacgggttttgatatccatgagttggtccataaaatgcttgtgcccgtgctaaggaatccggactctctgcatttggctgttcaaagttctgtttccacaagaactcatagttatcataccgacagcagcaaatgtcagcttctgttggttgatgatagcaacacagtcattgaaaaatcaaatgatgctatcaggatcccacaatcttcacttgcaactgtattttttatcaactggcccaaggcagatctgaaaaagatagacactcatcatttagagtaccttccagaggtgtttatgtatgctccgcctgcgaagagaacccgtggtgaagctctgtcactctatgcatgcttggatgctttcttgagagaagaacctcttgtacctgaagacatgtggtactgtccaaggtgcaaggagcaaagacaagctagcaaaaagttggatttgtggagacttcctgaagtactagtcatacatctaaagagattttcatttagtaggtcaacaaaacaaaaactagaaacttttgttaattttccaatacatgacttggatttgacaaattacattgccaataagaagacttcagagcgccagatctatgagctgtatgctgtgagcaatcattatggcaacatggcaagtggacattatactgcacacattaagcttgtggatgagaatcggtggtacaacttcgatgatagccatgttgcttccattgatgaagatgaggtgaagactgctgcagcttatgtgctattctatagaagggtcagagaacaagacatagcaaggggaactagtaatggatctcagttatatgcaaaaagaagtcacggatatagccatagtcattgccaggagtatatggcttgctggaaaaaatgctcatcacgtgcagtcaatgcaccgttgtccagttgtcacagaagatatttcgtgcagtgctggtacaagatgggaattttgtatgaggtgagttgaaggagtaattgactctttatgataactgggtagcttcaacaggaacgccggggcttggtggcattttgttcgtctgttttcttctagaagagaaacaaggggaggcaagaaaacatttaggaaacaccttttcgttaatttgattttttatttccatttttagatttagctagtctgtacactgttgttggaaatgggtccgctgttgttggtcgatgcttgtggtggccaataatactacacccaactataccaggctctgcaatggcgaatcatggtgcacattatggtgctctgttgcgggaagaattgtagctgatgttgtacttatatactggcaaaaaggccccagaaatgtaaaaatgtatcgatatgctgacatcttaaaccctattttggattcgtgctctttcctatggatgaaggtgtgcgccatttaggggttgtttgtttgaagaatcaatccattctaggtaggtgattatcacgagaccatttcataaatttggtgaaatgaattcatttt

SEQ ID NO: 9600 - DNA, 1648 bp, Zea Mays
atgacggaggcggagaggagaacccatcgatttggtggtgtaagtgggagctcattgaggccggctcatattaaagagctcgaagaagtgaagctgctcaagaaactgtctcaccccaacattgttagatatcttgtgactgttcgtgaggaagacacactaaacattttgctagaatttgttcctggagggcctattaattcagtcacttttggggaagctcggttcattcccagagcatggcatgctcaaagtggcccaatatctcgcctacctcttgttacaatttcatattctagcaaccttttgcgagatgttcctgttcgtcagcctctttggcacaacccgccgccgccgcaggcgcaggcgcaggtggacatggatctaccaagcctcgccgtcgtgctgcgcgccgcgctcagccacgttcctgaggagcgcaaggcggcagaagagagcctcaaccagttccagtacacaccacagcatttggtgagattgttacagatcattgttgatggaagttgtgatatggctgtaagacaggttgcaagcattcatttcaagaattttattgcgaagaactggtcgcctaatgatccagatgagtccccgaaagttttagaaagcgacaaggccatggttcgtgaaaacatacttggttttattgttcaagtgccccctttgttaagcttggagaaagtatcaaaacaatagttcattctgattatcctgagcagtggccaagtctccttcattgggtttcacacaatttagacttgcagaaccaaatttttggtgctttatatgtcctgagggttcttgccagaaaatatgagttcaagtctgaggatgagaggataccattatttcacatcgtagaggagacatttcctcgtctactaagcatttttagcaaattggttcagattgtcaatccaccaattgaagttgctgatttaatcaagttgatatgtaaaatattttggtcttctatttatttggagattccgaagcagctatttgatccaaatgtcttcaatgcatggatggttctgtttataaacttgttggagagaccagttcccgtggaaggccaaccaatagatcctgagattaggaaatcttgggcctggtggaaagttaagaaatggactatccatatcctgaaccgtctctataccagatttggtgatctgaagcttcagaaaccagagagtaaagcttttgctcaaatgtttcagaagacttattcagggaaaatattggcatgtcacatgcagctgctgaatgcaattcgtggtggagactacttgccagatagggttatcaatcttgttctacagtatctgactaacagtgttacaaagaacagtatgtatcagatgatgcagcctcagatttgatatacttctttttgagataatttttcctcttatgtgcttcaatgacaatgaccaaaagttatgggatgaagatcctcacgaattatgttcgcaagggctatgatattatcgaagatttgtacagtccccgaacagctgctatggacttcgtgagtgaattggttagaaagcgagggaaaaacaatctccaaaagttcatccatttcattgttgatatatttaggagcatcattgatttatag

SEQ ID NO: 9601 - DNA, 2395 bp, Zea Mays
gtaatatttgtacactcagctatggtttctattttgtgcaatatgccaatcgttggcaagatggagctattgtagccaacaatcctacgatctttgccattagagaagcacaacttttgtggccagatacacgaatagattgtctagtttcgataggatgtggctcagttccaactaagagtcgtagaggtggatggcgctacttggacacagggcaagtgttaatagaaagtgcatgctcagtggagagagttgaagaaactttggatacactgataccaatgcttcctgaaatgcaatatttccgctttaatccagtggatgaacgatgtggtatggaattagatgaaactgatcctgctatctggcttaagttggaagctgcaactgatgagtacattcagaagaattttctggctttcaagaatctttgtgagcttctggtcccaaggtaccaagaggaagaaaagtcatctgatatttacaaatccctttcattttcaaggctgacatcactaaatcaaggtttcagcgaaagtaatcctaccttaggatggaggcgtgtggttttacttgtcgaggcttcctttagtcctgatttcgggaagaaaataaatcatgcacgctcccttgaatctttctgctcccagaatggtattaggttagctctaatgaatagtgcttctgggtttgggaaaccagccactgcacttcctaccccgataacttctcccttgtttactggaagtttcccatctagtccacttctatatagtccagatggcactcaacggatcggtcgaattgacctagttccaccacttagtttggatggccacccaactacaaagtcctcaccaccaacatcaccattgaagtcaaggcagccatcagcacatgttcggtcattgtatgataaactgcagaatatgcctcaagttggtgtaatacacctggctcttcaaaatgattcaaccggttcagtattgagttggcagaatgatgtatttgtggttgctgaacccggagaacttgcagacagatttctgcaatctgtcaaaactagcttgtcaaccttgttgcgtgggcgtaatagaaagggtgcatattccttgtccaagatttcatgtttatctgagctggttgctgaatgtccatcttttgaaatcggtgggatacaccaccgctatataggtcgacaaacacaagtaatggaagataaccaagaaattggcgcatatatgtttaggaggacagtgcctgctgttcacatggcacctgaagatgttcgatggatggttggagcatggagggagagaatcattgtatgcagcggtaagtatggcctcgctcatggcctggtgaaggcattcatggattgtggcgccaaagcagtcatctcatcgtccatcgagcctccggattcccagacaatagtctatcatgggatggatgtcaatggaagcctagagaatgggaagtttgtcatcggggatgaagaagccgatgaatcggaacctgaacctgttagccctgtaagtgactgggaggacagcgacgtggagaaaggtggcaaccatgacatggatgatgaggagtacctggctcagttcatgtgcctgatgtacgataaattgttccgtgagggtgtgactgtggatacagctctgcagcaagctctccgctcgcatcccaagttaaagtacagctgccacttacctcacgttttgtagttagggacattgacaaaccatacaggagtatagcaaaacgggcatggacaacaggaaatgaataaggattgggtggattcatagtggggttatagaggtttatatcgtgttcgttgtgcaggcgtagtgacagagggtacccccttactgaatctttgggcgagaaagcctatgtaaacctgtgtgctcatgagcagagtagttaagctgacgaataaaagcatgatgaagggcattgtaatctggatgtgcatttttgtttcagctaggagaatggacattcgcaatgttttggtgtctcatgacgttcagttgctagcttgcaggcttgcggcgtacagcctgtagttaactatcttcagagacccggtttcatgtatacactatacaggctggcaccttatgctagaaacctgaatgtgtgtactgtagaagttccccattttaccacagtttatgcgatgctggtagtggcatgaactttgctagcccatatgttctgtttaaggccccgtgctgtcttgaaacaaatctctgcattaataaacagtaaagacatcaagtgctaagctggcgattgagcggcggctctgattttcagtaattggcagctcttaacgaagcatgaccttattgagcaatttggcaggtcgcagtacacc

SEQ ID NO: 9602 - DNA, 3834 bp, Zea Mays
gtttccgatttcgccaaatatttataatactagtgctattatagtattccgtgctttctttgaaaactgttttttgcgcttcgtaatcgtctctgcttcgcttctccgctccgcctgtcgccaccaccaccaccaactcgccggagaactgtcccgacgactgcgcgcgcggagagctgtgggggcgcgggagagggaggtagtactgggaatggaggaggagtcgaggcttagcggcgctttctcgctccatctctagggtttggttgctagtctgccccggctgggggcgtgcgcgccggcctggagctggactggaggtagcagccagcgtccggctccccgttgcaagcattaagctgcgcggctggagtgccccccccctttggccccgcctccgcgtctttcaactctggtgaaggtgctgctgttgtggcctgcgccatggaaccgtttccccagcttgcggctgcgtccacaggttgcgtgcacgcgtcgggctccggactgtgacgccgacgaggggatctcaggcgcccaactggtccggggtgaggcgcagcgcccgcaggatgccaaccgagcagaggcgctacatgcccccggcccattttcttccggcggagtcggaatcgtcctccttccctgacgagcttcgcttgcgtcctgagaggcaagttggacttttgaagcagggttgctttcctgagcatgctggcagatttgcttgttctcccctgcaaaagctcaagtgtattggcgcaacagtagtggatcagctagatattatgcagccacacaagctaatggaccagaaagtgccatttagccttgatgacaagttgttggatgttaagctgccaccatcttcctggagagaggatcaggatccagcaaaccaactcgattcttttcccaagccattggtttcacctctagaaggtagaaggggaagtgtaaatgggacccaatatgaaagtggacttttctctagctcccttccagaattttttgacaagaaaataagattaactccaaagaacagagttgttggtcatctggttggaaaagttaaccatgctgatgatgaaccatttgagttgacaaaggaaatcgaggcccaaataattgggcaacctgctccctgatgacgacgacttattgtcaagtgtttgtggtgatattgggtataataccaatgcgaataatcaggatgagattgatgatgatattttttgtactggaggtggaatggaattggaagcagatggaaatagcaaattgttaaactttaatggtggagccagtcagactaggtcaattgtccaactcaatggtgagcgatcctcgagaatcctttttgtcggaaacattgatagcaacgtcgaggattctgaattgaaattcatgtttgagcaatatggagacatgcagacacttaatgcttcttgcaaacatcatggttttgtgatggtatcttactatgatataagatcggcagaaaatgctatgagggcccttcaaagcaagccactcagatgtaggaaacttgacatacgttactcgagtccaaaggactatcctttggataaagatatcaacctgtccatggtaatagttaatcttgaagcttcgataactaatgatgacctgcaccagatatttggtgtctttggtgaaatcaaggaggagtgaaatttcaggaaataaaaacaaattggagcctagctgtctgggtggtactgaacgtttgatgcagcagatgtctcgtgcattggaacatgaacagtttggtgcatgtaaactcggaagcccaaacagtccttcaacatgctttggttctgtcaatatggcacccatcagatccactagcacagaaagtggaactgttcaggttttatgttctagagttcagacaccgataaaccaattccgagagggaaggaattttctggatcttccctcaactaccataagtagatcctctcctgttggaattacacctgcaggattacaaagcggccaccacgctcttgatgagcacatccattcacttggaaagatgaatgtacagaacaagggacgaatggattgtggatttcaagagagtactgctttccatcctcattctctccctgacttcaatgacagactaagaaatggtatctcctataactgctcaatacctcccatcggtgttaagagcaatgctagagctgctgaagcaatggatgtcaggcacatttacaaaggaggttgtgggcatctcagcaatcaatcttctgctcatactgaagcacttgggttttcaagaactggtagctgccctctctatggtcaccaactagcatggagtaattctaataacctacaccagcagccttcttctcccatgatatggcctagcatgggcccatttaccaataatatgccatctcgccagttgatgcaagtgcatggaatttcaagagcaccattgcgcatgcttgaaaataatatccctatgaatcaccaacatgtgggatctgccccagctgtcaatccatcaatttgggatagacgacatggatatgcaggggagatgatggaaacaccaggattccacccagggagtgctggaagcatgggtttccctggcagcacacatctgcatcagttggagaccaatggtatgtttcctcacaatggagggactttcatggacccagctatgtctcctgtgcacatgagtgctcgctctcctcagcagagggggcatattttccatcgaaggagcaatgtggctcctattccatcctctttcgattctgctggtgaacggatgcggagccgaagaaatgactcgaatgtaaatcaatctgacaacaaaaggctgtttgagcttgacattgagcgtatagtccggggcgaggactcccggactacactgatgataaagaatatcccaaacaagtacacatcaaagatgcttctggcagctattgatgaaagtcaccggggaacttatgattttatctacctgccaattgactttaagacatttcatgggaaaaggtgggagaaattcaacagtgagaaagtggcctcacttgcttatgctagaatccaaggaaaatcagctctagttgctcatttccagaactcaagtttgatgaatgaggataaacgctgccgccctatactcttccactctgatggtccgaatgcaggagatcaagaaccattccctgtgggatcaaatgtccgttccaggcctggaaggtccaggattttgagttgggaacaaaaccaccaggacattgtgtctgatcataccaaaggtggaactccgagcagggctggtggcactccaggttacatcgccacggatactgatcatacggctgttgattgacgaacttgcgacaacacccgacattctgacaattgcaatccagttttttttttttttgaaattgcatcctctcctacctcttttttccttttgttatgttgtatctatatctacttccgcgtgatattttggcaccggaggctctagacggctgcagatttggtcgctgacaagtagcgaggagatggatgttgtgccgtcagtttctccttactttggcacagacccctcagcgggattttgttggacagtttgaccccctttcaccaggaaagatatccatatttgggggagtttccctattgctgtttggcagtgctgtcatgaacattttcctaatgctgtggatgtgaaatttcagaatgatcaaatcgaatgacggatgaatgagagccaataatatttttttacgctcaagcaatctttattcttaacaattc

SEQ ID NO: 9603 - DNA, 3891 bp, Zea Mays
gtttccgatttcgccaaatatttataatactagtgctattatagtattccgtgctttctttgaaaactgttttttgcgcttcgtaatcgtctctgcttcgcttctccgctccgcctgtcgccaccaccaccaccaactcgccggagaactgtcccgacgactgcgcgcgcggagagctgtgggggcgcgggagagggaggtagtactgggaatggaggaggagtcgaggcttagcggcgctttctcgctccatctctagggtttggttgctagtctgccccggctgggggcgtgcgcgccggcctggagctggactggaggtagcagccagcgtccggctccccgttgcaagcattaagctgcgcggctggagtgccccccccctttggccccgcctccgcgtctttcaactctggtgaaggtgctgctgttgtggcctgcgccatggaaccgtttccccagcttgcggctgcgtccacaggttgcgtgcacgcgtcgggctccggactgtgacgccgacgaggggatctcaggcgcccaactggtccggggtgaggcgcagcgcccgcaggatgccaaccgagcagaggcgctacatgcccccggcccattttcttccggcggagtcggaatcgtcctccttccctgacgagcttcgcttgcgtcctgagaggcaagttggacttttgaagcagggttgctttcctgagcatgctggcagatttgcttgttctcccctgcaaaagctcaagtgtattggcgcaacagtagtggatcagctagatattatgcagccacacaagctaatggaccagaaagtgccatttagccttgatgacaagttgttggatgttaagctgccaccatcttcctggagagaggatcaggatccagcaaaccaactcgattcttttcccaagccattggtttcacctctagaaggtagaaggggaagtgtaaatgggacccaatatgaaagtggacttttctctagctcccttccagaattttttgacaagaaaataagattaactccaaagaacagagttgttggtcatctggttggaaaagttaaccatgctgatgatgaaccatttgagttgacaaaggaaatcgaggcccaaataattgggcaacctgctccctgatgacgacgacttattgtcaagtgtttgtggtgatattgggtataataccaatgcgaataatcaggatgagattgatgatgatattttttgtactggaggtggaatggaattggaagcagatggaaatagcaaattgttaaactttaatggtggagccagtcagactaggtcaattgtccaactcaatggtgagcgatcctcgagaatcctttttgtcggaaacattgatagcaacgtcgaggattctgaattgaaattcatgtttgagcaatatggagacatgcagacacttaatgcttcttgcaaacatcatggttttgtgatggtatcttactatgatataagatcggcagaaaatgctatgagggcccttcaaagcaagccactcagatgtaggaaacttgacatacgttactcgagtccaaaggactatcctttggataaagatatcaacctgtccatggtaatagttaatcttgaagcttcgataactaatgatgacctgcaccagatatttggtgtctttggtgaaatcaaggagattcaccctacttcagataatgaccattacaaatcgatagaattttttgatgtcagagcagctgaagctgcacaatatgccttaaacaggagtgaaatttcaggaaataaaaacaaattggagcctagctgtctgggtggtactgaacgtttgatgcagcagatgtctcgtgcattggaacatgaacagtttggtgcatgtaaactcggaagcccaaacagtccttcaacatgctttgatccactagcacagaaagtggaactgttcaggttttatgttctagagttcagacaccgataaaccaattccgagagggaaggaattttctggatcttccctcaactaccataagtagatcctctcctgttggaattacacctgcaggattacaaagcggccaccacgctcttgatgagcacatccattcacttggaaagatgaatgtacagaacaagggacgaatggattgtggatttcaagagagtactgctttccatcctcattctctccctgacttcaatgacagactaagaaatggcacatttacaaaggaggttgtgggcatctcagcaatcaatcttctgctcatactgaagcacttgggttttcaagaactggtagctgccctctctatggtcaccaactagcatggagtaattctaataacctacaccagcagccttcttctcccatgatatggcctagcatgggcccatttaccaataatatgccatctcgccagttgatgcaagtgcatggaatttcaagagcaccattgcgcatgcttgaaaataatatccctatgaatcaccaacatgtgggatctgccccagctgtcaatccatcaatttgggatagacgacatggatatgcaggggagatgatggaaacaccaggattccacccagggagtgctggaagcatgggtttccctggcagcacacatctgcatcagttggagaccaatggtatgtttcctcacaatggagggactttcatggacccagctatgtctcctgtgcacatgagtgctcgctctcctcagcagagggggcatattttccatcgaaggagcaatgtggctcctattccatcctctttcgattctgctggtgaacggatgcggagccgaagaaatgactcgaatgtaaatcaatctgacaacaaaaggctgtttgagcttgacattgagcgtatagtccggggcgaggactcccggactacactgatgataaagaatatcccaaacaagtacacatcaaagatgcttctggcagctattgatgaaagtcaccggggaacttatgattttatctacctgccaattgactttaagaataagtgcaatgttggttatgcattcatcaacatgatcaatcctgacaatattgttccattttataagacatttcatgggaaaaggtgggagaaattcaacagtgagaaagtggcctcacttgcttatgctagaatccaaggaaaatcagctctagttgctcatttccagaactcaagtttgatgaatgaggataaacgctgccgccctatactcttccactctgatggtccgaatgcaggagatcaagaaccattccctgtgggatcaaatgtccgttccaggcctggaaggtccaggattttgagttgggaacaaaaccaccaggacattgtgtctgatcataccaaaggtggaactccgagcagggctggtggcactccaggttacatcgccacggatactgatcatacggctgttgattgacgaacttgcgacaacacccgacattctgacaattgcaatccagttttttttttttttgaaattgcatcctctcctacctcttttttccttttgttatgttgtatctatatctacttccgcgtgatattttggcaccggaggctctagacggctgcagatttggtcgctgacaagtagcgaggagatggatgttgtgccgtcagtttctccttactttggcacagacccctcagcgggattttgttggacagtttgaccccctttcaccaggaaagatatccatatttgggggagtttccctattgctgtttggcagtgctgtcatgaacattttcctaatgctgtggatgtgaaatttcagaatgatcaaatcgaatgacggatgaatgagagccaataatatttttttacgctcaagcaatctttattcttaacaattc

SEQ ID NO: 9604 - DNA, 3923 bp, Zea Mays
gtttccgatttcgccaaatatttataatactagtgctattatagtattccgtgctttctttgaaaactgttttttgcgcttcgtaatcgtctctgcttcgcttctccgctccgcctgtcgccaccaccaccaccaactcgccggagaactgtcccgacgactgcgcgcgcggagagctgtgggggcgcgggagagggaggtagtactgggaatggaggaggagtcgaggcttagcggcgctttctcgctccatctctagggtttggttgctagtctgccccggctgggggcgtgcgcgccggcctggagctggactggaggtagcagccagcgtccggctccccgttgcaagcattaagctgcgcggctggagtgccccccccctttggccccgcctccgcgtctttcaactctggtgaaggtgctgctgttgtggcctgcgccatggaaccgtttccccagcttgcggctgcgtccacaggttgcgtgcacgcgtcgggctccggactgtgacgccgacgaggggatctcaggcgcccaactggtccggggtgaggcgcagcgcccgcaggatgccaaccgagcagaggcgctacatgcccccggcccattttcttccggcggagtcggaatcgtcctccttccctgacgagcttcgcttgcgtcctgagaggcaagttggacttttgaagcagggttgctttcctgagcatgctggcagatttgcttgttctcccctgcaaaagctcaagtgtattggcgcaacagtagtggatcagctagatattatgcagccacacaagctaatggaccagaaagtgccatttagccttgatgacaagttgttggatgttaagctgccaccatcttcctggagagaggatcaggatccagcaaaccaactcgattcttttcccaagccattggtttcacctctagaaggtagaaggggaagtgtaaatgggacccaatatgaaagtggacttttctctagctcccttccagaattttttgacaagaaaataagattaactccaaagaacagagttgttggtcatctggttggaaaagttaaccatgctgatgatgaaccatttgagttgacaaaggaaatcgaggcccaaataattgggcaacctgctccctgatgacgacgacttattgtcaagtgtttgtggtgatattgggtataataccaatgcgaataatcaggatgagattgatgatgatattttttgtactggaggtggaatggaattggaagcagatggaaatagcaaattgttaaactttaatggtggagccagtcagactaggtcaattgtccaactcaatggtgagcgatcctcgagaatcctttttgtcggaaacattgatagcaacgtcgaggattctgaattgaaattcatgtttgagcaatatggagacatgcagacacttaatgcttcttgcaaacatcatggttttgtgatggtatcttactatgatataagatcggcagaaaatgctatgagggcccttcaaagcaagccactcagatgtaggaaacttgacatacgttactcgagtccaaaggactatcctttggataaagatatcaacctgtccatggtaatagttaatcttgaagcttcgataactaatgatgacctgcaccagatatttggtgtctttggtgaaatcaaggagattcaccctacttcagataatgaccattacaaatcgatagaattttttgatgtcagagcagctgaagctgcacaatatgccttaaacaggagtgaaatttcaggaaataaaaacaaattggagcctagctgtctgggtggtactgaacgtttgatgcagcagatgtctcgtgcattggaacatgaacagtttggtgcatgtaaactcggaagcccaaacagtccttcaacatgctttggttctgtcaatatggcacccatcagatccactagcacagaaagtggaactgttcaggttttatgttctagagttcagacaccgataaaccaattccgagagggaaggaattttctggatcttccctcaactaccataagtagatcctctcctgttggaattacacctgcaggattacaaagcggccaccacgctcttgatgagcacatccattcacttggaaagatgaatgtacagaacaagggacgaatggattgtggatttcaagagagtactgctttccatcctcattctctccctgacttcaatgacagactaagaaatggtatctcctataactgctcaatacctcccatcggtgttaagagcaatgctagagctgctgaagcaatggatgtcaggcacatttacaaaggaggttgtgggcatctcagcaatcaatcttctgctcatactgaagcacttgggttttcaagaactggtagctgccctctctatggtcaccaactagcatggagtaattctaataacctacaccagcagccttcttctcccatgatatggcctagcatgggcccatttaccaataatatgccatctcgccagttgatgcaagtgcatggaatttcaagagcaccattgcgcatgcttgaaaataatatccctatgaatcaccaacatgtgggatctgccccagctgtcaatccatcaatttgggatagacgacatggatatgcaggggagatgatggaaacaccaggattccacccagggagtgctggaagcatgggtttccctggcagcacacatctgcatcagttggagaccaatggtatgtttcctcacaatggagggactttcatggacccagctatgtctcctgtgcacatgagtgctcgctctcctcagcagagggggcatattttccatcgaaggagcaatgtggctcctattccatcctctttcgattctgctggtgaacggatgcggagccgaagaaatgactcgaatgtaaatcaatctgacaacaaaaggctgtttgagcttgacattgagcgtatagtccggggcgaggactcccggactacactgatgataaagaatatcccaaacaagtacacatcaaagatgcttctggcagctattgatgaaagtcaccggggaacttatgattttatctacctgccaattgactttaagacatttcatgggaaaaggtgggagaaattcaacagtgagaaagtggcctcacttgcttatgctagaatccaaggaaaatcagctctagttgctcatttccagaactcaagtttgatgaatgaggataaacgctgccgccctatactcttccactctgatggtccgaatgcaggagatcaagaaccattccctgtgggatcaaatgtccgttccaggcctggaaggtccaggattttgagttgggaacaaaaccaccaggacattgtgtctgatcataccaaaggtggaactccgagcagggctggtggcactccaggttacatcgccacggatactgatcatacggctgttgattgacgaacttgcgacaacacccgacattctgacaattgcaatccagttttttttttttttgaaattgcatcctctcctacctcttttttccttttgttatgttgtatctatatctacttccgcgtgatattttggcaccggaggctctagacggctgcagatttggtcgctgacaagtagcgaggagatggatgttgtgccgtcagtttctccttactttggcacagacccctcagcgggattttgttggacagtttgaccccctttcaccaggaaagatatccatatttgggggagtttccctattgctgtttggcagtgctgtcatgaacattttcctaatgctgtggatgtgaaatttcagaatgatcaaatcgaatgacggatgaatgagagccaataatatttttttacgctcaagcaatctttattcttaacaattc

SEQ ID NO: 9605 - DNA, 3965 bp, Zea Mays
gtttccgatttcgccaaatatttataatactagtgctattatagtattccgtgctttctttgaaaactgttttttgcgcttcgtaatcgtctctgcttcgcttctccgctccgcctgtcgccaccaccaccaccaactcgccggagaactgtcccgacgactgcgcgcgcggagagctgtgggggcgcgggagagggaggtagtactgggaatggaggaggagtcgaggcttagcggcgctttctcgctccatctctagggtttggttgctagtctgccccggctgggggcgtgcgcgccggcctggagctggactggaggtagcagccagcgtccggctccccgttgcaagcattaagctgcgcggctggagtgccccccccctttggccccgcctccgcgtctttcaactctggtgaaggtgctgctgttgtggcctgcgccatggaaccgtttccccagcttgcggctgcgtccacaggttgcgtgcacgcgtcgggctccggactgtgacgccgacgaggggatctcaggcgcccaactggtccggggtgaggcgcagcgcccgcaggatgccaaccgagcagaggcgctacatgcccccggcccattttcttccggcggagtcggaatcgtcctccttccctgacgagcttcgcttgcgtcctgagaggcaagttggacttttgaagcagggttgctttcctgagcatgctggcagatttgcttgttctcccctgcaaaagctcaagtgtattggcgcaacagtagtggatcagctagatattatgcagccacacaagctaatggaccagaaagtgccatttagccttgatgacaagttgttggatgttaagctgccaccatcttcctggagagaggatcaggatccagcaaaccaactcgattcttttcccaagccattggtttcacctctagaaggtagaaggggaagtgtaaatgggacccaatatgaaagtggacttttctctagctcccttccagaattttttgacaagaaaataagattaactccaaagaacagagttgttggtcatctggttggaaaagttaaccatgctgatgatgaaccatttgagttgacaaaggaaatcgaggcccaaataattgggcaacctgctccctgatgacgacgacttattgtcaagtgtttgtggtgatattgggtataataccaatgcgaataatcaggatgagattgatgatgatattttttgtactggaggtggaatggaattggaagcagatggaaatagcaaattgttaaactttaatggtggagccagtcagactaggtcaattgtccaactcaatggtgagcgatcctcgagaatcctttttgtcggaaacattgatagcaacgtcgaggattctgaattgaaattcatgtttgagcaatatggagacatgcagacacttaatgcttcttgcaaacatcatggttttgtgatggtatcttactatgatataagatcggcagaaaatgctatgagggcccttcaaagcaagccactcagatgtaggaaacttgacatacgttactcgagtccaaaggactatcctttggataaagatatcaacctgtccatggtaatagttaatcttgaagcttcgataactaatgatgacctgcaccagatatttggtgtctttggtgaaatcaaggagattcaccctacttcagataatgaccattacaaatcgatagaattttttgatgtcagagcagctgaagctgcacaatatgccttaaacaggagtgaaatttcaggaaataaaaacaaattggagcctagctgtctgggtggtactgaacgtttgatgcagcagatgtctcgtgcattggaacatgaacagtttggtgcatgcataatgcaaggttctgtcaatatggcacccatcagatccactagcacagaaagtggaactgttcaggttttatgttctagagttcagacaccgataaaccaattccgagagggaaggaattttctggatcttccctcaactaccataagtagatcctctcctgttggaattacacctgcaggattacaaagcggccaccacgctcttgatgagcacatccattcacttggaaagatgaatgtacagaacaagggacgaatggattgtggatttcaagagagtactgctttccatcctcattctctccctgacttcaatgacagactaagaaatggtatctcctataactgctcaatacctcccatcggtgttaagagcaatgctagagctgctgaagcaatggatgtcaggcacatttacaaaggaggttgtgggcatctcagcaatcaatcttctgctcatactgaagcacttgggttttcaagaactggtagctgccctctctatggtcaccaactagcatggagtaattctaataacctacaccagcagccttcttctcccatgatatggcctagcatgggcccatttaccaataatatgccatctcgccagttgatgcaagtgcatggaatttcaagagcaccattgcgcatgcttgaaaataatatccctatgaatcaccaacatgtgggatctgccccagctgtcaatccatcaatttgggatagacgacatggatatgcaggggagatgatggaaacaccaggattccacccagggagtgctggaagcatgggtttccctggcagcacacatctgcatcagttggagaccaatggtatgtttcctcacaatggagggactttcatggacccagctatgtctcctgtgcacatgagtgctcgctctcctcagcagagggggcatattttccatcgaaggagcaatgtggctcctattccatcctctttcgattctgctggtgaacggatgcggagccgaagaaatgactcgaatgtaaatcaatctgacaacaaaaggctgtttgagcttgacattgagcgtatagtccggggcgaggactcccggactacactgatgataaagaatatcccaaacaagtacacatcaaagatgcttctggcagctattgatgaaagtcaccggggaacttatgattttatctacctgccaattgactttaagaataagtgcaatgttggttatgcattcatcaacatgatcaatcctgacaatattgttccattttataagacatttcatgggaaaaggtgggagaaattcaacagtgagaaagtggcctcacttgcttatgctagaatccaaggaaaatcagctctagttgctcatttccagaactcaagtttgatgaatgaggataaacgctgccgccctatactcttccactctgatggtccgaatgcaggagatcaagaaccattccctgtgggatcaaatgtccgttccaggcctggaaggtccaggattttgagttgggaacaaaaccaccaggacattgtgtctgatcataccaaaggtggaactccgagcagggctggtggcactccaggttacatcgccacggatactgatcatacggctgttgattgacgaacttgcgacaacacccgacattctgacaattgcaatccagttttttttttttttgaaattgcatcctctcctacctcttttttccttttgttatgttgtatctatatctacttccgcgtgatattttggcaccggaggctctagacggctgcagatttggtcgctgacaagtagcgaggagatggatgttgtgccgtcagtttctccttactttggcacagacccctcagcgggattttgttggacagtttgaccccctttcaccaggaaagatatccatatttgggggagtttccctattgctgtttggcagtgctgtcatgaacattttcctaatgctgtggatgtgaaatttcagaatgatcaaatcgaatgacggatgaatgagagccaataatatttttttacgctcaagcaatctttattcttaacaattc

SEQ ID NO: 9606 - DNA, 3807 bp, Zea Mays
gaagacgaggactggcacgcggccgcgacggccggaaggacgcagcagccgccgccgccgctcacccacgacgacaaccgcagcttccttcggatgctgcgtgacatgaaagagaagctgggcgtggacgcgcccaaggtggaggtgcgcttcgagaggcttaccgtggaggcggacgtccgcgtcggccgccgcgccgtcccgacgctgctcaacgccgccatcaacgccgcccaggagttagcaacgtctgttcatatgtgtgttacaaggaaaagacctatcagaatcataaatgaagtaagcggggtgattcgaccatcaaggatgacactacttctaggagcacctggttccgggaagacgactctactaaaagcgttagcaggaaaattggattcttctttgaagttcaaaggaaaagtcatgtacaatggagaagaaattaattactcaacaccacagacacagtacctgcgtacttatgttagccagtatgatcttcaccatgctgagatgacagtaagagagacaatcgacttctcttccaagatgcttggaaccaataatgaatttgatatgctaggagaagcaataagaagaaaaaagggtgtcatcaatgaagtggatcaagatcttgattcattcattaaggccaccacctttggagaaggaagcaacctcacaacaaactatattatcaagatacttggcctgtctgagtgtgctgataccctagtaggagacgagatgagaagaggaatatctggagggcaaaagaagagagccacagttggggagatgctagttggtctggcaagatgcttctttatggatgatatatcaacaggtcttgatagctccacggcatttgagatcatgaagtttctccaacagatggcccatttgatggatctcacaatggggcaaattgtgtatcatggtccccgagaaaatgctacggacttgttcgaaaccatgggattcaaatgccctgacaggaagaatgtagccgatttccttcaagaggtaacctctaagatggaccaaaagcaatactggactggtgaccaaaataagtatcagtaccatacaattgaaaattttgcagaatccttccgcacgtcatatcttcctcttctagtagaagacaaactgtgcagtccaaacaatactggaaagaataaggaggtaaaagtgaatgcaggtcgccgagtatccagatggaatattttcaaagcatgcttttcaagggaactgctgctgctgaaaagaaactctccggtccatatattcaagaccattcagataactgttatggctttggtgatctccacacttttcctgagaacaaaaatgagtcacaattctgtacttgatgccaacaagtacatgggagcactttttatggctgtcgtcatagtaaacttcaatgggatgactgaaattgcaatgacgataaagcggcttcccaccttctacaagcaaagagagctactagcattgccaggatgggcactcctttgttcagtttaccttattagcatcccaatatcgcttgttgagacaggcctttggacaggcttaacctactatgtgattggatatgcaccttctgctatcaggttcatccagcactttctggtactttttgccatgcatcaaatgtcaatgggcttgtatcgcttcttagcggccataggaaggacgcaagtgatggccaacatgctagggactgcagctcttattgcaatctacatacttggaggattcgtcatatcaaaagatgatctccaaccatggttgcgctggggatattggacgtccccgttcacctatgcacagaatgcgatcgccctcaatgagttccatgacaaaagatggaattcagaattttattataacggtgcaaacaccgtcggtgaagctatcctcaagatcagagggctgctcatggagtggcactggtactggatttgtgtcaccattttgtttggatactcgctggtcttcaacatcttcagcatatttgcattggagttcatcggctctccacacaagcatcaagttaacatcaagaccacaaaagtgaatttcgtgtacaataggcagatggctgaaaatggcaattcatcaaatgatcaagttatcctcccatttcgacccctctccctggtctttgatcatattcaatattttgttgacatgcctaaggtaatatcttgttcacttattaagatcttacctggtagcttcattaattcctatcacatactgaagacaagaatacaaatatcccaccaggagatgacaaaaaatggagcaacgaagaaaaagcttcagctgctacaagatgtcagtggtgcttttaggccaggagtactaacagctctgatggggataactggcgctggcaagacaacattgctcgatgtattagctggaaggaaaactgggggatatatcgaagggactattaagatagcaggctatcctaagaagcaggatacattctcaaggatctcaggttactgtgaacagagtgacattcattcccctaatctcactgtttatgagtcactgaaattttctgcatggcttcgtctaccttcaaatgttaaacctcatcaaagagacgcatcccaggagcaactggcctgtcagccgagcagcggaaaagactaacaatagctgtggagctagtggccagtccctccattatattcatggatgagccaaccaccggcttggatgctcgtgctgcagctattgtcatgagaacagtacgaaagacggttgacactggacgaactgttgtctgcacaattcatcaaccaagcattgagatttttgaatcttttgatgagcttctgcttatgaaaagaggtggccagctcatatacagtggttcggccataccaggcgttcctaaaataaacaagggacaaaacccagcaacatggatgttagacatcagttcacacataacagaatatgaaattggagtggactatgcagaaatttattgcaattcctccctgtacagcaaggatgagcaagacgtattaaacatacttggaatcgtatatggatcggcattgttcctgggtttcatgaattgcagcatcctacagccggttgtggcaatggagagagttgtgctctaccgtgaaaaggcggcaggcatgtactccaccatggcatacgctatcgctcaggtgtcggtggaattaccttacatgttggtgcaagtgatgatcttctcatcaatcgtgtacccaatgattgggttccaggtgacagcgagcaaattcttctggttcttcctataccaggtgatgagcttcatgtactacactctatacgggatgatgacggtggccctgacccccaacatcgagatcgccatggggctgtcgttcctcatctttatcttttggaacgtcttctctggcttcataatcgtgagagagatgatgcctgtgtggtggcggtgggtgtactgggcggatccggcggcatggacggtttatgggctaatgttctcacagctcgcagacaggacggagcagatcctggtgccggggctcggggagcagacggtgcgtgagttcctagaggggtacctgggcctgcaggatcgctactttgtgctggtgacctgcctccatcttgccatcattggcctcttcgtctttctcttcttcctcgccatcaagcacctaaacttccagcgcagtttttgaatcttgacagctacatagaatggaattgctgcaattctcagttccgtgtgatgtttacatg

SEQ ID NO: 9607 - DNA, 4801 bp, Zea Mays
gaagacgaggactggcacgcggccgcgacggccggaaggacgcagcagccgccgccgccgctcacccacgacgacaaccgcagcttccttcggatgctgcgtgacatgaaagagaagctgggcgtggacgcgcccaaggtggaggtgcgcttcgagaggcttaccgtggaggcggacgtccgcgtcggccgccgcgccgtcccgacgctgctcaacgccgccatcaacgccgcccaggagttagcaacgtctgttcatatgtgtgttacaaggaaaagacctatcagaatcataaatgaagtaagcggggtgattcgaccatcaaggatgacactacttctaggagcacctggttccgggaagacgactctactaaaagcgttagcaggaaaattggattcttctttgaaggtatactgagctacctacatgctaccaaaagtatttgtcaacaagaaaaggcaaaaatagataataatgtctagcattaactaacagaaatatatattttctaacggccaacgattgccaacagttcaaaggaaaagtcatgtacaatggagaagaaattaattactcaacaccacagacacagtacctgcgtacttatgttagccagtatgatcttcaccatgctgagatgacagtaagagagacaatcgacttctcttccaagatgcttggaaccaataatgaatttggtaagatatactcttgcgtatagggagctatttatttattttaaagatcattggaatgtgctgcgatttataacaaggcaaatacttaagaatgaagtgtctacacaatactcaagctaaatcaatttttccatggcatctatactgacacaaatttcctgtttgaatggaatgacaaactcagatatgctaggagaagcaataagaagaaaaaagggtgtcatcaatgaagtggatcaagatcttgattcattcattaaggtagttccattgcactactttgtttttgcaagactggattatgttttgtttagttactcaaatagctcttctctcaggccaccacctttggagaaggaagcaacctcacaacaaactatattatcaaggtaacttggttacttgcttgatttgctatatcttgaagatataatagtaacagttgattatatgcagatacttggcctgtctgagtgtgctgataccctagtaggagacgagatgagaagaggaatatctggagggcaaaagaagagagccacagttggtaagcatttctataagggctgatggtagaagacaaatacagccatatataggttttatgtagctgccaccagaaggacacatttcaatctgaaagaaaacgactactgacatttcaccacctcaagaatgtaaaatatagggtaggaatcttcatgatagcgaagaatgactagctctaaaatagaatgtttataactctcaagtaagatggaagtaacaaccagaaattagaatgacgaacagagtaaggagatacttaactggaacctaacctaagttggcatacgctaaagtgaagttgtttaatgcaggggagatgctagttggtctggcaagatgcttctttatggatgatatatcaacaggtcttgatagctccacggcatttgagatcatgaagtttctccaacagatggcccatttgatggatctcacaatggtaatttccttgttgcaaccaccgcctgagacattggaattatttgacgacattatacttttatgtgaggggcaaattgtgtatcatggtccccgagaaaatgctacggacttgttcgaaaccatgggattcaaatgccctgacaggaagaatgtagccgatttccttcaagaggtaacctctaagatggaccaaaagcaatactggactggtgaccaaaataagtatcagtaccatacaattgaaaattttgcagaatccttccgcacgtcatatcttcctcttctagtagaagacaaactgtgcagtccaaacaatactggaaagaataaggaggtaaaagtgaatgcaggtcgccgagtatccagatggaatattttcaaagcatgcttttcaagggaactgctgctgctgaaaagaaactctccggtccatatattcaagaccattcagataactgttatggctttggtgatctccacacttttcctgagaacaaaaatgagtcacaattctgtacttgatgccaacaagtacatgggagcactttttatggctgtcgtcatagtaaacttcaatgggatgactgaaattgcaatgacgataaagcggcttcccaccttctacaagcaaagagagctactagcattgccaggatgggcactcctttgttcagtttaccttattagcatcccaatatcgcttgttgagacaggcctttggacaggcttaacctactatgtgattggatatgcaccttctgctatcaggttcatccagcactttctggtactttttgccatgcatcaaatgtcaatgggcttgtatcgcttcttagcggccataggaaggacgcaagtgatggccaacatgctagggactgcagctcttattgcaatctacatacttggaggattcgtcatatcaaaagatgatctccaaccatggttgcgctggggatattggacgtccccgttcacctatgcacagaatgcgatcgccctcaatgagttccatgacaaaagatggaattcagtaagcactaatttcaaaacttggaagtgattgctatatggtagtatatcctatttcaaattaattacaataaggttcttgatcttttgtttctggtaggaattttattataacggtgcaaacaccgtcggtgaagctatcctcaagatcagagggctgctcatggagtggcactggtactggatttgtgtcaccattttgtttggatactcgctggtcttcaacatcttcagcatatttgcattggagttcatcggctctccacacaagcatcaagttaacatcaagaccacaaaagtgaatttcgtgtacaataggcagatggctgaaaatggcaattcatcaaatgatcaagttatcctcccatttcgacccctctccctggtctttgatcatattcaatattttgttgacatgcctaaggtaatatcttgttcacttattaagatcttacctggtagcttcattaattcctatcacatactgaagacaagaatacaaatatcccaccaggagatgacaaaaaatggagcaacgaagaaaaagcttcagctgctacaagatgtcagtggtgcttttaggccaggagtactaacagctctgatggggataactggcgctggcaagacaacattgctcgatgtattagctggaaggaaaactgggggatatatcgaagggactattaagatagcaggctatcctaagaagcaggatacattctcaaggatctcaggttactgtgaacagagtgacattcattcccctaatctcactgtttatgagtcactgaaattttctgcatggcttcgtctaccttcaaatgttaaacctcatcaaagagacatgttcatcaaagaagtcatgaaccttattgagatcactgacttgaaaaatgccatggtaggcatcccaggagcaactggcctgtcagccgagcagcggaaaagactaacaatagctgtggagctagtggccagtccctccattatattcatggatgagccaaccaccggcttggatgctcgtgctgcagctattgtcatgagaacagtacgaaagacggttgacactggacgaactgttgtctgcacaattcatcaaccaagcattgagatttttgaatcttttgatgagcttctgcttatgaaaagaggtggccagctcatatacagtggttcggccataccaggcgttcctaaaataaacaagggacaaaacccagcaacatggatgttagacatcagttcacacataacagaatatgaaattggagtggactatgcagaaatttattgcaattcctccctgtacagcaaggatgagcaagacgtattaaacatacttggaatcgtatatggatcggcattgttcctgggtttcatgaattgcagcatcctacagccggttgtggcaatggagagagttgtgctctaccgtgaaaaggcggcaggcatgtactccaccatggcatacgctatcgctcaggtgtcggtggaattaccttacatgttggtgcaagtgatgatcttctcatcaatcgtgtacccaatgattgggttccaggtgacagcgagcaaattcttctggttcttcctataccaggtgatgagcttcatgtactacactctatacgggatgatgacggtggccctgacccccaacatcgagatcgccatggggctgtcgttcctcatctttatcttttggaacgtcttctctggcttcataatcgtgagagagatgatgcctgtgtggtggcggtgggtgtactgggcggatccggcggcatggacggtttatgggctaatgttctcacagctcgcagacaggacggagcagatcctggtgccggggctcggggagcagacggtgcgtgagttcctagaggggtacctgggcctgcaggatcgctactttgtgctggtgacctgcctccatcttgccatcattggcctcttcgtctttctcttcttcctcgccatcaagcacctaaacttccagcgcagtttttgaatcttgacagctacatagaatggaattgctgcaattctcagttccgtgtgatgtttacatg

SEQ ID NO: 9608 - DNA, 1707 bp, Zea Mays
tggctggcttgctggcattgggaagggccctattactcgaaccgaggcatggaggacgaagaaaacatcgagggagaactgttgctcgtggagtcacaactccacgacatccaaggacaaattaaaacattactcgatcgccaagaggagttgtatgaacgccaggcacagttgaaggctttgctcgaagcatctaaattgaccagaaatacaacaattaacacatcttcagttgctccggaagattggtctgggagcttcccatgggatctggaggctgacgataccaggttcaatatatttggcatttcctcctaccgatcaaatcaacgagaaataattaatgcagtcatgagtggaagagatgttctggtcataatggcagctggtggagggaagagtctatgttaccagctcccagctgtacttcgtgatggaattgcactggttgtcagtcctttactttcccttattcaggaccaggtcatgggactgtcagctttaggtataccagcatacatgctaacttcaactaccaacaaggaagttgagaagttcatctataagacacttgataaaggagaaggagaactaaagatattatatgtgacacctgaaaagatctcaaaaagtaaaaggttcatgtctaagctcgagaaatgccatcatgccggtcgtctttctctgattgcaatagatgaggctcactgctgtagccaatggggtcatgattttcgtcctgactacaagaatcttggcattttgaaaattcaatttcccagtgttccaatgatagctttaactgcaactgcaacaagtaaggtccaaatggatttaatggagatgctccacatcccgagatgcatcaagtttgtcagcacagttaacaggcccaaccttttttataaggtgtctgagaaatcgccagttggaaaggttgtcattgatgagatcacaaagtttataagtgaatcatacccaaataatgagtctggaattatatactgcttttcaaggaaggaatgtgaacaggttgcaaaagaactgcgcgaaaggggtatttcagcagattattatcatgcagacatggatatcgttaatcgtgagaaaattcatatgcggaatgcaaccggcgtatccactgttcatccgctgctcccgctagggattttggtaccattcagccagtctctctcagatctgttattctttagtgttttattgctcttcaatatgtcagccaacgctattgttgtcaatattgtgcttgatgggcagaattacccagaatgggccttttgtgtttagactgcattaagaggtcacggtttactatttcatttgactgaagattcaccagttttagcagccgatagaagcaatgctgctgcaatcaagacttggcagatcaatgatggtaaggtaatgactgcaatggtcaaaagcactaaaccaactatgattatgagtctgtccaaattcaccactgctaaagctatctggtcacatctgaaggaccggtttgttcaggacagcggtgctcttttacatacccttatgcaacagactcatgtcattgagcaacatgatatgtccattgatgaatactattccgcctttgatcgtcttatgagtgcattgacctctatggtgcctgcttgtacagctgtgccttgcccagctcacaagttcatcgagaagtttttt

SEQ ID NO: 9609 - DNA, 3281 bp, Zea Mays
gttggaactcgcactcgtgtagcccaaaactaatggaattagccgacgcaaggcaagctttccgcttcctatttcggattgggatcatcagcggctgtagcgtggacccgacgggggtgtccggaccacatccctatttcatcttggtaccccgtccgtctccgatttcagaagcacggcgggctccccggcagcctctaccgagcagaaagctgagttctaccccagaaccgaggcatggaggacgaagaaaacatcgagggagaactgttgctcgtggagtcacaactccacgacatccaaggacaaattaaaacattactcgatcgccaagaggagttgtatgaacgccaggcacagttgaaggctttgctcgaagcatctaaattgaccagaaatacaacaattaacacatcttcagttgctccggaagattggtctgggagcttcccatgggatctggaggctgacgataccaggttcaatatatttggcatttcctcctaccgatcaaatcaacgagaaataattaatgcagtcatgagtggaagagatgttctggtcataatggcagctggtggagggaagagtctatgttaccagctcccagctgtacttcgtgatggaattgcactggttgtcagtcctttactttcccttattcaggaccaggtcatgggactgtcagctttaggtataccagcatacatgctaacttcaactaccaacaaggaagttgagaagttcatctataagacacttgataaaggagaaggagaactaaagatattatatgtgacacctgaaaagatctcaaaaagtaaaaggttcatgtctaagctcgagaaatgccatcatgccggtcgtctttctctgattgcaatagatgaggctcactgctgtagccaatggggtcatgattttcgtcctgactacaagaatcttggcattttgaaaattcaatttcccagtgttccaatgatagctttaactgcaactgcaacaagtaaggtccaaatggatttaatggagatgctccacatcccgagatgcatcaagtttgtcagcacagttaacaggcccaaccttttttataaggtgtctgagaaatcgccagttggaaaggttgtcattgatgagatcacaaagtttataagtgaatcatacccaaataatgagtctggaattatatactgcttttcaaggaaggaatgtgaacaggttgcaaaagaactgcgcgaaaggggtatttcagcagattattatcatgcagacatggatatcgttaatcgtgagaaaattcatatgcgttggagcggccatccatgagtaaaccaccaagccagtgaatcataatgctgagccgttaggtgactattccagcttttttctggatggtacgttgtagtgcttaaaaaataggagcctagcagtacctaggcattgactagacacaacgctgtggtttgaccctgctcctggactagatggacatgcttccaggcaaaataggaggtgaggcatcggaggaagttatgataattgaggtagcgaaggtgcttacaatgctgtggtaaagtccatgggctaggagtgtgctgatccgggttcgaatttgtggtgccacactatattacaattctggggttttccctggagtattctttcaaaaaagaaaatgataactgagttgggttacgaagcattgtcaatggctgtaatgcaagagtctggtgttttttttcaaacgatgcatgctccttcatccccactctctttgtcactcttgtcctcgtccttccctacctcacaccccaaccccctacttttaggtggctagctagatggtgccagtactgatggtgccatggctactgaagttcatgtgggaaatgttgaatagaagaagcgtagttcttgtttacgttttcggctatgtttggtgtgttagccagtttgtgtgttcaggatcaggggtgtccgtgcgggctttaaagccttgtttgatttcagttgagtgtgattttttttatcgaacacacaggagagctgcgtgtcattatattaagaagaagaaaaaaacaaataacagtgggggaaagaaaccccaatacaatcacagcgcgcagcttgggcacacactacagggaccctaatcatctgccggctccaaactggaaacagcagcaggaagcacgcctgcaacacatgtagacacccctacacctagccgaaactaacccgtaggactctgcgcttgaaggaaggaaatccccttagcaccagccaacaaccacaaaaaggcttcctcctttgccaacctaacagccacgaccatattcagaggagatccttgaaagacaataacattcctttgtttccacaacatccaagctcccaggacaaccatagagtcaaatccttttttgcttagccgactcaaacgagcactattgaagcaccaccactgatcaaaatcattcttactcggccttggatgaaggttgtgcatcccaaagggcccgagcattcctctctaatatataagatgcgcagttctcctgcgcgttcgataaaaaaagggcccgagcagctcaaaccaaaactaccgcacaaaggagcagcccaccagcaggtggttgattgtctcatcctgccgatcacatagcgggcaatggatgggatgagttagccctcttcttgctgttaaggcccattaggcctaggcctactgtctatatatatatcatatgtcattagggactaattatcatttgtcaatcccaaggttagtaacatggtaatagaggatgttaagattagggttttcctaaatttctagccgccgtagccttcccacccatcagccgtagcggccttcccacctagccgccgtcgcggtcctctcctgttggccgccgtcgaggtcctctgcctctaccaggctgcgcggcccttcgtcgcgcgcgccgtcttcgtccgccgccgcgcggcttcccctcgcgtagcccgtcgtcgtgcgcgcggtccgccggcatcatcttcgtccaccgccgtcgcgcggttcccccgcgagcggtccgcctcgccagccgccgtcgcggcctcccgtcagccgctgttgcgcggtttccccgcgtgcggagctgctgcgacccccgcatctgcgccgttcgtcgcggccccgctgttcttcgccgtcagcgcgcaacacagggtgttcgctgccgcaccatctgcgtcgtcctgccgtctgcttctgcgtcgcacgcagcctagac

SEQ ID NO: 9610 - DNA, 1709 bp, Zea Mays
ctctttctcctccattccccactgcatgcgcgctaccttggcgacgactggttgaccgccgctgccgctctagagcaggtgcccactgcccagggtgattcaagtactctgctttcaccaatatgtctgacggtcaggaaactgacaaaaacattgagatttggaagatcaagaagttgatcaaggcattggaatctgctagaggcaatggcaccagcatgatctctctgattatgccaccacgtgaccaaatttcccgtgtgaccaagatgttgggtgatgaatatggtactgcttcaaatattaagagtagagtcaaccggcaatctgttttagcagccatcacctcagctcagcagaggctgaagctgtataacaaggttcccccaaatggacttgttctctacactggaacaattgttactgaagatggcaaggaaaagaaagtcactattgattttgagcccttcaagcctatcaatgcatccctgtacctttgtgacaataagttccacactgaagctttgaatgaactcttggaatctgatgacaagtttggtttcattgttatggatggtaatggaactctttttggtacactgagtggcaatactcgtgaagtgcttcacaaattcactgttgatctcccaaagaagcatggaagaggaggtcaatctgcccttcgctttgctcggcttcgaatggaaaaacgtcataattatgtccgaaagacagctgagcttgctacacaattttttatcaatccagctaccagtcagcctaatgttgctggacttatattggctggttctgctgattttaagacagaactgagccaatctgacatgtttgatcagcgtctccaggccaaaatacttaatgttgttgatgtttcatatggtggggagaacggttttaaccaagctattgagttgtcagctgaaattctagcaaatgtgaagttcatacaagagaaaaagctgattggaaagtattttgaagaaattagtcaagatacgggtaagtatgtgtttggtgttgatgacacactgaaagcccttgaaatgggcgctgtggaaacactgatagtgtgggaaaaccttgatgtcaacagatatgtgcttaagaatactgcaactggagaaactgttatcaaacatctgaataaagagcaagaagctgaccagagtcatttccgtgatccatctaccaatgctgagctggaggttcaggagaaaacttcgctcttggaatggtttgccaatgagtacaaaaagtttgggtgcacacttgagtttgttaccaacaaatctcaagaaggatctcagttttgcagaggatttggtggcattggtggcatgttgcgctatcaactggacatccgttctttcgacgagctttctgatgacgaaggtgtctatgaagattctgattaagcaaacgtcattcatatggctgtgctggaccctggattgatgcaattgctcgtgttgttcttctatttttttgcttgattagtcggtttttgaggagatcgccacttgagacacttgctttgtttcctatgccgcagcatacaattgcaatgtcaagcacatcattacaatctggttgatacctcatgtactgttgttatgttgacatcggctctgtccaatatttatcaagatttggtgtagcgaatcatctacatgtttccacaaagttag

SEQ ID NO: 9611 - DNA, 1803 bp, Zea Mays
ctcggggcagtgtgcacaacttaatgaaatttatatgtcaataacttaaatatcggtgtccattttgaggtatactgattttttctactgtgttcacatctgtctttggatgacattggatataaccactctcttttcgatagaaacagctgtgctcaatgtactaccaatatttactctcattttgggtgattcaagtactctgctttcaccaatatgtctgacggtcaggaaactgacaaaaacattgagatttggaagatcaagaagttgatcaaggcattggaatctgctagaggcaatggcaccagcatgatctctctgattatgccaccacgtgaccaaatttcccgtgtgaccaagatgttgggtgatgaatatggtactgcttcaaatattaagagtagagtcaaccggcaatctgttttagcagccatcacctcagctcagcagaggctgaagctgtataacaaggttcccccaaatggacttgttctctacactggaacaattgttactgaagatggcaaggaaaagaaagtcactattgattttgagcccttcaagcctatcaatgcatccctgtacctttgtgacaataagttccacactgaagctttgaatgaactcttggaatctgatgacaagtttggtttcattgttatggatggtaatggaactctttttggtacactgagtggcaatactcgtgaagtgcttcacaaattcactgttgatctcccaaagaagcatggaagaggaggtcaatctgcccttcgctttgctcggcttcgaatggaaaaacgtcataattatgtccgaaagacagctgagcttgctacacaattttttatcaatccagctaccagtcagcctaatgttgctggacttatattggctggttctgctgattttaagacagaactgagccaatctgacatgtttgatcagcgtctccaggccaaaatacttaatgttgttgatgtttcatatggtggggagaacggttttaaccaagctattgagttgtcagctgaaattctagcaaatgtgaagttcatacaagagaaaaagctgattggaaagtattttgaagaaattagtcaagatacgggtaagtatgtgtttggtgttgatgacacactgaaagcccttgaaatgggcgctgtggaaacactgatagtgtgggaaaaccttgatgtcaacagatatgtgcttaagaatactgcaactggagaaactgttatcaaacatctgaataaagagcaagaagctgaccagagtcatttccgtgatccatctaccaatgctgagctggaggttcaggagaaaacttcgctcttggaatggtttgccaatgagtacaaaaagtttgggtgcacacttgagtttgttaccaacaaatctcaagaaggatctcagttttgcagaggatttggtggcattggtggcatgttgcgctatcaactggacatccgttctttcgacgagctttctgatgacgaaggtgtctatgaagattctgattaagcaaacgtcattcatatggctgtgctggaccctggattgatgcaattgctcgtgttgttcttctatttttttgcttgattagtcggtttttgaggagatcgccacttgagacacttgctttgtttcctatgccgcagcatacaattgcaatgtcaagcacatcattacaatctggttgatacctcatgtactgttgttatgttgacatcggctctgtccaatatttatcaagatttggtgtagcgaatcatctacatgtttccacaaagttag

SEQ ID NO: 9612 - DNA, 2697 bp, Zea Mays
gagacgaggcgccgagggaggcaagccgatcacaccaaacgcttcgtgctgctgccccgtctcttctcatcgtgatctcagggcagtggatcgatctcacgtcggaggcgaccttcttaggcgcgccaccgccatccgagccgagccgcagcgatccagatccagtgttggggctgccttgtgcaccgaatcagtgatcgggcagcgtaatacaaagagggagcgcttggtcatctgagctggttttgtacagaatgtcagagggtaatgtggatagcatccagatatctgttagtaacgatgagaggaggaatagggcagatgccgagatctcggaggacgagccaaggcacaccaggatgcggtcactgaagaagaaagccttgcatgcatcgacaagactcacacactccctgaagaagagggggaagagaaaagtggactgcagagtgccaaggatagctatagaagatgtcagggatgctgaagaagagcaagcagtgaactcgtttcgggaggttttgtttgctaggggcttgctaccagtcaagcatgataattaccacacgatgcttagatttttaaaagcaaggaagttcgattttgaaaaagcagcacagatgtgggcggacatgctgcagtggagaaaggagttcggtacagacacaatttttgaagattttgaatttcatgaactagaggaggtcctgcaatattatcctcatggttaccatggggttgacaaggaaggaaggcctgtctacattgagttgcttgggaaagttgaacccaacaagcttatacaaatcacaacagttgagcgctacattaagtatcatgtacaagagtttgagagagctttccgggagaaattccctgcatgctcaatttctgccaaaagacatatagatactacaacgacgatattggatgtccacggtgtgggctggaaaaactttagcaagattgcaagggatttggtgcgttgtatgcaaaaaatagatggtgactattatcctgagacattacatcaaatgtttattgtaaatgcgggacctggtttcaagctgatatggagcactgttaagggacttcttgaccccaaaacgtcatctaagatacatgttctaggaacaaaatatcaaagcagacttcttgaagctattgatgcaagccaattaccagagtactttggtggttcgtgcacatgttctaaccatggagggtgcctgaggtctaacaaaggcccctggagcgatccttcaatcatgaaacttgtacatagcatggagtcattgaaggaaattgggcaagtatctgatatagaagaaacagttacaggctccatgagattgcgtgctctcaagttaccagaacgaattagtgacacgtcaaatgctgaatcaggttcagatgttgatgatcttggatcccctgtggctcctgaagatgttgaatatcctagtttggccccagttcgagaggaagtacagtcttactaagttctgttatgtttttttggagatattttattatttttgtcgtatgtctatcttggaactgtgaagatttgaacttgcacattcaggctttcattagaaaatgtgttctgttccttttagctgcatgacaccatgttagcatgttttataatttgtagttaattcgttctgattctttaccctgtaggcgagggaatcaggatctacaacatatagtggttcaattggcatgtctcgtatggcagataaagttgtaggatccaacgggagatacaactctactggaaatgaaactaggcaggtcaatgcagaacaaggttccctgataaatgggggtttacttgcgcccggtcagcgtgccccaaatgatgctgtaggcaatgatgatgggttcttgaaatatatatcaagaagagtcgttgctatatttcttgaagtactctcttttttgcggttcttcattcgtcgacgacaacactcggaaaatgttcattcacatactgcaactgcacccagtagtctggcaaatcttcagacaattaaggaagatcgtgtaaatccttgtctggagcgtcttgatcgacttgagtcaatgtttaatcagctgagcaaaaagcctccagagcttccagaggacaaggaccgggccatacaagattcttttgacaggataaagtccattgagtttgatctgcagaagacaaagaaggtattgcatgcaacagttatcaaacaaatgcagatggcagaaaccttggaagctgtaacggagccggatcttaggcggaggaaattttgtacataatacacttacctgcagtgtacagaaacaagaaaagatggcgatttactaatgtctgctgcctggcagagaattgaactacattgctttgtacatggccgccctttgctgattatctttctcagcttactatagagatgagtgcattggcatgttagcctcaatcagggggcctcaataacaacagatagttgacctgtgataaactgacgagataacagcgtcctggaaaatcaccggacactgcccaatctattgagctaaagagttctgtattatgcatcttttgtgtttcagaacagttagtttcacccataattcgatccattttttggttggtacatgtgaacatctgattgaacttggttttcttagaatttttgcaaatggccg

SEQ ID NO: 9613 - DNA, 2187 bp, Zea Mays
actgcacggcagcctccttgctcgtgcgccttgtcattactgcacatgacaagaaaagtggtgctaaagagagcaagcgggactgaaggggagagagagactgagagagagggagctagcaacaatggcggcacctactgtgctcgccttccttccgcttccgcttctgcttctcgcagccttctcatcagcatcagcctcagcgcaccccaactctttccggccaatcgttcccctgcgtctccaggctcttctgcagcagcagcagcggcggcgagcgagctcggacgccaagctcgtctccgcggccgccgacggcaccaacagcacggcgcagccgttcacgacgcactactttccccaggagctggaccacttcacctttacgcccaacgcgtcgatgctcttccgccagaagtacctcgtcaacgacaccttctggcggaggccccgccgcggcggcggcggcggcgccgggccgctgttcgtgtacacgggcaacgagggcgacatcgagtggttcgccaccaacaccgggttcatgttcgacatcgcgcccaagttcggtgcccttctcgtctttatcgagcatcggttctacggcgagtcactgccgtttggggacgactcctacagctcagcggagacggagggttacttgacgtcgacgcaggcgctcgccgacttcgccatcctcatcaccggtcttaagcgaaacctctcggcggagaccgcgcctgtagtcgtcttcggcggctcctatggcggcatgctggcttcttggttcaggctcaagtacccccatgtcgccataggggccctggcatcctctgcgccaatcctacagttcgaccacataacgccatggaacagcttcagtgatgccgtctcacaggactacaagtccgagagcttgaactgcttcagtgtgatcaaggcagcctgggacgtgctcgatgagaggggatccactgacacagggctcctggagctcagtaaactgttcagagcctgcaagagcgtcaagcacgctgattcgattgcaggctggctacagacggcattcacctacactgccatggtggactatccaacaccggccaacttcctgatggatttgcctgcctaccccgtcaaggagcctatccagatgtgcaagatcatcgacgggttcccggcaggcgccgacatcctggaaaaggtgttcgcggcggcgaacctgtactacaactacacaggagaccaggcctgcaaccagatcgagtctgattctgacgacagctccagttctcttgggctcagtggctgggggtggcaggcttgcacagagatgatcatgccgatgtcgacctcaaacgccagcatgttcccgccatccagcttcagctacgaggacacgtccaatgcctgcttccagtcgaccggggtccggcccaggccgcactggatcaccactgaatacggcggatatagaatcgacaaggtgctcaagaggttcgggagcaacatcatcttctccaacggaatgcgagacccgtggagccgaggcggggtcctcaagaacatctcgtccagcatcgtcgcccttgtcacggagaaaggggcgcatcatctggacctcagattcgcgaccgatgaggatccggactgggttacagaacagaggaggcaagaagttgagatcatagagggatggatagaccagtatcatcgagacatggcgcaagtatcctaaaggagtaaaggtgctgtgttgcagatttacagttacagtcaagacaagttcacgtctggtctatgaaaaagaaaacataaaaaggaaaagttcctttatagcgcacaggacaatcacagggacattaagatgataaaaggtgaaaagccagtccaattgtttcacttatcaacataagctgtaaaacttgaacactcttggacgaatcatgaatgaattgttacacgatgctcagtgtttttccccccttcctagcccccaatttgttatttgttttttctattttcttccttagtatatatgtagcatatatgaaaaagggggaacaaggatcaggtgtttctaaagccttgagcacccaaattcatttcacaccttagttatagtaatccatactggttacggctgagttatgtacactagagttgtgttaattctttctgagtaattcc

SEQ ID NO: 9614 - DNA, 2083 bp, Zea Mays
aaaaaacacaacatgcagcatccatcaagagctttatttcctggttactgaaaatgttatgcgtcttcacgttgatggtttcctaactgctgaggcccccctttgttcactgtttgatgagccagacagtcaggatgattcaaaccaaattagcttagttggaaatgatggcaagcttgaaggctatatctataatatcgaggtttcatatgtactaggagctataaaagaacaatacacaaagaacccaccatttaagttatctattgactattcatgctctgatggaatcgaagagggtgatgacggcatttggagcatcgttggtgggaaggcatcttgccggagaaatttcattttggaagtagtactaaccaacgcttttggtgaacctgtgaaggataaagaggtcgtttcttcacttgtctatgctgatgatggaacagtagttgcaaaatcaagggatgattctgagcctcctttgcttattacttgcgaaggacttgaatatgcagcgataagcaggcctctaccaattatacgtgggcgagcactatttaaactcaagatatctcagctctcttccaaatgtgacaataagctcttccgtattaaattctctacacttcacatgcaaagatattcttttctggaagcatattccaaaccgattcgctgtatatctcgaagccgcactgtccgccccttgggtcctacaaagcgggcgagttctgcaacagcaaatgaaattgacatgctcagtaatggccaagggtttgttagtactgacaaagtaaatagtcgtggacattcagtgtgtctgcatacgcccatgtttcccaagatagaagatggaatggtggaggtagtagaggcccacaaaatagtatcacagctttgattcaggaagttcttggagtggatcagaaggagatgatggtattgaaaccttttcagacgctgtggttttcagatactgtctagacagcacatatgaccggtcaaagtttcttagaggtgcatctcttactgttaacaaagatgacttggtaaaacttgcagaccgagtctcgttgtatagtggatgctcccaccacagaaaccaaatattaatgtcgaagagattgctcagagagggtgctgacacttggaacatgatctcaaagaacaatgaacgtgctctttggtcatctgccattccagagatcataacaaaatttacgaacattgcccattctgtgcgtaggggtttatcagagcaggatcttgaggttttaagaggcattgctggttgtggtgaggacataggaagagatgaatttgataggctatggtgctggttatacccagtggctgtttcattatcgagagagagaattaaaaagctgtgggattgcacagcacctagatggatagagggcttgattacaacagaagaagctgagagtgcactaagaagttccagggaattgttaaaggaggcaggaacatttgttctcagatttcctatcacccgaagctggccacatccagatgctggaagcctagttgtcacttacattggctctgatagctcaattcatcataggctactctctcttgattccagtgatgctagcgctgagaaactgcaagatttgctgctccaggaaccggaactatcacaattgggcagggttgatcgggtctcaatcaccatccggagatgaccgaggcttcaaacggttaaacttacattcaaaagcaggatttaggatgctgccacgagaagagggtcagcagcagctcgacgcatacaagttcattgtcatccaagagcatagcccataacacccattgcctgttttttttttgaatcaaacacccattgcctgttgttaccatgtacaggttgtaaattggttcccttggtagtttagttcgtacaaagagaggtactagtgaggtctagttgcttcagaaaaccaacagtaacatgagctaccatgtgtgtcgcaaaaagaaagaagctgtcatcatgtgcctcgaaactggaggattttcagtggctaacatgttgcatatagaattgacagttgattta

SEQ ID NO: 9615 - DNA, 1025 bp, Zea Mays
gcccctgcattgccccggccgtgcgcacacggcacagccatccctagttccctgctggcaaaaccctagtccgccagggcagagggcagcgaccttctagaaccttctccaatggcgctactccgagcgcttccggcggcggttctcccccgtcgcgccccgcacccacttcctcaccccccccggctcaccttcggttcctggacccgatcgggctccgccccttcttctcctcctccgccgccgccaccgactcgcaggcaccgtccatgggggccaccctcttcggcgggctcacggagtcccggttcgcgaagcgccggccgggcttcgccgaccgccggaagagggccagcttgcgcgccgaaggcccaccctaccgggtgaagtgcgagcctgacgagcccgtaccagctagccagccaaaccaagggagcgtgcgagtgcgagggaggaaggacaggaagcggatcaagcagcgggacgacttcatcacgtgaataacccaagtctggcatagaaatacaaaagtaaactgaagtacggatctaaacaagtcagtcgatgcgcctgagttgtgttacctgggctgagaaggagaagcgcagagcacagtattctgccgctgttaagagaaaggaggcagaacggacagaaagggagatggctgctgtggcaagagatcgggcatgggcagaaaggttggtagagctaaaacagcttgaggaagaaaagaacactgcaatggcataaaagggcatgctctggaaaatgtcaaggcatctaacttgtttttgcttctctattctttccccattttttccacatagtatagaatgtcacagttgtaatggaagactagttgtaccacttctttcaaccgtatatcaaatgctggacgtggtgttaatacgatttttcattagtccatgtatggagtttgtttattttgatgtatttagaataagtgatgtgatggtttttgtgtgctggagacctgagatgactgtcgtttgcaacatata

SEQ ID NO: 9616 - DNA, 1499 bp, Zea Mays
gaccatccgtgcaccatgttctgccattctgcctcccgtcaatcggtaacgtccgtgacatccgacggctcgcgtgcgttgaccccgccccccgttctgcccactcccgagccatcgccactccaccccgttctgcctcctcccaccgcgcccccgctctcgcaattgtcgccctcgcgtccgcaatcctcgcccccaagctcactcttccgagctcctatcggcacccatcctagccttcgacaccacgtcgtgcccaaccctaaaacccacgccgcgctggtagctccaccttctttcctcgccaccacgcccagatggaaggcgcgactgggatctcggagcacgtcttggatctcatcttccatccactctcccgcaatcctcgctccaaatgccgctgtcgctttgcccccaatctgtgcgacatcttcagatggacgctggggccatgccgagccccgacggtcgccattccaggatgccactccgtgatactcgccccctcatcatcgtcgctcgcgtggcctcccgaccgtcgtcttcacccgcaagatccacccccaccacccgattcgcccacctctctgtccaccaccgcaagatccaccgccgcacgcgcttcgccgcctcgggcgacctgcagctgcccagaaacatccacgaccacgagtgagtacacgacacgttcatggcatcgcatcatcagcatcaatccgtccgtccaggaacctgacggtgatttgtttctgcagccggatcttctggctgggcgatctgaactaccggctggacgcgtcgtacgagcgagcacacgagctgatctcggcgggaagctggcgtgagctagccgagacggaccagctgtagcgggagctgaggaaggggcgggcgttcgacgggtggatggagggcgtcctggagttcgcgccgacgtacaagtacgagctcggctcgaggaggagtttaatagtaagtattatcatccaagcaacgctaggatctggttctatggtgatgatgacccaaaagagcacacattctaagtgaataccttgatcagtttgaagccagccctgctcctaaatgttcggcagtggtgtgcatgaaggatttgagctccccgtgctctactcgccaggccagtcgacatcccagtcttgcgctacagatcggagagcaaagcagttgttgtcccaagaaccatatgctaccagaacaagaaagatgagagcggttggtggccaaggctcatgaaaaaggacttgtgttcttgaaggttgactggataaatggtaggatgaggatggcgaagatgttggatgttagtatttcacttttggttgattatattttttcttatgcgcctgacaaatctagatttgcaaccagacatgctttattcttgttcctgttttgttttccttatgtattaattccttaacttgtaatgcacacgatgttttccttatgtattaattccttaacttgtaatgcac

SEQ ID NO: 9617 - DNA, 1503 bp, Zea Mays
gaccatccgtgcaccatgttctgccattctgcctcccgtcaatcggtaacgtccgtgacatccgacggctcgcgtgcgttgaccccgccccccgttctgcccactcccgagccatcgccactccaccccgttctgcctcctcccaccgcgcccccgctctcgcaattgtcgccctcgcgtccgcaatcctcgcccccaagctcactcttccgagctcctatcggcacccatcctagccttcgacaccacgtcgtgcccaaccctaaaacccacgccgcgctggtagctccaccttctttcctcgccaccacgcccagatggaaggcgcgactgggatctcggagcacgtcttggatctcatcttccatccactctcccgcaatcctcgctccaaatgccgctgtcgctttgcccccaatctgtgcgacatcttcagatggacgctggggccatgccgagccccgacggtcgccattccaggatgccactccgtgatactcgccccctcatcatcgtcgctcgcgtggcctcccgaccgtcgtcttcacccgcaagatccacccccaccacccgattcgcccacctctctgtccaccaccgcaagatccaccgccgcacgcgcttcgccgcctcgggcgacctgcagctgcccagaaacatccacgaccacgagtgagtacacgacacgttcatggcatcgcatcatcagcatcaatccgtccgtccaggaacctgacggtgatttgtttctgcagccggatcttctggctgggcgatctgaactaccggctggacgcgtcgtacgagcgagcacacgagctgatctcggcgggaagctggcgtgagctagccgagacggaccagctgtagcgggagctgaggaaggggcgggcgttcgacgggtggatggagggcgtcctggagttcgcgccgacgtacaagtacgagctcggctcgaggaggagtttaatagtaagtattatcatccaagcaacgctaggatctggttctatggtgatgatgacccaaaagagcacacattctaagtgaataccttgatcagtttgaagccagccctgctcctaaatgttcggcagtggtgtgcatgaaggatttgagctccccgtgctctactcgccaggccagtcgacatcccagtcttgcgctacagatcggtgtgagagcaaagcagttgttgtcccaagaaccatatgctaccagaacaagaaagatgagagcggttggtggccaaggctcatgaaaaaggacttgtgttcttgaaggttgactggataaatggtaggatgaggatggcgaagatgttggatgttagtatttcacttttggttgattatattttttcttatgcgcctgacaaatctagatttgcaaccagacatgctttattcttgttcctgttttgttttccttatgtattaattccttaacttgtaatgcacacgatgttttccttatgtattaattccttaacttgtaatgcac

SEQ ID NO: 9618 - DNA, 713 bp, Zea Mays
accaaaaaaatgcggtggcacacacatactgtactgtagcatcggccatggtcgcggccgccgccaccaccacctccaactcggactgacctctccccggtcccagctcccgaacaaaaccctagccaaccctagtccgccgatggcgttcgcgccgccgcacctcctcccgctgccccctcctccggcggcggcatccacgcgggccgtctccgcgcgcaaccacggggggcgcacggcgcctgagctctcgggcccgaccccgcgcgtggtggtcgtcacctccggcaagggcggcgtcggaaagacgaccaccaccgccaacctcgccgcctctctcgcgcgcctcggcctcccagccgtcgccgtcgacgccgatgctggcctccgcaacctcgacctcctgctcggcctcgagaaccgcgtccacctcaccgccgccgacgtcctcgcgggagactgccgactcgaccaggcgctcgtccgccaccgcgcgctccacgacctccacctcctctgcctctccaagccccgctccaagctgcccctcgcgttcggatccaagaccctcacctgggtcgcggacgcgctacgacgctcgaccagcccacccgcattcatcctcatcgactgccccgcagggatttccactatccagagataccactactactgtctaatccattagttagaagggtgaactgaaataggat

SEQ ID NO: 9619 - DNA, 943 bp, Zea Mays
atgctctttcagtgtaatgctaatcagctgaaggaactatgcaatagttcagtatcatcttcagtattaattccccaccttaacaaccttgtgcaacagactatgtttcagcaggatctaatcatgaacctacttagtaacttgcaacaaagtgagaaagttgatggaacacaaccaataatatcttctcaagtccgaacaatggagaatgataaagctgatacagttaactctgtgaaggaacggtcattacttgttaaaatttcagagttgcagtctaggatgataatactgactgatgaattaattgcagctaagctaaaacatgttcagttgcagcaagagctaaatgcactgtactgccgagaagaaattgtggatatcagggatgaggataacgaagaaacataatgaggatccatgccgtatgaattatccgcctctctctgagatgcataaattacctgcctctccctgaggtcaatggagaacaggagaaggaaagcggcggggagaacaagagaagaaaagtggaggtgccgcaaatatttgctggatctagagagtagctgcggttgtgttttttttctttgaaggttgtcttccccttgcttgctgtcatcagtcatcagtgtgtataaccgtctctttttcagtagttcgaggtttttttttgggtgactacaagatgaggcgtggtcatgctgctatttttctgtcatccccatcattggaagtagctgtgattatgtagtacgtaggctaccggggtggttaatctatgtagaattgcaggtgactgcataataaattgtattttatgtagcaataggatgtatattaaatattggcgcattcgttgatataatatcatatagggctatttgcaaacatccaaacaaggttgtttgcatatatctaataataaagtatgtatctactc

SEQ ID NO: 9620 - DNA, 2633 bp, Zea Mays
gtcgagcgtagcagggcgcattctacggccgtaaatggcgatgaccatgcgtggctttcactcccaagtttcgcttcgcctcagacagagtgcagggccgcgggtagctagcgtcgtcgtcttctttcgcggcctcttcccccggccggcccggccctcctatatataaacgcatacagcctcgtcggcctccacccagagcggcggcactgagagagcagggcacagggcgagatcgcgctgcccattgcgcttgcgccgtcctttccttcttttctccggtagtccggtaacttcgttctgggccctctcggccatggccggctactccatggccgccgtcgcccttgccggcatcgccctagcgctcgccgccgcgacgacgacgcaggtggcgtcggccgccggcgggcacgactaccgcgaggcgctgagcaagagcatcctctacttcgaggcgcagcggtccgggcggctccccggcagccagagggtcgcctggcgcgccgactccgggctgctcgacggcaaggccaacggggtggatctggtgggcggctactacgacgccggcgacaacgtcaagttcggcctgccgatggcgttcacggtcaccatgatgtcctggagcgtcatcgagtacggcgaccagatggcggcggccggcgagctcggccacgccaccgacgccatcaagtggggcacggactacctggtcaaggcgcacccggagcccaacgtgttgtacggagaggtcggcgacggtgactcggaccacgactgctggatgcggccggaggacatgacgacgagccgccaggcgtaccgccttgacccccagaatcccggctccgaactcgccggggagaccgcggcggcaatggcggcggcctcgctcgtgttccgcagctccaaccccggctacgccaacactctcctccagcactccaagcagctgttcgatttcgccgacaagtaccggggccggtacgacagcagcatcacggtggcgcgccagtactacgcctcgtccagcgggtacggggacgagctgctgtgggcggcggcgtggctgcacgaggcgacgggcgacgcgcggtacctggactacctggccaacaacgccgacgcgctgggcggcaccggctggtccatcaaccagttcggctgggacgtcaagtaccccggcgtgcaggtcctggccgccatgacgcttctgcggcggcggggagacgccggcgccggcgcgcacgccgacgtgctgcagcggtacaagcagcaggcggacctcttcgcgtgctcctgcctcggccggggcgggcccaacagcgtgcgccggacgcccggcggcatggtctaccaccagaactggaacaacgtgcagttcgtcaccagcgccgcgttcctgctcgccgcctacgccgaccacctcgccgcggccggccagggcgcgcggtgcccggccggcgggaccgcgcagccgtcggagctgctggcgttcgccaggtcccaggtggactacatcctcgggagcaacccgagggcgacgagctatatggtcggttacggcgccacgtacccgcggcaggtgcaccaccgcggcgcgtccatcgtgtccgtcagggccaacccctcgttcgtcagctgccaggccggatacagcagctggtaccaccgccgcgctgccaaccccaacctgatcgtcggcgccaccgtcggcgggcccgacgagtatgacaacttcgccgacgagagggacaactacgagcagacggaggccaccacctacaacaacgcgccgctcatgggcgtgctcgctcgactggctgccggtcacggcggtggcggtggcaagtttggtcatcactcgctcgccgccgatgtttcttcatcgacatccatcaatgacaccaatcgcacctcactgccatctccttctccggattcagaacacccgtcggcgtggcccatcgagatcgagcagaacgcgacggcgtcgtggacgaagcagggcaagacgtaccgccggtacgcagtgacggtgaccaacaggtcgcccaagaccgtccacgagctccacatcggcatctccaagctctacggccaggtgtggggcgttgacaaggcgcggtacggctacgtgctcccgagctggataccgtcgctgctcgccggcaagagcgccgtgttcgtctacgtccaggctgcgccaccggccgacgtctgggtcaccggctacaagctcatctgagatggcgcccctgtggtgaacgtcctgtcctgagtagtgtccctgcccgtgtgtggttgtgtggaaggagtgaaatgaaggtttgctagtttaagaggacaacgagtgatgtggctagtatcaacctcggtcatcctcattgtccgttaatataaaagctaagcagttcactagcagctatagtgttgttcgtatagttgtgtggtgattgaaattggaataattagatggtgaattgtacgctacaacaacaacatattggaataatttgagattctgaaaagtgtgagtttgggtagatgcgcaacttttgctctcttttttgtcattttcttgcacgtagttttactctgcagatgttatttgaccatatgaatccaag

SEQ ID NO: 9621 - DNA, 1610 bp, Zea Mays
atgaacgaacaagagaagagaatagacgacacggagaggggggaggagccgcgagcaagaatgtttagaagaggatctcctaggatgaacctgatccaagctgcagctatgcaaagagtatcccctagatctactactaacaagcgcaagaagagaacatcaccaaaagttggtcgtcttagagcaaactggaatagtggactagaaaagggtttagttcaaattcttcaagaccacaacaatgactgttataagggccaaaatgggtggtcatcggaagcatggaatagaattgtcaagttattccatgagaaattcccttatgtcacatttacaaaatgtcaaatccaagataaagagaaagagttaaagagagactacaaggctcttaaagaggcaagacaacaaagtggggtatcatgggatgagcggttgtgtagaatagaggcaaaagaacccatttggaataacctcaccactagtaacgagagacttaagaagtttcggactaaatctttcccactatttgaggctttaggagagctacatgatggtatgttatctatgtttttctttatcttagtattgagcctcttatttttatcctagtattgaagtcttaaagacttacaacgcttcttggtttagggaatattgctgagggaaccatgaattttacttctattgagccttctcgacctccagtcacacaaccttgtcaaggtgctgctacacatccttctcaagctgcttttacgctcacacagccttttcaacccgctttcacacaaccttctcaacccgctttcacacaaccttctcaagctgctttcacacagccttctcaagccgctttcgcataaccttctcaagctgctttcgcacatccttctcaagctacaatcacacaagccatttctaatgaagatgatgaccttagagtattagatctaatagcccctacatcaatgagcaaaagggcaaaaaatgttggtgctggtagttcaaggacaagaattgacaagcgtggacaagatgggaaggtggttgaaatgatggaaaggtttctagagatgaaagaaaacaagatgaggtggagaaaagggtgacaactaatgcaaatgaggatgatttccctactacaacatgcattgctattgtggatggaatggaagagctttctgatgatgagaaggttgatgcttatgatgtgtttaaggacgcccaaaatagggccattttcatgactaccaaagatgctacacgcataaaatggttgaggaagaagattgctagaacatgatatgtgttgtttgaaacttgagggctcaaagaaaatgcaacgaagaatttggaagaccttgaaattattactagcaattgtttgaaagcaatctagtaggcgaactttcagttggaacatgtcatagcacttgtgaaatcttcattttttataagcacctatgaatgtgatccttcttgtcattaaatcaagactacaaagatggatgtttatttaatttgacataagcacctctgaatgtaatacttcttgttattaaatcaggactagaacgatgaatgttttttctaagcacttttgaatgcta

SEQ ID NO: 9622 - DNA, 2078 bp, Zea Mays
tacaggaaatttattcgattaaattgcctgggaatccaaagcttggagagggaaaacccgaaaatcaaaatcatgccataatatttactcgtggaaatgcagtgcaaactattgatatgaatcaggataactactttgaggaggcacttaaaatgagaaacctgcttgaggagttctctctgaagcgtggcaagcattacccttctattcttggtgttagggagcatgtcttcacgggaagtgtttcctccctggcctcatttatgtctaatcaggagacaagttttgtgacattaggacagcgtgttcttgctaacccgctgaaagtgagaatgcactatggtcatccagatgtttttgatagaatttttcatataacaaggggtggaattagtaaggcctctcgcagcatcaatatcagtgaggatatatatgcaggattcaactcaactctgcgtcaaggatgcataactcatcatgaatatattcaggccttatctggtgttggagaatcaattcaaaatagagcggatatactgcagaacgcagccttgaatgctgctctgaacactcaatttcttttccagattggtgtatttactgctgttcccatgattcttggtttcatccttgaatcaggtgttttaacggcttttgttcagtttattacaatgcagttccaaatgtgctctgtattttttactttctcacttggaacaagaacccactactttggccgtgcaatattacatggaggtgcaaagtatagagcaaccggtagaggttttgtggtacgacatatcaagtttgctgagaactaccgtatttattctcgaagccattttgtgaaagggatggaggttgcacttttgttggtgatcttcctagcgtatgggtttaacaatggtggagcagttggctatattttactctctataagcagttggattatggcattgtcttggctttttgctccctatttatttaacccatctggatttgaatggcagaagattgttgaggatttcagagactggacaaattggctgttttatcgaggtggtattggtgttaaaggagaagaaagctgggaagcttggtgggaagaagaactgcaacatatttacagcattcgagggaggatactggaaaccatattaagcctgaggtttttcattttccaattcggagttgtttaccacatgaatgctagcggaggaagtacagctttattggtgtattggatttcttgggctgtgcttggtggccttttcatcctcctcttggtctttggtttaaaccccaaggccatggtacatttccaattgttcctgcgtttggtcaaaagtgtagcgttattgatggttttggctgctctggtccctggcaattttgtttacgaaactcagtgtgagagatgtttttgcttccattctagcatttgtgccaactgggtggggaatcatttcgattgccatggcatggaaacctgtcgtgaagaaattgggtttgtggaaaactgttcgtgccctagctcgcctctatgatgctggaatggggatggtcattttcatacccatagccatttgctcgtggtttccattcatatccactttccagacgcgacttctgttcaaccaggcgttcagcagaggtttggagatatctctgatccttgctggcaacaatccaaatgctgggatctgatggtggcagttccggccttgcttcattaatctgtggacctttcgtacttgaattaatcctcacttctcagttaacagtagcgatgtacatatctgatatctctatgttcaccggagttgtttgccgtgggtataaatatcaacggctatatttctagagttcaccggcttgtacctgtatttttgaacgggtgaactttgtatggcccttcttttgacattgacatgtgctgattacgtggaaaaattgcttttttaggtcgcttcgaacttcgtttttagcaggatacttcagtatccacatgtttttcccgaaatcccggatgggcttgagtaattatttttctagcaacttttctaaaaatataaaaa

SEQ ID NO: 9623 - DNA, 1470 bp, Zea Mays
ggacggccggccggccgggccagaaactgcgctgaccggcatcactccgacgagcttgaggtgctcctctcagcacaaggcagccaccaccaccagagccacagccacaggcacagccaccctgcttctccggtgatccctccgcagctcagcagctctctgctaacgatgcaagacctagggttccaatggagcaactgcggcggcggcttcctagacacctcaccgtccacgccgccgacgaacgggcagctgcagcacgatggccacgacgacgacaagatcgaggcggagggcacgcttattactaactcgtcaaggccatcgtgtgcgggcacagccacgatagccgccagctgccacgacgtcgtcctccacggcggcggcggcggcggcaccgtgctcccgaccataaacatctcgctgacgacgacgacgacgacgcacacgcaggcgcagcagcagcagcgaccgttcctggcggcgccgccgcctctcccgggcgacgcgttcgagatactactggcctcgtcgaggctgtgcaagaccctgctgcttagccaagctgctgcttcttcttcttcttcttcggtgctgctccacgacgacggcacgatcagcacggtgccttcgctgagatcggagtcggagcatgtggcctatggctatggcggcggccctcctcctcctgctcctgccgctgctcatcgtccccgaggacgacgaccatccgttgacaactacaagcagcagatgggcgccgccgcctgtgccgcgggagcaggccgccagtggagcgcggagcacggagggcgagccgccgcctgtgaagaaagggcggcagcggcaccagcacgccgcccggtggtggtgccatggaagaagcctcgactcgagcagcgctccggctccggctccggctccggctcctccaccaccatcctcccttctttcgaggtacggaaagagaagttaggggaccggatcgctgccctccagcagctcgtctcgccattcggcaagaccgataccgcgtctgtgctcatggaggccattggctacatcaagttcctccaagaccaagtcgagactttgagccgcccctacttgaagtcgtccagaagtagcaagaagcccaggccgacgcaccagcgggggtgttggaacgccagcgctgcaggggaggagcaggagcaggaggagacgacgacgaggaggcggcggcctgacctccgcagcagagggctctgcctcgtgcccctctcctgcacgtcctacgtcaccaacgagaacggggcctgggttccttcccaattttaattttaggggagactactagctatagagatcagaggagcagagacaacactgtaccacgaactaatccacggttaatatcacctcacatctctgctctgctcatgttgttgtctgtgtctctttgccttggcccttggccgtaaataccag

SEQ ID NO: 9624 - DNA, 1183 bp, Zea Mays
tcagcgtcgacgacgtcaattccacgcagaagcaactccgaagcgaattcttcagctgatgggcgcgaagggagttagcatatctcatatcaagagccatcttcagatgtacagagcctccatctccagcagcagcagtacccatcatcagcccagcctccagaagtcgacatcaaccgcagcgagcaacaacaagcgcgtgttcttcacgcgtgaagattgtgcgtcacaggaaggcaacgctccagcttcagacaagaacatctataccaccacggtccgtggttgcggccagtactcatcaccgtaccaaatcagaccgtcgctacagcaagtgttcagatgctgggaacaaaagagagggcgtgttgcttggaactccgacgtgctaacaacagagaagggggtgattattaggccaagtcacactaggaagcacgagacgcagcagcacacgggatgcgacctcacgctgtcgatcgggctgtgggaggacgcgagcagcagcgacgacgccgacggctcgagctccatcagcgaggagctgctgcctgctccggcagcgggcggcgctcgccgcgtcgccgccgtagtgaaggaggaggaggagagcaagccggcggctctgaacctggacctgaccatctcgtcgtcctggctggcctgacgacgtacgccggcggacggctggtggcgttatgcgtacgtggccggcgtaggtacaaatacgtacatactatacgcggactcttgcagatcgagcagcagactgtgtgatcagggcatcggtactaggactactgtatattttcgtgtcgtcctgcccactccgttctagccactctctttttttttttcttattagatcatctgtacaacattttcgggtccgttcgattaggaacggccgcctgggcttcagacgacggtgggtgaggaatttctgcggccctttttccttgtccggggagaaggcgctgtatacctcagttcctcacatgtcatcgtctgatcgattgagcatatacttagtatgttattagttctggcagctatatatttcagtgaatgacagaggacagatatgtttatatatatagtcttttatttttgctagcagcagctgtatatttcagtcaacaactagcaaaagtcatccagtacagtacgtccaacaaaatca

SEQ ID NO: 9625 - DNA, 1206 bp, Zea Mays
ctactgtggatagtcttggagaagctagctgagtgagcatgtttgactggactagaagcaactccgaagcgaattcttcagctgatgggcgcgaagggagttagcatatctcatatcaagagccatcttcagatgtacagagcctccatctccagcagcagcagtacccatcatcagcccagcctccagaagtcgacatcaaccgcagcgagcaacaacaagcgcgtgttcttcacgcgtgaagattgtgcgtcacaggaaggcaacgctccagcttcagacaagaacatctataccaccacggtccgtggttgcggccagtactcatcaccgtaccaaataccgtcgctacagcaagtgttcagatgctgggaacaaaagagagggcgtgttgcttggaactccgacgtgctaacaacagagaagggggtgattattaggccaagtcacactaggaagcacgagacgcagcagcacacgggatgcgacctcacgctgtcgatcgggctgtgggaggacgcgagcagcagcgacgacgccgacggctcgagctccatcagcgaggagctgctgcctgctccggcagcgggcggcgctcgccgcgtcgccgccgtagtgaaggaggaggaggagagcaagccggcggctctgaacctggacctgaccatctcgtcgtcctggctggcctgacgacgtacgccggcggacggctggtggcgttatgcgtacgtggccggcgtaggtacaaatacgtacatactatacgcggactcttgcagatcgagcagcagactgtgtgatcagggcatcggtactaggactactgtatattttcgtgtcgtcctgcccactccgttctagccactctctttttttttttcttattagatcatctgtacaacattttcgggtccgttcgattaggaacggccgcctgggcttcagacgacggtgggtgaggaatttctgcggccctttttccttgtccggggagaaggcgctgtatacctcagttcctcacatgtcatcgtctgatcgattgagcatatacttagtatgttattagttctggcagctatatatttcagtgaatgacagaggacagatatgtttatatatatagtcttttatttttgctagcagcagctgtatatttcagtcaacaactagcaaaagtcatccagtacagtacgtccaacaaaatca

SEQ ID NO: 9626 - DNA, 1648 bp, Zea Mays
tttaggtcaatgatggctcttgcttgtccaatatgcaatgtgtgttgactcctgaaacagaaggctatgaccagatagactctgtcactactggagcatctgtactagttgagggagttgttgcaagcagccaaggcggtaagcaaaaagtggagttgaaggtttcaaagatcactgtgattggtaagagtgaccccacatcttttcctatacagaagaaacgggcatcaagagagttccttagaactgtagcccatctccgtcctcggacaaacacttttggtgcagtggcaagagtgagaaatgctctggcatacgcaactcataaattctttcaagacaatggatttgtttgggtttcaagcccaattattactgcctcagattgtgaaggagctggggagcagttttacgtgactactttgctttcgaatagcaccgaaggtggttccctactcaaagatattcctgcgaccaaggatggaagggttgattggtcacaggatttcttctgcaaaccagcatttctgacagtatctggacagctcaatggtgaaacatatgcttcagctctatctgatggctgaaaattcaaacactgcaaggcatctggctgaattttggatgattgaacctgagcttgcctttgcggatctaaatgatgacatggcttgtgcaactgcatatctccagtatgtagtaaagtatattctagagaactgcaaagaggatatggatttcttcaatacatgggttgagaaaggcatcatagatcgattaaatgatgtagtagagaagaactttgttcacttgtcttacactgatgctgtcgagctactacttgggtccaagaagaaatttgagtttccggtaaagtggggtttggatcttcaaagtgagcacgagcgatatatcacagaagttgcctttgatgggcgccctgtaataatcagagattacccaaaggaaatcaaagctttctatatgagagaaaatgatgatgggaagacagttgctgcaatggatttgttggttcctcgggttggtgagcttattgggggaagccagagggaagagcgtcttgattaccttgaagcccgactagacgagcaaaatctgaacaaggagagctactggtggtatctggacctacggcgatatggatcagttccccacgccggtttcggtcttggatttgagcggcttgtacagtttgctactggaatagacaacatcagagacgccatcccatttccccgagttcctggctcagccgagttttaggcttcctttcgaatgtaggaattttatggggatggtatatgaatttcacaggaaatggttcaaaaacacatgaattatcttttaatccaaaggaggccttagcgccccgaaagtgttgtcatttgtttcatcattgtacagagttgagctgagactcgtggttaatcgagccaaccagtgttgtggcatgcttctccaaatatatatccagcaggtgctcctgactcactccatcttgcttgcagtcgttgacgaaggcttgcttcactcacccgacgatcctaaaccatgctatctccagcagtcttactatctcatcccctaaaacagtgtaatctacatattttgtgagtctatatatacg

SEQ ID NO: 9627 - DNA, 3602 bp, Zea Mays
  misc_feature (3601)..(3602): n is a, c, g, or t
tttcgttcaaaatcgcgcggtcaaatccgagctcggggccatcgccgtcgccgcgcctcccatcccgcgaagatgagctacgcggcgtacaagatgatgcatttgcccaccggaatcgaccattgcgctgccggcttcatcacccactcccccgccgacgctgccgccttctccacgcccgcgcccgcgcccaccgccgccgctggacccgacggcgatattgactccactgcggctagggcaccccggcgagtgggtcctacccccaacctggttgtgtcggcggctaacgtgctcgaggtgtatgccgtgagggccgaggtcgcgactggggccgaggatgcgggtaattcttcgtctaccggcaccatcctggatggtatctccggggctcgactggaacttgtgtgccattacaggtgcaaacaaatggctcttgcctctttgcattcacttttagctgtaaatttcaggcttcacggtaacattgaatcgatggctgtgttgtccgatggcacagagaataggcgagactccattgcagttacgtttaacgatgcaaaaataacatgtctggagtttgatgacagcatcaatggcctgcggacaagctcaatgcattgttttgaaggccctgaatggttccatctgaaaaggggcagggaatcatttgcctggggtcctatcataaaaggggatcctcaaggcagatgtggtgctgtacttgtttatggattacagataataattttgaaagcagctcaggttgggcagagcttagtaggagaggatgaacctacacgcgtgttgagttccactgctgttcggattgaatcttcgtatgtgattgatttacgtgatctagaaatgaatcacatcaaagactttacatttgtgcatggttatattgagcctgtgttggtcatacttcatgagcgagagcctacatgggctgggcgtatctcatcgaagagccaaacatgcatgctatctgcgtttagtataagcatgggtttaaagcaacatccgatgatatggtctgctgctaaacttccacatgatgcatatcaacttcttgcagtgccccctcctataagtggcattcttgtgatctgtgcaaattcaatccattatcatagtcagtccacttcttgttcacttgccttgaacagtttctcatcacagcctgacggaagcccagagattcttaaaacaagttttcatgttgagcttgatgtagctaaagcaacatggttatcccatgacattgtgatgttttcatcaaagaatggagaaatactattactaacagtggtttatgatgggcgagctgtgcaaagattagatcttatgaaatccaaagcatctgttcttagttcgggtgctacaactcttggaagttcgttcatatttcttggcagtcgtcttgcagatagccttcttgtgcaattttcatgtggcatgccaacatcggttctgcctgatctaacagatgagcctgctgatattgaaagtgatctgcctttctcaaagcgcctaaagaggattccctctgatgttctacaagatgttactagtgttgaggaactttcttttcataataaggcagtgccaaatattgtagattcagcagagaagatctcatttgttgtgagagatgctctgatcaatgttggtcctctgaaagattttgcatatggtttaagaactaattctgatcccaacgcagcaggcattgcgaagcaaagcaattatgagctggtgtgttgttctgggcatggaaaaaatggaacgctctcggcccttcaacaatctatccgtccagatttaattaccgaggtggaactaccaagttgcacaggtatttggacagtttactacaagagttctcgtggaaatacaactgacaataatgaatatcatgcttatttgataataagcctagaaagccgcacaatggtgcttcagacaggtgatgatcttggagaggtcactgaaacagttgactataatgttcaagggagcacaattgctgctggtaacttgtttgggaggtgtcgcgtcatacaggtatatgccaagggtgctcgtgtgcttgatggttccttcatgacacaagagctaaacttttctatgcatacttccgaatcgtcattgaattctgagcctcttgcagctgcatctgcttcaattgcagatccatatgttctcttgaaaatgagtgatggatccattcgacttctcataggagatccttcaacctgtactatttctataaatgctcctgccatattcgcaagctcaagtgagcggatatcagcatgtacactatactgtgacagaggacctgagccatggcttagaaagacccatactgatgcatggttatccactgatgttggagaggctattgatgataatgacaattcttctcacgacctgtctgatatatattgcataatttgttatgaaagcggtaaactggaaatttttgaagtacccagttttaaacgtgtgttctctgtggataattttgtttctggaccagctatcttgtttgatgtgttttctcgtaattctactaaggattctggaataggggatcgagatgcttctaaagtttctgtgaagaaagaggaagcagcaaacattaagatagttgagcttgcaatgcatagatggtctgggcagttcagccggccattcctctttggattattgaatgatgggacattgttgtgttatcacgcatattattttgaaggctcagaaagcaatgtgcaatgtgctcctttctcacctcatggtggttcaccggatattggcaatgccactgattcaagactcagaaatttgagattttgtcgagtttcaatagatatctcatcacgagatgacatatcatgtcttgtacgaccaagaataacaattttcaacaatgttggaggttacgagggattatttcttggtggcccaaggccaacctgggtttttgtttgtcgacagcgatttcgggtgcatccacagttatgcgacggtccaattgtagcctttactgttctccacaatgtcaattgttgccgtggccttatttatgtgacatctcagggttttctgaagatatgtcagttgccatctgcatataactatgacaactactggcctgttcaaaaggtccccttgcatggcactccacatcaggtcacatattatggagagcagtcactttatccgcttattgtgtcagttcctcaggttcgccccttaaatcaagttctttcttctatggctgatcaagaattgggtctgcacatggagaacgatgttacaagtggtggtgacctccaagaggtctatactgttgatgaatttgaagttcgtattatggagttgggaaaatccaatggacgttgggagacaaggtccaccattccgatgcaatcatttgaaaacgctttaacagtgcgcatcgttaccttgcaaaacacatctacgaaggaaaatgaaaccctgatggccattggaactgcttatgttcaaggggaggatgttgctgctagaggacgggtgcttctgttctctttcagtaaaagtgaaaatnn

SEQ ID NO: 9628 - DNA, 3082 bp, Zea Mays
atgcgggatgcgagggctccgcagttccagaggcggggccagggcggcgtcggcgtcgtcctcctcccgctgatgctcctcctcgcaggcaccgccagcggccagcagcagatccagccgcccccggtacctccggcggacctgccggacgtggagaggcggctcaacaacctgaccgaccacgtcgccaccaccatctccgacaagttccgcttctgcgtcgccgacccgaaggaggactggaacgaggcgttcaactacacatcggacctcagcttcgtggatcgctgccttaccgagacccaaggcgacctgcctcagcgtctctgcggccccgatgaagtcaagttctacttctcaagcttgtacgaccgcgatggggacaagaacatcaacctcaagacaaacataaactgcaacatgtcttcttggggcaagggatgcgatgccggatgggcctgcgccaccgatccagttccagaccgccccagcaaccgtggtagcaacgatatcccgctgagaacaagcagctgccaggcatgctgcgagggcttcttctgcccccgcggcctcacttgcatgctccgcactattgcagattgggttccacagctgaggagaggtgcgttgtgcctgctgcttcttgtcatatacaactgctcagacaaattcctcagcatccgtgaacggaggaaagcaaggtcaagggagaatgccatccggctagctcgccagcagctaaaggcgcaggagggatggaaagcggcgaaacagtttgccaggaggcatgtgagtggcatgcagggtcatctttcacgcacgttttcgcggaggaggtcgtttcgtcagcaggtagacgcagacaagtctagccatagggtgcaggaagcgccgctgatgggtcaggtccagatgcaggaaatgtcggattctgctgtgtttgcttctgagagcgcaaatgagataacagaggcgatgccatcagtcattgtagatgtcagtgatggggaagttgttgctacaaatgaaaatcctgcgccgaaaggaaaacatagatcaacccacacacaagtgttcaagtatgcgtatggcgagattgagaaggagaaattccagcagcgacaggacaacaagaatctaacttttactggggtgatcgccatggtgaaggaccagcagaaggagataactaggcctttgctcaaggttgagttcagagacctgacactgatgctagggaagaagaagctgctgaggtctatcaatggtgaactccggccggggcgtgtaactgctgtcatgggcccatcaggggctggcaagaccacatttctcaatgccgtcactgggaaggtgaacggctacaagatgacaggttctgttcttgttaatggaaagaatcttaatatccgttcctacaaaaaggtcattggatttgtgccacaagatgacattgttcatggaaacttaacggtggaggaaaacctctggttcagtgcaaagtgcaggctatcagcaagcatgaagcatcgcgacaaggtgctcctagtggagagagtgatagattctctggatcttcagggaatcagaaattcattggttggcacagttgaaaagcgtgggatttctggcgggcagaggaagcgtgtcaatgtgggcatcgagatggtgatggagccgtcgcttctaatcctggatgaaccaacatctggcctggatagctcctcgtcacaacttctcctcagagcccttcggcatgaggcgctccaaggcgtgaacgtctgtgctgttgttcatcaaccgagctacacgctgtacaacatgttcgacgatttgatactcctcgcaaaaggggggttgatggtctacaatggcccagtaaagacggtcgaggagtacttcacagctcttggaatccatgttcctgaccgcgtaaaccccccagaccactacatcgacattctcgagggcattgtgaagcctgattcttctgccatcaaagcgaagcacctaccagtgcattggatgctacacaatggctacgaagtaccaagtgacatgcaagatgatgtcaaggaaatcggtgaacaagccccacaattcaggtccagctcctcgacatctggctcgccctctcctcactgcctccccatcagaaatgcatttgcagaagagcgtgaccgtctcgaacagcgtttgtcaaaaccgaaggacttgtccagcagaaaaacaccagggatcttcatgcagtacaaatattacttgggaagggttacgaaacagcggctgcgtgaagctaggctgctcatggttgatttcctgatactaggcctagctggtatctgcttagggacgatagcaaagctcagtgacaaaacattcgggatgcctggctacatatacactataattgcagtctctcttttgtgcaagatcgcagcactgcggtcgttttcgttggagcgattgcagtacttcagagagagagaatctgggatgagctctctggcatacttccttgctagggacacgattgatcatttcagtactgttgtgaagccgatcatttacctgtctatgttctactacttcaataacccaagatcaacaattgctgataactacattgtgctcctcgcgcttgtgtactgtgtgactgggataggatacacttttgccatctgcttcagtcctggctcagcacagctggagattgtgctactcaaaatgggcattggagggcttcataattgtaaatgccaagaagtatcctggagtttggcttataacccgctgtggcctgttgtttcagagtcaatttgatattcacaactacaagctctgcattttgattttgttcatgtatggtctgttcttcaggatggtggcatttgctgcaatgattttactgaagaagagatgaatgtactctagatgtaacatttagttcatctctaatatcttcattcatttttacatgtgtaaaacaattctgatgaaaggttttagagcactgacccttgtacagatgagaaaaaaggcaataggaattcatttttttctaccattattgtttcgtaca

SEQ ID NO: 9629 - DNA, 3146 bp, Zea Mays
atgcgggatgcgagggctccgcagttccagaggcggggccagggcggcgtcggcgtcgtcctcctcccgctgatgctcctcctcgcaggcaccgccagcggccagcagcagatccagccgcccccggtacctccggcggacctgccggacgtggagaggcggctcaacaacctgaccgaccacgtcgccaccaccatctccgacaagttccgcttctgcgtcgccgacccgaggactggaacgaggcgttcaactacacatcggacctcagcttcgtggatcgctgccttaccgagacccaaggcgacctgcctcagcgtctctgcggccccgatgaagtcaagttctacttctcaagcttgtacgaccgcgatggggacaagaacatcaacctcaagacaaacataaactgcaacatgtcttcttggggcaagggatgcgatgccggatgggcctgcgccaccgatccagttccagaccgccccagcaaccgtggtagcaacgatatcccgctgagaacaagcagctgccaggcatgctgcgagggcttcttctgcccccgcggcctcacttgcatgctccgcactattgcagattgggttccacagctgaggagaggtgcgttgtgcctgctgcttcttgtcatatacaactgctcagacaaattcctcagcatccgtgaacggaggaaagcaaggtcaagggagaatgccatccggctagctcgccagcagctaaaggcgcaggagggatggaaagcggcgaaacagtttgccaggaggcatgtgagtggcatgcagggtcatctttcacgcacgttttcgcggaggaggtcgtttcgtcagcaggtagacgcagacaagtctagccatagggtgcaggaagcgccgctgatgggtcaggtccagatgcaggaaatgtcggattctgctgtgtttgcttctgagagcgcaaatgagataacagaggcgatgccatcagtcattgtagatgtcagtgatggggaagttgttgctacaaatgaaaatcctgcgccgaaaggaaaacatagatcaacccacacacaagtgttcaagtatgcgtatggcgagattgagaaggagaaattccagcagcgacaggacaacaagaatctaacttttactggggtgatcgccatggtgaaggaccagcagaaggagataactaggcctttgctcaaggttgagttcagagacctgacactgatgctagggaagaagaagctgctgaggtctatcaatggtgaactccggccggggcgtgtaactgctgtcatgggcccatcaggggctggcaagaccacatttctcaatgccgtcactgggaaggtgaacggctacaagatgacaggttctgttcttgttaatggaaagaatcttaatatccgttcctacaaaaaggtcattggatttgtgccacaagatgacattgttcatggaaacttaacggtggaggaaaacctctggttcagtgcaaagtgcaggctatcagcaagcatgaagcatcgcgacaaggtgctcctagtggagagagtgatagattctctggatcttcagggaatcagaaattcattggttggcacagttgaaaagcgtgggatttctggcgggcagaggaagcgtgtcaatgtgggcatcgagatggtgatggagccgtcgcttctaatcctggatgaaccaacatctggcctggatagctcctcgtcacaacttctcctcagagcccttcggcatgaggcgctccaaggcgtgaacgtctgtgctgttgttcatcaaccgagctacacgctgtacaacatgttcgacgatttgatactcctcgcaaaaggggggttgatggtctacaatggcccagtaaagacggtcgaggagtacttcacagctcttggaatccatgttcctgaccgcgtaaaccccccagaccactacatcgacattctcgagggcattgtgaagcctgattcttctgccatcaaagcgaagcacctaccagtgcattggatgctacacaatggctacgaagtaccaagtgacatgcaagatgatgtcaaggaaatcggtgaacaagccccacaattcaggtccagctcctcgacatctggctcgccctctcctcactgcctccccatcagaaatgcatttgcagaagagcgtgaccgtctcgaacagcgtttgtcaaaaccgaaggacttgtccagcagaaaaacaccagggatcttcatgcagtacaaatattacttgggaagggttacgaaacagcggctgcgtgaagctaggctgctcatggttgatttcctgatactaggcctagctggtatctgcttagggacgatagcaaagctcagtgacaaaacattcgggatgcctggctacatatacactataattgcagtctctcttttgtgcaagatcgcagcactgcggtcgttttcgttggagcgattgcagtacttcagagagagagaatctgggatgagctctctggcatacttccttgctagggacacgattgatcatttcagtactgttgtgaagccgatcatttacctgtctatgttctactacttcaataacccaagatcaacaattgctgataactacattgtgctcctcgcgcttgtgtactgtgtgactgggataggatacacttttgccatctgcttcagtcctggctcagcacagctgtgttctgcgcttatcccggttgttctaaccctgttatccactcaaaagagtactccaacattaatcaggagattgtgctactcaaaatgggcattggagggcttcataattgtaaatgccaagaagtatcctggagtttggcttataacccgctgtggcctgttgtttcagagtcaatttgatattcacaactacaagctctgcattttgattttgttcatgtatggtctgttcttcaggatggtggcatttgctgcaatgattttactgaagaagagatgaatgtactctagatgtaacatttagttcatctctaatatcttcattcatttttacatgtgtaaaacaattctgatgaaaggttttagagcactgacccttgtacagatgagaaaaaaggcaataggaattcatttttttctaccattattgtttcgtaca

SEQ ID NO: 9630 - DNA, 3603 bp, Zea Mays
tactacactttcacaagcagtactatactactatagacgtcgtcctagctcgtttccccgctcgccatcgcaatacgtttccacgccgtcgcgcccgcacccgcccagcccttcctcctcacgtcacgagccacgcttgctgccgtctcggcgctcctcctccgcctcggaatgcgggatgcgagggctccgcagttccagaggcggggccagggcggcgtcggcgtcgtcctcctcccgctgatgctcctcctcgcaggcaccgccagcggccagcagcagatccagccgcccccggtacctccggcggacctgccggacgtggagaggcggctcaacaacctgaccgaccacgtcgccaccaccatctccgacaagttccgcttctgcgtcgccgacccgaaggaggactggaacgaggcgttcaactacacatcggacctcagcttcgtggatcgctgccttaccgagacccaaggcgacctgcctcagcgtctctgcggccccgatgaagtcaagttctacttctcaagcttgtacgaccgcgatggggacaagaacatcaacctcaagacaaacataaactgcaacatgtcttcttggggcaagggatgcgatgccggatgggcctgcgccaccgatccagttccagaccgccccagcaaccgtggtagcaacgatatcccgctgagaacaagcagctgccaggcatgctgcgagggcttcttctgcccccgcggcctcacttgcatgctcccttgcccactaggctcatactgtccacgcgccacggcgaatcacacaactgggctctgcgacccgtacaagtatcagatagctccaaactcgactgatagctgtggaggtgctgacatgtgggctgatatccagagcacagaagaaatcttctgcccagctggttactactgtccaagcacgaccagaaaagataactgtagcagtgggcactattgcagattgggttccacagctgaggagaagtgcataataaaggcctcctgcgaagaaaacgcagagaacgagcacatcgccattcttggagcttgcatagtgggtgcgttgtgcctgctgcttcttgtcatatacaactgctcagacaaattcctcagcatccgtgaacggaggaaagcaaggtcaagggagaatgccatccggctagctcgccagcagctaaaggcgcaggagggatggaaagcggcgaaacagtttgccaggaggcatgtgagtggcatgcagggtcatctttcacgcacgttttcgcggaggaggtcgtttcgtcagcaggtagacgcagacaagtctagccatagggtgcaggaagcgccgctgatgggtcaggtccagatgcaggaaatgtcggattctgctgtgtttgcttctgagagcgcaaatgagataacagaggcgatgccatcagtcattgtagatgtcagtgatggggaagttgttgctacaaatgaaaatcctgcgccgaaaggaaaacatagatcaacccacacacaagtgttcaagtatgcgtatggcgagattgagaaggagaaattccagcagcgacaggacaacaagaatctaacttttactggggtgatcgccatggtgaaggaccagcagaaggagataactaggcctttgctcaaggttgagttcagagacctgacactgatgctagggaagaagaagctgctgaggtctatcaatggtgaactccggccggggcgtgtaactgctgtcatgggcccatcaggggctggcaagaccacatttctcaatgccgtcactgggaaggtgaacggctacaagatgacaggttctgttcttgttaatggaaagaatcttaatatccgttcctacaaaaaggtcattggatttgtgccacaagatgacattgttcatggaaacttaacggtggaggaaaacctctggttcagtgcaaagtgcaggctatcagcaagcatgaagcatcgcgacaaggtgctcctagtggagagagtgatagattctctggatcttcagggaatcagaaattcattggttggcacagttgaaaagcgtgggatttctggcgggcagaggaagcgtgtcaatgtgggcatcgagatggtgatggagccgtcgcttctaatcctggatgaaccaacatctggcctggatagctcctcgtcacaacttctcctcagagcccttcggcatgaggcgctccaaggcgtgaacgtctgtgctgttgttcatcaaccgagctacacgctgtacaacatgttcgacgatttgatactcctcgcaaaaggggggttgatggtctacaatggcccagtaaagacggtcgaggagtacttcacagctcttggaatccatgttcctgaccgcgtaaaccccccagaccactacatcgacattctcgagggcattgtgaagcctgattcttctgccatcaaagcgaagcacctaccagtgcattggatgctacacaatggctacgaagtaccaagtgacatgcaagatgatgtcaaggaaatcggtgaacaagccccacaattcaggtccagctcctcgacatctggctcgccctctcctcactgcctccccatcagaaatgcatttgcagaagagcgtgaccgtctcgaacagcgtttgtcaaaaccgaaggacttgtccagcagaaaaacaccagggatcttcatgcagtacaaatattacttgggaagggttacgaaacagcggctgcgtgaagctaggctgctcatggttgatttcctgatactaggcctagctggtatctgcttagggacgatagcaaagctcagtgacaaaacattcgggatgcctggctacatatacactataattgcagtctctcttttgtgcaagatcgcagcactgcggtcgttttcgttggagcgattgcagtacttcagagagagagaatctgggatgagctctctggcatacttccttgctagggacacgattgatcatttcagtactgttgtgaagccgatcatttacctgtctatgttctactacttcaataacccaagatcaacaattgctgataactacattgtgctcctcgcgcttgtgtactgtgtgactgggataggatacacttttgccatctgcttcagtcctggctcagcacagctgtgttctgcgcttatcccggttgttctaaccctgttatccactcaaaagagtactccaacattaatcaggagattgtgctactcaaaatgggcattggagggcttcataattgtaaatgccaagaagtatcctggagtttggcttataacccgctgtggcctgttgtttcagagtcaatttgatattcacaactacaagctctgcattttgattttgttcatgtatggtctgttcttcaggatggtggcatttgctgcaatgattttactgaagaagagatgaatgtactctagatgtaacatttagttcatctctaatatcttcattcatttttacatgtgtaaaacaattctgatgaaaggttttagagcactgacccttgtacagatgagaaaaaaggcaataggaattcatttttttctaccattattgtttcgtaca

SEQ ID NO: 9631 - DNA, 3618 bp, Zea Mays
gtttccccgctcgccatcgcaatacgtttccacgccgtcgcgcccgcacccgcccagcccttcctcctcacgtcacgagccacgcttgctgccgtctcggcgctcctcctccgcctcggaatgcgggatgcgagggctccgcagttccagaggcggggccagggcggcgtcggcgtcgtcctcctcccgctgatgctcctcctcgcaggcaccgccagcggccagcagcagatccagccgcccccggtacctccggcggacctgccggacgtggagaggcggctcaacaacctgaccgaccacgtcgccaccaccatctccgacaagttccgcttctgcgtcgccgacccgaaggaggactggaacgaggcgttcaactacacatcggacctcagcttcgtggatcgctgccttaccgagacccaaggcgacctgcctcagcgtctctgcggccccgatgaagtcaagttctacttctcaagcttgtacgaccgcgatggggacaagaacatcaacctcaagacaaacataaactgcaacatgtcttcttggggcaagggatgcgatgccggatgggcctgcgccaccgatccagttccagaccgccccagcaaccgtggtagcaacgatatcccgctgagaacaagcagctgccaggcatgctgcgagggcttcttctgcccccgcggcctcacttgcatgctcccttgcccactaggctcatactgtccacgcgccacggcgaatcacacaactgggctctgcgacccgtacaagtatcagatagctccaaactcgactgatagctgtggaggtgctgacatgtgggctgatatccagagcacagaagaaatcttctgcccagctggttactactgtccaagcacgaccagaaaagataactgtagcagtgggcactattgcagattgggttccacagctgaggagaagtgcataataaaggcctcctgcgaagaaaacgcagagaacgagcacatcgccattcttggagcttgcatagtgtagtaatcaactgcactgcacccggttcttgtgtttgcgtatgattcaaaccttttgccattctagggtgcgttgtgcctgctgcttcttgtcatatacaactgctcagacaaattcctcagcatccgtgaacggaggaaagcaaggtcaagggagaatgccatccggctagctcgccagcagctaaaggcgcaggagggatggaaagcggcgaaacagtttgccaggaggcatgtgagtggcatgcagggtcatctttcacgcacgttttcgcggaggaggtcgtttcgtcagcaggtagacgcagacaagtctagccatagggtgcaggaagcgccgctgatgggtcaggtccagatgcaggaaatgtcggattctgctgtgtttgcttctgagagcgcaaatgagataacagaggcgatgccatcagtcattgtagatgtcagtgatggggaagttgttgctacaaatgaaaatcctgcgccgaaaggaaaacatagatcaacccacacacaagtgttcaagtatgcgtatggcgagattgagaaggagaaattccagcagcgacaggacaacaagaatctaacttttactggggtgatcgccatggtgaaggaccagcagaaggagataactaggcctttgctcaaggttgagttcagagacctgacactgatgctagggaagaagaagctgctgaggtctatcaatggtgaactccggccggggcgtgtaactgctgtcatgggcccatcaggggctggcaagaccacatttctcaatgccgtcactgggaaggtgaacggctacaagatgacaggttctgttcttgttaatggaaagaatcttaatatccgttcctacaaaaaggtcattggatttgtgccacaagatgacattgttcatggaaacttaacggtggaggaaaacctctggttcagtgcaaagtgcaggctatcagcaagcatgaagcatcgcgacaaggtgctcctagtggagagagtgatagattctctggatcttcagggaatcagaaattcattggttggcacagttgaaaagcgtgggatttctggcgggcagaggaagcgtgtcaatgtgggcatcgagatggtgatggagccgtcgcttctaatcctggatgaaccaacatctggcctggatagctcctcgtcacaacttctcctcagagcccttcggcatgaggcgctccaaggcgtgaacgtctgtgctgttgttcatcaaccgagctacacgctgtacaacatgttcgacgatttgatactcctcgcaaaaggggggttgatggtctacaatggcccagtaaagacggtcgaggagtacttcacagctcttggaatccatgttcctgaccgcgtaaaccccccagaccactacatcgacattctcgagggcattgtgaagcctgattcttctgccatcaaagcgaagcacctaccagtgcattggatgctacacaatggctacgaagtaccaagtgacatgcaagatgatgtcaaggaaatcggtgaacaagccccacaattcaggtccagctcctcgacatctggctcgccctctcctcactgcctccccatcagaaatgcatttgcagaagagcgtgaccgtctcgaacagcgtttgtcaaaaccgaaggacttgtccagcagaaaaacaccagggatcttcatgcagtacaaatattacttgggaagggttacgaaacagcggctgcgtgaagctaggctgctcatggttgatttcctgatactaggcctagctggtatctgcttagggacgatagcaaagctcagtgacaaaacattcgggatgcctggctacatatacactataattgcagtctctcttttgtgcaagatcgcagcactgcggtcgttttcgttggagcgattgcagtacttcagagagagagaatctgggatgagctctctggcatacttccttgctagggacacgattgatcatttcagtactgttgtgaagccgatcatttacctgtctatgttctactacttcaataacccaagatcaacaattgctgataactacattgtgctcctcgcgcttgtgtactgtgtgactgggataggatacacttttgccatctgcttcagtcctggctcagcacagctgtgttctgcgcttatcccggttgttctaaccctgttatccactcaaaagagtactccaacattaatcaggagattgtgctactcaaaatgggcattggagggcttcataattgtaaatgccaagaagtatcctggagtttggcttataacccgctgtggcctgttgtttcagagtcaatttgatattcacaactacaagctctgcattttgattttgttcatgtatggtctgttcttcaggatggtggcatttgctgcaatgattttactgaagaagagatgaatgtactctagatgtaacatttagttcatctctaatatcttcattcatttttacatgtgtaaaacaattctgatgaaaggttttagagcactgacccttgtacagatgagaaaaaaggcaataggaattcatttttttctaccattattgtttcgtaca

SEQ ID NO: 9632 - DNA, 3927 bp, Zea Mays
ccgcggcggcggctgacgggctgagaataggagagagaaacccctctttctcttcctctccttctcgacgaacccgtcccacaagcacgtgcgagccaaggcagacaagagcgaggtggagagagggagagagagtgagtgagagaggaaaaccccgcccccgtccaggcaaccttcgtcgacgcatacggcggaggccacagaggcgccacgcgagggagccccgccgcagcagcggccgcgaattcggcacccccggatctccttgccggcgcccggggccccgatcgcctcctccccatggtcgtgcccctccgggcgttctcctcgcgcgggcgcctgccatgtcggacctcgcttccaccagcaaggataaacttgcgtattttagaataaaggagctcaaagatatcttaaatcagctggggttgccgaagcatggaaagaagcaggaccttgttgacagggtattggcagaattatcagatgagcaaggtcaacgccatcatggatggggaaggaaaaatgctcttacaagggaggcggtggcaaaagttgttgatgacacatacagcaggaaaatgcaagtatgtgctcctgaccttccctctaggagtcacagtgggtcagatttcaatcattttaggcccaaagaggaagccactgacttctactatgtggagactaaggtccgctgcctttgcaatagcacaatgctaaatgacaagattatcaagtgtgaagatggcaaatgccagctgtggcagcattttacctgcgtactcattccagatacacccacggagggtgctggccctgatattccacctcatttttattgtgaactgtgccgactgaaccgggcagatccgttttgggtgactacagcaaatccactactacctgtgaaatttatctcatctggtgttggaaatgatggagcaagcgcacctcaaattgtggagaagaccttccaactttcccgagcagaaagagaaacagtccagaggccagaatacgatctccaggtttggtgcattcttgtaaatgacaaagtccagttcaggatgcaatggcctcaatatgcagaattgcaagtgaacggtattcctgtacgagtaatgaccaggcctggttctcagttactagggataaatggacgtgatgatgggccactggtaaccacatgcagtagagaagggattaataaaattagcttatcaagagttgatgctcgaaccttttgctttggagttcgaattgttaggaggaggactgttcctcaggtattaagcttgatcccaaaggaaggtgaaggggagtcttttgaggatgctcttgctcgtgttcgtcgttgtcttggaggtggaggtgctacagacaatgctgatagtgatagcgatctggaagtggttactgaatctgttacagtcaaccttcgttgcccttggcaatgcccaatatgtttaaataattactctctcgagaacttgatgattgatccttatttcaatcggattacttctttgttgcacaattgcagtgaagatgttaatgaacttgatgttaaacctgatgggtcatggcgtgtgatgggtgatgccgctaccagagatttatctcagtggcatatgcctgatggtactctttgtgactcaaaggaagatacaaaccctggtgtcgcaagtgttaatgagttcaagagagagggtgcttctgatgaacatagaactttgaaacttggaattaaaaaaaaccctattggattatggcaggttagcagtaaagcagatgatatgaaacctgtggttagaaatcacatccaaaataacactgggttttcaacaccaaacattgtgcctatgatcagtagccccactgggagttacagagatggcgaagatgtaagtgtgaaccaagaagggggtggtattcaatttgatatatcattgaaccaagagtttgacagttttgcccacaactttggtcagacatacaatacagaggatagaccacaacatccacaccataatgctgcagatgtcattgttcttagtgattctgatgaagaaaatgacccgactgttcagccgccagctgtctatgaaaatactcctacaaatgatgacagttttcctttcgtcactgatgctgccggatctggatatcctgaaaggtaccaggaggatgctagtgttggtacaagtggtcttggtttattgaggcagaacactggtgaatttgaaataaataactggcaaatgctttcttacccacaaccagagcaagggtttcagttttttgtgactgatactgatgttggcaatccttttgttgctccacataattcctttactattgcaccagaagactactctcttggctgtaatgttggaatagaggacccctctgcagctcacgatgtttcaatttgccgaaacagtaatgatgtgcatggaagcttggttgataacccactggcattaacagtccaccctaacgattggaggatatcgcttacgcttgccgctggtggagggggcaatgaagagtctacaagtgttggcggtctaaaatcacaaccaaaagtttcatcgaaagaggcaggagttgaacctttacttgatgctgcttctgctcttggaagcatgaacaatgacagatgcactggatctaatctaaatcctaaaaggattgaaaatatattttctcatcctcgccaaccgcggtctgttaggcctcgtctgtgtttgtcattagatactgattcagagtagtttggacatcacactgggatagctgaatttgctattaatctggtaaagttggcttccagaatcttgatcgttactgtggagggctatctggttattctggttgatacaaagagatacaccagtgtggatgctttgttgcattaacctggtaagattcaagtgttctatatgatccaagtgggatctgcatagagttcatctaatggttggtacaggatattttctaactgggagtggtttaatgtggctagtggagcaggctgtacattgtccctgacatttactgggtataaaggaatagggggccatcacttggcacaagacaaatacatgtgttgtgtgtaccatcattgtatttagggtttgggtgctaatttagatgtttattaccctgacgtttgatggagaataaattattccttgaagtggtggtcaataaacagagagcccttcggttttgagtcggagctgctgaccgttcatctgttcttgttgcgaagtggtcgctcccgctttggttcagctgcagctttcatggcgggactgaccatgccaaagtcttgtgtagcagagggcaatctccatgatgtcatgcgatacaagtgatctgtattttgccctacaggatgacaagtttctttgtgcaacatgctgtattattggttcgatactctttactatgtgggttcagtgcaggtgcataggacataccggcagtctccggactttgctgtgatctgcctggagcagagcatctgccgcctatcgcacatgtaaacttgcaggtggtggtggattgtaccagctttatgaaccctggcgattgaaaggcgctgggattgagtactgggtacgaagaacgtcgtttctttcagaacatgaaagcacatcgtcggtgcacagatggtgaaatcatgctctgggcgcaaataatatatctgttgctcggctgaccatcctctgatgccagcttgatcggtagaagacaggttgttaaagtaattgtaggaatgtaacttttagggctagtttggaaacttaaaattcacttttagatttatgagaattgagtagaaagttagcttatttccctggagaggatttaagttttcagactagtccttagctataagacatcatgagaatatca

SEQ ID NO: 9633 - DNA, 2822 bp, Zea Mays
gcgaagattgctttgttcgactttgatctcgctctcgctcgcaactcacctctccctctccactcgcacctcgccgccgtctacccgtctgctgtcctagccccgcttctgccgcagccatgaacccttccatgccaccgcctccgccgcgtaaccctaattccttttcgtcatccgcctccatgccaccttctccgctcccaaacccctcgccgccgacggcacggccggaggcggcgtccgagcccgacttgtcttcagcggaggtgaacggtcgcgctaaccctagcacatcctcctcgatgcctccgcctccgcctcaaaaacccgccccaccggcaccgcagatggaagcgaaggcggcagaggctgagggaggcgctgtcccgagcccgagcgtgagcggttcgtcagcgaaggaggcgcccaacagcagcggggcctcctccggcaacaacgtgatggaggaagcggccgcgtcgccggtggagcggcagagggctcgcgcgccgtacgccattcccgagtggagcaccgcgccgagccaacccttcttccttgaggtgctcaaggacgggacgatcgttgatcagcttgacgtgtccaagaaaggagcttacatgtttggtcgaattgatctgtgcgattttgtattggagcatccaaccatttctcgattccatgctgttttgcagttcagaaatgatgggaaggttttcctttttgatcttggaagcacacatggatcctttatcaataaaaatctgatcaagaagaagctgtacacagagattcatgttggagatgtaattcgatttgggcaatcatcacggctgtacatttttcaaggaccatctgagctaatgcctccagaaaaagacttgcagaagcttcgggatgctagaattcagcaagacatgcttgatcgtgaagcttccattttacgtgcaaaaactcaagcagctttggcagagggaatctcatggggtatgacagatgatgcaatagaagagtctgcagaggatgatgcagatgaaattacttggcaaacctacaaaggtcagcttactgatagacaagagaaaactcgtagcaagatagtaaaacgaatggagaagattgccaacatgaaaaaagaaattgatgcaataagagttaaggacatttctcaaggtgggctaacccaaggtcaacaaacacaaattgcacgaaatgaacaacggatgtctcagattatggaggagctagataatctagaagaaactttaaatgacagtatacgggaaagtattggtgctcgttctggaaaggcaaagcgtggcagctataaagcaagtctcgaggaagaagatgacgttcttagtacatgataagattgcccgaattcagaaggagctctctgatcttcaggatgagctggacagagtagtgtacctactgaaaatagctgaccctacgggagaagcagctcgtaagagggatctaaagccaagagaagcgaaacctccaacatctaatgataatccaagactagaatcaaagaaacaaaataaaattggaaaagctacagctgaggagaaacccaaggattcttctagcgaagtgggcacagataaacctgctaaattacagacagatatctccaagaaccaagaagatggcagcaaacctgcattcgccatgccaaaacctcaatggcttggtgacaaaaggatcataaaacctgaagaaaaccttataaatgaagaaaagtctgatgcagaggaacctgataattttgtggactacaaagaccggaaaattattctttcttcaggcagtgaaaagaagcttgaagaggctgcccctgggcttattttacggaagagaaagtctgctgacgagtcagttgctagcgaggcaaattcatcttcggttgaaagtgaagcatcagttgctgatgctgtggcccttctgcttaagcataaacgtggtctacaaacctcagaagaaatggagaatgagactgaaccatattctagcaagaccgaagggaagaagtcgaaacaaaaacgtgtattgggcccagcaagaccagatttccttgaagccagacaagactctgaaacatgggtgccacctgaaggtcaaactggtgatgggcgcactgcattgaatgaccgtttgggttattgaaaagctcttccagcaacagttcccttgtggagaagtgcagtatcgtgcctatggttttgagcctgtttggggctccatattctgtgaagacaacgcaatagaagttaagaatgcttattctgttgatggcaagtttggtgaaggaactattcattgactttttagggcgctagtgggactgtagctcggctaatcctctcacactctaagggtttgttcggttattttcaatctatatggattggaggggattgatataaattgggagagattttgagtactaggaattgaaaccccatcaattcctctcaatccatttcgattgtggtagaaccgaacatgacctaaagaggatatttaggctataaagaggttcaatgtgttaaggcctattaggtctaggcctactgcacacacacacacacacacatatatatatatatatatatatatatatagggaagaggtaatggaagccctgggcttcccctactaatggaagccccagccaggacgcggtcaacccagcacccgcgcagccatgcagtcaacagccagaaatccaggacgataagcgcgtaaggcaatatacgaatgcatatatatatggataaagatgcgtaaaccatgcataaaggaatcttttg

SEQ ID NO: 9634 - DNA, 2740 bp, Zea Mays
gcgcgcggccggtctcaggcccgcaggacagcgcacagtactcctccgatcctcgtgtgtgattaattccacagagcagtacgtcgtagatagatatcttgatactgtgagtgtggggtacgtacggtatggcgccagcccagcatcaagcagcagctgacagaggcagcagggaagagatcgtcatcgtggacctcgagagcgaggccggcgccgacgacgcggcggcggcggcggcgacgatgcagcggcaggactcgctgtacgcggccgcaacaagagccgccggcgccaaccaccacggacagctgggccaggacgctgcggctggcgttccagtgcgtggggatcctgtacggcgacattggcacgtcgccgctgttcgtgtactcgagcacgttccgggacggcgtcggccacccggacgacctgctcggcgcgctctccctcatcatctacagcttcctgctcttcaccgtcatcaagtacgtctacatcgccctgcgagccaacgacgacggtgacggtggcactttcgccctctacactctcatctcgcgccacgccaaggtgagcctgatcccgaaccagcaggtggaggaggacgacctcgtcgccaagtacaaccgcgacaagccgccggcgacgctccggcgagcggaatggatgaaggagctgctcgagacgaacaaggccgtcaaggtctcgctcttcctcatcaccatgctcgccaccgccatggtcatcagcgacgctatcctcacccctgcaatctcagtcctctccgccgttggcggtctcaaagagaaggcgacttttctcaccacagacgagatagtctggatcaccgtggggattctggtggcgctgttcgcgatccagaggttcgggacggacaaggtcggctacctgttcgcgccgatcatcctgctctggctgctcctgatcgcggccgtcggcttctacaacctggtgaagtacgacaccggcgctctcagggcgttcaacatgaagtacatcatcgactacttcagacggaacaagaagaaagggtgggcctcccttggaggcatactcctttgcttcacaggcacagaagccctttttgctgatctaggctacttcagcatcaggtcgatccagctgagctttggcttcggtttagtcccctcagtgctgctcgcttacatcgggcaagcagcgtacttgagagtgcacccggaggatgtggccaacactttctacagatccactccaatctccttgttctggccaacgttcattctcgcgctagcagcatcgatcattgggagccaagccatgatctcctgcgccttcgcgacaatctcgcattcccagacactcggttgctttccgagggtaaagatactgcacacctcgaggcaatactcgggccaactatacatccctgaagtaaactacctgctgtgcttgggtgcttgcctcgtcacagttggcttcaggacaactgtcatcattggggaagctcatggtatatgcgttgttcttgtgatgatcgtcacaaccctgttgctgacgatcgtgatgctcctagtatggaagatcagcgtctggtggatcgtcgcgttcttccttgttttcatgtcgtccgagtcgatctatctatctgccatcctgtcccgattcgcgcacggcgcgtacgtgcccgtggcaatgtcggcggtcctgatggtggtgatggtcgtgtggcactacgtgcacgtgaacaagtacaggtttgagctcgagcactctatcccccgcgacaaagtgaaagagctccttgagcgcagcgacatacagagggtgccagggatcggcctcttctacaccgagctggttcagggcatacccccggtgttccgtcatctcatcgagaagatcccttccatccactcggtgctcattttcgtctccatgaagcacctgcccatcccatctgtcgacatgtcggagcgctttctctttagacaggtagacagagaagattacaaggtgttccagtgcgtggcacggtatgggtacagggaccccttcgaggaggccaaggacttcgttgacaaacttgtagagcatctccagtactacatccgggatgtcaacctctatggcctgggctgcgagccgatgatgaagcagtccttcagctactgcagttctcgcgctgagagctttggcagccatgaaaaaaccaaagtaaaggcagtctacgctgaggagatgctcacaccagcagagtcattctcggagcacgcgaggcaagctagtggaaagaacaagctttttacacaatttcagggagacaagatgaatatagtagagatgatgaagattcagcaggagcaacaggctgtccttgaagagatgagtaaaggtgtggtgtacatatttggagagagcgaggtggtggcaagaccccactcctcactcattaagaagatagctatcaactacatatactcttttcttagaaagaactccaggaatggtgagaagatgctgtcgatcccccgtcgacagatcctaaaggtcggagtctcatatgaaatctaaaaagtgtggatgaagaacaggatatctgattgcacacacaacttaatttgatgccaaagaaggactctgtattcatttgtttcatggaaaatcaatgtgcttgatttacttactacagcaatgatggatacagaaccttagttttatgcataagtgcttcattgat

SEQ ID NO: 9635 - DNA, 1387 bp, Zea Mays
tgcctctccatttccttttgctgccctcccctcttgcatcatccttgttcatcgtctctccagccgcgcgcccagcagcagcgttctcgatcgatcagtcgtcgatccggccgtgtgttcttcttctgtatcactatcaccttcaccgcttcacctattcggccggccagctgctgatatcttcttcttcgctgccgcctgctgccgattaatttattcactcgacggcagcgacttcatcgtctatcataggaagctgagcaaagaagacgtagggtgcagccgtgcaggaggaatagagatagagagcttcaggtatatatagcaggcaggcaggctgtgtggttgatccggtgatctatatcgatccgtcgaggatgtgcaccaggggccactggagaccgtcggaggacgagaagctgaaggagctcgtcgcgctctacggcccgcacaactggaacgccatcgccgagaagcttcaagggagatcagggaaaagctgcaggctgaggtggttcaaccagctggacccgaggatcaaccggagccccttctcagagcaggaggaggcgctgctcctggcgtcccaccgcgtccacggcaaccggtgggccgtcatcgccaggctcttcccggggcgcaccgacaacgccgtcaagaaccactggcatgtgatcatggcgcggcggtgcagggagcggatgaggctctcgaacaggggcggcgccgctgctggccagcatggtgccgtcgacaccggtgctgtggaagatggcagtaaccctaggaacgccaagaagctgaggcctgatgccagcagcgtggcctccttcctagacaagtaccgaagagaattttccgtcgtcgtcccgtttgctattaaccatgatcgcaagcagcaggactattgttcaactactaacgaagacgcaaacaaatcggttgaattctacgattttctccaagtgaatgcgaactcgagcgacaccaagtgtggttcgagcatcgaggagcaggaggagaaccgggatgatcaagccgaagggcaggtgcagttcatagacttcctggaggttggggtctctcatccccagtgatttatctgtattaatttctatatatatatatatatatatatttaactagggatgcatccaaagcaggttgtaatgctttgtgaaagacgcatatgctgcaaatggcaatcgtctgctagctaacaccaaacgtacttatagaggaagcagaatgcaccgcgtacatatatgacatgtaacttattgatatgtatacatatctgtccatatccgcgcgccgtttgggggccggtacacatgcaaaattattctgagataaatgaggaattaattattatttcatcatattt

SEQ ID NO: 9636 - DNA, 1225 bp, Zea Mays
ctcttctcttccttcgtcgtctcgtcgtcggcttctcgcatccgcctccgcctccgcctccgcctccgctccccgctgcgcgtcaccggaggagaggagagaaagtgagagaggggatccctccgacccgatccaccgacataacctccgccccctggatctcctccgtccccgcgcgacgccaggacagggttggcgaattgaatcagtaatatcagatattcagggatgttcccttcagttgtgccagctggttaattcgctattaccttctctgactgctcgtgcctgcatgtgtattgagaaggataccctggctgcgggacatccttagaaataaagctgttgcatttatgagttgaaactacatgttcttgcatcagttctggtaaaataattgggcaaggtaatgaaagaacccaataaaaaaagattgttaaaccgaattataagatgatggaacagcaaaacaaatagcattatatggatgtcttgcaccttctggctgcggcacttccttagaaataaagctgttgcgtttatgatttgaacctacgtgttcttgcattggttctggtaaaaaaatgggcaaggtaatgaaagaacccaataaaaaactaatagaatatattaaacgaattataagatgatggaacagcaaaacaaatagcattatatggatgtcttgcattttttatatattgaaagtagtaattgcagttagtggggatggcttcaatagcttgcatgtagagattgagagttagtcggtggtgatgtggcatctagtgaggatgacgtgcatgttgagattggaagctattggagggatgatttggcaattggcattagtggggggatgatctggatagtttgcagttgggtttgaaagctagtggtgctaagatatagatatagatttttgtttgtgaccctaatttttctataacattctatcggaaactggaacacaatacctattgcattgaggaaagttatatatatagactcaggggaaaccctaaccctaatggcccggcaacccaacagtggtgccgacccacacacacagtctaacatccccccgcattcgcaacgggggcaccgcacacgatgagactggagtagaagccgacgggttgaaattcctctgcagtcgcaacgtcgtgagggtgcgaatgttgcggttggagtagagaccggtgtagactccgagaaggacgaa

SEQ ID NO: 9637 - DNA, 2953 bp, Zea Mays
gacgagtcctcctctgtccattctctctcttctcttccttcgtcgtctcgtcgtcggcttctcgcatccgcctccgcctccgcctccgcctccgctccccgctgcgcgtcaccggaggagaggagagaaagtgagagaggggatccctccgacccgatccaccgacataacctccgccccctggatctcctccgtccccgcgcgacgccaggacagggttggcgaattgaatcagtaatatcagatattcagggatgttcccttcagttgtgccagctggttaattcgctattaccttctctgactgctcgtgcctgcatgtgtattgaggacataaatcatgagcacgtgtttgatctggttaaggaggttgccatggagcttgcagcgacaagcgcagtgagttctgtgaatctgctgaaactatcaagtttgttgagtctgtcaacgaacatggaattgtacacggaagctgtttcccttgagaatctcaaaacaagggcactacgatgcgagagtcgtgaagaactggatctagctgagcagatgattccactggtcaactatatgcatgaccatcttctcaaggaaaaacaacaacttagcatcaacggggtgcctattcctgctgatttttgctgtcccctttccttggagctgatgtccgatcctgttattgtagcgtctggacagacctatgagcgggtttatatcaagttgtggcttgatgagggttttactatctgcccgaaaacactccaaagacttggacactccaatttaatacctaattatactgtgaaggctctgatagctaactggtgtgaatcacatgacattaggcttcctgatcctatgaaatcattgaagttgaactttccttctgctgcctccttccttgaggatttgagtgctgcagatggcagccctctacatcctattgtcgtgtcaagggctaatattcctgggtccccagaagttgatgtgtatttgagaaacttgaatggagcatctcctccccatagtttggtcaatcagaattctcatgcgcatgcaaaccgtcatggtcatgaggtctcgacgagtcaaacttcagaaaaaacaaatggttctgtaccagatgtttcaagattatctcttgcaagttctgaagcaagagagtctagtttggaaggaaggcgtggtggttcgattgggcaaatatcagaacattctacggaggaagcattccaatcttctaatttggatagggatctgcaggacaacttagctaattcttctttgaatggtagccttccaaatagtggtcaacttgatggggaatgtgacaatggggtgacaagggttccaagcgataggacaaattacagtagcgatgcatctggcgaagttacaaatggtggtggtgcgcctgtagcctcctctgttcctcaaagggagcatttgatccctccaagactgggtatgggtactaaacaatttatcaggcgacaaccatcagacaggggtttcccaagaattatttcttcctcaacaatggatgcacgtagtgatctctctgccatcgagaatcaggttcggaagctgattgacgatttgaaaagtgattctatagatgttcagagatcagcagcatcagatcttcgtcttctgtctaagcacaacatggagaataggattgccattgcaaactgtggggctgtaaacttgctggttggtcgtcttcattcaccagatgccaaaacccaagaacatgctgtgacagctcttttgaatttgtcgatcaatgacaacaataaaattgctattgcaaatgctgacgctgttgatcctctcattcatgtcctcgagactgggaaccctgaagctaaagagaattcagcagcaactctattcagcctctcggttatcgaagaaaataaagtgaagattgggcgatctggtgccatcaagcctctagtagacttgctaggaaatggcacccctcgaggaaagagggatgcagctactgctttgtttaacttgtccatccttcatgagaataaagctcgtatcgtgcaagctgatgctgtgaatcacctagttgagcttatggatcctgctgctggaatggtcgacaaagctgtggctgtgttggcaaaccttgctacgattccagaaggaaggaatgcgattgggcaggcacgtggcattccagcccttgttgaagtcgttgagttgggttctgcaagagggaaggagaatgctgcggctgcgttgcttcagctctgtacaaacagcaacaggttttgcagtatagttcttcaagagggtgcagtgccccctctagtcgccctttcacagtcaggaacaccgcgggcaagagagaaggcacaagcgcttctgagctacttccgcagccaaagacatgggaattcagcaaggagatagccttctgttttttcccgttttttgttgtagtgtacattaagcgttgcattttatgcccatcatcgcgactgggctcctgtttactgttgttgattggcactggcagatgcgttggctggaattatgcagtgccctgtgctctgtttatagatggagattgttatgctcatctcatgtaagttttgtctgttgagatggtatctttccttttctcgtttttgaggtttttttttgtatagcttaaccattgataggaacttcgaacttacataatcaccgattttgccctgtatataagtatatttgattgtctgtgacctttggaattattatggttcgatggttgtacaaattatttgatccgcagtacaaataaggccatgtttggataaatactgcttcctcatttcaaattagaaagcgttttgacttttttagctatatagcttttatgatatatatttgtttctagatatgtatggtaaagcaatatagaaaatgtcaaaaatgtgttataatttag

SEQ ID NO: 9638 - DNA, 2809 bp, Zea Mays
caaatcacaatagctgctagcctgttactgcaggcctctctctctctgtcctctccccagcccgcctccgcttctcgccggactccggccgccgcccgcaacctgtgcctagggctcccgcttccgccacacctgcgcactcggccccggagacggctccttgacgagaggcctgtgggaggagttgcagctgggacgcccggtcggacttgcgtctccgcagctgggagatgctcagctcgtcggcgtccaggagggacgccgcgaggagcggcgcggagctccctcggccgcacgcggtggcagggatggcgcggagcggggagctgcccaagggcgccccctccgcgacggcccctgatgcggtgcggtgcgagggatggatggtgcgccacggccggaggaagatcgggaggtccttcttccacacgcgctacttcgtcctcgacaacggcgtgctcgcgtactacaagaagaagccgagggaccacatgatcccactcaagtcaattattattgatggaaattgcagagtggaggatagagggcttaaaacacatcatggtcaaatgatttatttgctatgcatttacaacaagaaagaaaaggagaaccaaatcacgatgggtggatacgatattgaagatgccctagcctggaagaggaagatagagcttctgattgatcaggatactacgacagctaaaaaccataaagcttttgcttcgttggactttgatatagatcttggaggaccattttcgttctctgaccatgacagcggacccgaagatgaagaagagccccgacccaccttgcttcgcaggacaactatagggaatggccctcctgattctgtacttgattggaccaaagaggctgacagtgggctgtcaaatcagaatgccaccagtcaggcttactccagaaagaactggaggcttcttagatgccagaatggattgcgcatctttgaagaacttgtggaggttgaataccttgcaagaagctatagtcgagcaatgagggctgtaggagtggtggaagcctcatgcgaggccatttttgggcttgtaatgagcatggatgcatcacgatatgaatgggattgtagcttccaatatgggagtttagttgaagaggtcgatggtcatactgcaatactgtaccatcgtctacaactgaactggttttcaatgttggtctggccacgagatctttgttatgtacgctattggcggcgcaacgatgatggaagctatgttgtgctgtttcgatctaccgaaaatcagaactgtgggcctcaaccaggatttgtgagagcttctatcgaaagtggaggtttcaagatttcccctctcaaaagcctcaatgggaggccccgcactcaagttcaacaccttatgcagattgatgttaggggatggggcgtgaactatttaccatcattccagtactactctttgctgcagatgctgaactgtgttgctggattgcgtgaatatttttcgcaaacagatgaaattcatacagttccaaggattccggtgatgcataccatggttaatgcggcctcaatgaaaaaggaccaaaaccttcaagaaccagactcgaagaccaaacaagctgataacaaacatttggatatggtagatgaagagtcggaagatgatgatgactatcaagttcctgatgctgatgtggaggaagaacctaccaaatctgacagtgatgctaagaactcagacccaatagatttgtcttggttttcgggcattattcgtcaggatacaaatgagaaaagtcgtaactgttgggcagtgcctgatagcaagatctttaaagttcgtagcaagaactttccacatgacaaatcaaaggtaccagcaggtaagtatctaatggagctcgtagcagttgactggtttaaggacgccaagcgcatggatcatgtcgctaggcggaaaggatctgcggttcaggttgccgctgagaagggaatgttcactttcctggtaaacatacaaattcctggaccaagtcattacagcttggtcctttattttgtctcaaactccttgaagaaaggatcgctgttgcagcgttttgccgatggtgatgatgattttagaaacagcagactgaagcttatcccatctgttccaaaggggtcttggatagtgcggcaaagtgttggaagcacaccttgcttgctggggaaagccgtggactgcagctatttgcgtggtcctgactacttagaagtggatgtagatatcggttcgtccgcggtagccaacggggtcctgggcttggtgtttggcgttgttaccaccttggtagtcgacatggcgtttcttatacaggcaaacacgtacgacgagctcccagagcagctcctaggcgctgcgcggctgtcacacatcgaaccttctgcggccgtgtatcctgtccttgacaacatttcctgaacgggacggacaaatcaacctgtgcagattctttcgttctttccgtccgccccgccacaaaaaggctctcccaatttgttcagccactgcagcattgtgcagctcgatacatttgaggttcagacagacagactgcagcagtccacaagtgccttgtacccttcatacagttttgccatttttttaggtcttttcttttacattttactttactcggtgtagtttgagcttcctacagatattgtaatgcaatagacacatcaaagtgagatatacagatacagcatggttcagaaacaagttcgtgtactttccgattcccgacccactgaaactcg

SEQ ID NO: 9639 - DNA, 2265 bp, Zea Mays
ttttggtccactgcaaaattgtgatttctgagccagccaggagcttgacagtcacagggatggagcagtacgaggtgctggagcagattgggaagggttcgttcggctcggcgctcctggtgaggcacaaggctgagaggaaaaggtatgtcttgaagaagatccgcctcgcacgccagaccgaccggtgccgccgatcagcacaccaggagatggagctcatcgcaaaagtaaggaatccttacattgtggaatacaaagatgcttgggtggagaagggttgctacgtgtgtattgtcattggttactgcgagggaggggacatgtcagaggccattaagaaggctaacagtaaccatttctcagaagagaaactttgtgtgtggcttgtgcagctcctgacggcacttgattacttgcatgccaatcatatccttcatcgtgatgttaagtgctcaaacatatttctcacaaaggatcaaaacataaggcttggttgtgggaactccaagttacatgtgccctgaacttcttgctgacattccatatggttccaagtctgacatatggtccctcggctgctgcatctatgagatggctgctttcaagcctccattcaaagcatttgatatgcaagcactgataaataagattaacaagtctgctgtacctcctctaccaacgatgtactctggtgcatttaggggactcgtcaaaagcatgctgcgcaaaagtccagatcatagaccaagagctgcagaactgcttaagcatccacaccttcagccatacgtgtttgaactccaattgaaatccactcctcgcaatttgttctctgctaagcttcctaccagatacgtcacaaataaggctgcggtttctgatgccgaagacaattgtccaccaaaatacagcaagagccattcatttaaattggacaggcatggtcgtcctggttctacaactcggaaagactgtccagaactaagtgaacaaatggagggattgtcagtccaagtcaccaagaatgttaatgatgaactgatacatgagaagtatccaaaagttacaacgtctcctgcacctactccgagaagagcttcatcgacaccaagacgacgactagaagcttcaaagacatttcatgctagaacagcacataaggagcaatctcaaaggtcaaggtcttcagcaaaccaagcgagtcaagcacggagagaatcactccccatgcgtatgatcaaaactcctgataagaggcaggccactgacattctcactagattgaaatctcctgacgtttcagtaaactctcctcgaatagacagaattgctgaattcccactggcatcctttgaaaccccattacatcgcatcacaaagctcacatcgccatctatcattgaccaatatattaccaaggacaagtgcactttccaagtgctccgaagcgatagcgaaaactacactgactctcctgacgtcgaccttcttggttctgacaattcacctaggagttcatcgaatttgaggcagaggaggtttgacacgaggtcttaccagcagagagctgaggctctagagggattgcttgagttcagtgctcaattgctacagcaggagaggtttgaggagttggggatcttgctgaagccatttggacccggtaaggcatctccaagagagacagccatatggttgtcaaggagtttgaaagaaactggattataaccagcggcctgtaagtgcaacactaaacctgcaatgactttgtatcttcacaagcttcaacctaccctgtacagttacagtattgtgattttttcacttgactggtctggtcttagtggaacactgcaacatgttgacatggttagttcggcaatcatctgctttctgtaaacctgtaataacatgcttgagaatttaccaatcagatgaaaaatagcttagatgcctgtgaatttgtatcttgaaatcatgtaaatcagcaagagttgacatttggagagcccctttctatgacgcagcttgatatcgttcattgtcattgcattttgtacttttcttcaggtcatgaaaacaatgaagtgttcatggtccttcagttttgttcttgatttatatgtatcttctacagaaaactggttcagagctggtgtttagggtccttcaatatatagaaaactggttcagagctgtcccttgctgctctgcacgatccatagataaacaatcaacatttgccaatttgctggtgtcagg

SEQ ID NO: 9640 - DNA, 3229 bp, Zea Mays
atggactctggacttctggagttggaatgcttcaacgcggtgctcaacatgtcggactgcctgaggctgcagtccctgcacacgaacaggaaccacgccgctgctacgtcccgagcggccgagccccgcagagaaagaacgcctcgcatgcaactgctcaaaccgaaggaagccgccacactcccgcgcgaggccctcgaggcccacatcgtctcgctggtccgccgatgcccgggcctcctcgcgctccgcagcgcgcacgcgcacctcacgcggctccgcctcccgcgcctcaccgccgccttcgcgctctcgaagctcctcgcctcctgcgtctcggcgcccgcaccagccgcagcccaagccgcggcgtcctcctacgcccgcaacctgttcgaccaaatccccgacccgaccgccttctgctacaactccctcatccgcgcgctccccgccgcgggctccgctcccgccctggccgtctaccgccgcatgctgcgggcggggtccccgcgtcccaacagcttcacgctcgcgttcgcgctcaaggcctgcgcggccgtgccagctcctggcgagggacggcagctgcacgcgcaggcgctccgccaggggctagcgactagcgcctacgtgcagaccgggctgctcaacctctacgccaagtgcgagcaggttgcgcttgcgaggactgtgtttgatggcatggccggggacaagaatcttgtcgcttggagcgcgatggtcagtgggtactcgagggtggggatggtgaatgaagcgctggggctgttccgggagatgcaggcggtgggtgtggagccggatgaggtcaccatggtcagtgtgatatccgcgtgcgccaaggcaggggcacttgatctggggaagtgggtgcatgcttatatcgataggaaaggtatcaccgtcgatctagagctgagcaccgctttgattgatatgtatgctaagtgtgggttgatagagcgggcgagaggagtgtttgatgcgatggtggagaaggataccaaggcatggagcgcaatgatagttggatttgcaattcatgggcttgtagaggatgcattgggacttttctcaagaatgctagagctcaaggtaagaacgctgcactgatatgtatctagagattggttaggtacctgctgattttgttggttaagttataatgaaactatactcattgacttgtatatgttgttcaatacaattggtcagcaataaaatctagtttatactgaagtatgctcaacttacttctccaaagaaaagcaatgatagttgacatattcaaactagtttccaatcattattaggatttcatatattacctccacaaaccagaaagtggttattacaattctcatttctcacccaagttctttgtgtgtatcacaaatattctaggtgaggcctaacaatgtcacctttatcggtgtgctgtccgcctgtgctcatagtgggttagtggaagatggacggcggtattggtccattatgcaaaatttgggaattaaaccttcaatggagaattatggctgcatggttgatctcctgtgtcgatctggccttctggatgatgcttactcctttgttattggcatgcctgtctcaccgaattcagtaatctggaggacacttctcgtggcttgtaaaagctcgaacaggattgacatagcagaatcagcaacaaagaggctccttgagttagaacctcacaatccagagaactacgttctgctctccaacttgtacgcatccaactcccagtgggacagagtgagctatctgaggagaaagatgaaaggcaagaatgttactgctattgctggacgtagttcgattgaaataaacggccacctgcatgagtttgtggtgagtgatgattcacaccctgaaatcagggagataaggctggttctcagagagatggcggatcgagtgcgacgagctggccacaaaccttggactgcagccgttctgcatgacgtcggtgaagaggaaaaggaagctgcgctttgtcaacacagtgaaaggctagccatcgcatatgggttgctaaagacaagagcccctcatgtcattcgggtggtgaagaacttgaggttttgccttgattgtcatgaagtggccaaaataataagcaaggcatacaaccgagaaatcgtcgttagggatcgtgttcgtttccacaaatttatgggaggaagttgttcctgtaaggacttttggtgatctttttttcttttcttattaatataatagcaaactaggtgagtgcccgtgcgttgcaacggcaacatataatatcaagatggcttatgtacaaatgtgtgtttcattgttatagtaccatgtccgtgcacaattatatttaatacccataaaaaaatatatgttctatacacatttggatcttctatacatatttagatctcgagatgtcccattcccttcatcaacaaaataagttcaagaaattttgtttgaggcctaaatgacctcagaacaaatgtttacgttctgacaaatattttttaagatcctagaacataaaagaaccacagattccaatctaaaaatcagcttgccggcattgacttggctccacgacgtcgttgtcactgccacacagaaacatcggtccttcgtagccgccacaatatgcactccatttgtgtgcaaaacaacgcaacaaaacggtccagcatatagcaataaaaggcaacaatcaaagacatttactaaaaacaatgttgatgcactaaacacttttgaaaaaaaaagaatgaaggtagtaaatgaaatgcataaacgttgaggaataaaatcaaattccctaggagttgatggtatatattaccactcaactcaataagtgcttttgtgcataacctacacatctgttgtttctaggcaaagtcaaattaataaagactaatggtattggttagcagagatgcagtagaccagtagaacattgaaggaattagtcaaagaccattttaaaaataactaacaagatattggttgcaaagtgaatgcaagtataactgtagtgaacacatgtcatattgtaatggtcatattgtaatggtgattaagtacgaaatttctatctcaaaatggatgtagtaggagcaacaaagatggtttactgttatgcacaaccagtgctagtgaacaagaatctgattgtgcatagaac

SEQ ID NO: 9641 - DNA, 2728 bp, Zea Mays
aataatgggagcctgcaactcgtgcgaggccacggcggtggcggcggcgccggggccggcgacggcggaggcgagggtggtgctcgcggacggcgcgctgcggcggttcccgggcggcacgcgggcgtcgcaggccgtgaaggcggccgccgccggggcggcctcgtggttcctgtgcagcgcggacgggctggagctcggcggcgccgtggtgcccgtgcggcccgaggaggcgctgcagcccgggcagctgtacttcgtgctccccgccgcgatgcggcgccgcccgctgcaggcggaggagatggccgcgctcgccatccgcgccagcgccgcgctggccggcgaccacgacggcccgctcgtgttcccggaggccgccgctgccgccggcgccggggcgcggtgcggcaaggggccagctcgcttcacccctttcggtctcggcggccgtcgggcccacgccgcagaagccccgacggcgctagccgcgctacgctacgctacgctacgcaccgcgtttctccgcttcagcggttcgcctctgcgccgcaagctcctagagatggcggcgaagtctggatacacacgccggctcccgctcaccggggagaccgctcctccacctcccagcgccgtcctctatgtggccaactgcgggcccgcggtgggagtgaccgacgccgacgtccgctcgacattcggcgccttcggggaggtcgcaggagtccaggctgccgacgacagcggcgcccgcatcatcgtccggttccacgagcccgccgccgcggaggccgccatggctgcgctccacgggcgcccctgcgacctccttgcgggtcgcgtgctgcacataaggtactcggtgcccgtgaagccaaaggctcgtcctgggggctctgtaccggtggctcacgcggcatcggagctcggaatccccgggatttacatggttcaggagttcgtgactgccgctgaggaacaggagttactttcagctgtggatagcaagacgtggaaaagactggcgaaaagacgagttcagcattacggttatgagtttctgtacgaaacaaggaatgttgattcgaagcagttcttgggtgaactgcctacttttgtttcaactgtccttgagaagattgcttcttttcctggtgtgaaggactgcgccaccagattagttgatcaattgaccgtaaatgaatatccttgtggtgtaggtttgtctccacatatagacacacactcagcatttgaggaaatgatttttagcctttctttggctggaacttgcatcatggagttcagaaaatatactaaaggcacttggcgtgctccaagtgtggtcgatggagttgatgaagatagcagtcaagagccagaatgcataaggaaagccattttcctacctcctcggtcaatgctattgatgtcaggagaaggtcgttatgcctggcatcactatataccacatcataaaatcgatgccgtgggtggtcaagtcatcaaaaggaattcaaggtgaggatggggccttgtgattgcgaatacaagcaattttgtgatgctcatagcaagagatgttaagctgagaaggctgatattttcaaaactacctgctgctacaaccattggcaagtctcataacataataacaatctgtcggtattttgtctcgcacaatcaaaatggtcaaggagcccaccgatcaaactcatatcaatttacagatgtgtcatctgacgtgtgtgcaaatgaatagatagagaaatgtagggaatagccagatgtaacttttgaaccttgtattcatctcgttgagattgagaattgcttgaacgagcctgtagtttgtcattattttttcctgatatctcgaaacaacaaagttctatttataatatgatgaaaaaaatgacaccattgtttttgctactgtcgaacttggtggaattggccttcgtaccaggacatttttctagataacctggtttcatcatttggttactcagtttaatgatctcaaaaatttattggtgttgagctttacaataaaatgtctccttcaggtttcatagatgcacataagcataaggagataacgtccagcacaaagcaaaaaaaaaagtaactcgatgatttttcatcttcatttgagtacgccatcttcaatatgaacaaattgctgtacacttcaccatgcatgtcaggtgtcttggtcttggactgcgactaaaagctgtatgaggctacatgcaccgagcaaatacctttgctggtcttgtaaacactcactgctcaccgcggcttgcaagacgccgcattcaagtattcaactaatgcgatatccttcctgcatgactgcatccaggtccaggccatcagggtctcaacctgcagggttatttcaccgctcacgagtagtgcgggagttcagtttgttgttcatatatatgtaaatgttccgaaatgccccaatttcgtcaaggtgacaaggtgtcaatgctgcagataaccaaaaggccaatctgtcatagcctgagctgatcacgtcatgggacatgaacaaacaccagatcagcaagctttccactgctgcagtactgattcatgtcagatgatttcatctctaccgtaatcaactacatgcagtaatgagtgttcatggccatttttagggtagctttgcaatgctgcatgctggactttaatccaactagaacct

SEQ ID NO: 9642 - DNA, 2552 bp, Zea Mays
gatcttggcaaacccacccgtctgttctcgtcgtggcggccgccctgtcgccgtgtccccaatccggctccgacaatcccacgcccagcagtccagctccagcaccatcagcgccgccctgcccctgtccctaatcccacgcggccacacccaggacccagcggcctgcgggctgcggcagtgcggctagcacaccacccgtccagccgtccagccgatctaggtctctatgtgtcctttgagtcttctctccatataaattcatcataaaagctcaaaagacctagatcggctttttcccccttgttcggcaaaggcgtttcggggtgttcatcgtggattgatcgatcatggcggagggggagacatcggcggaggaaaagaggaggcggacggggccaccagaggcgcaggagttggaggagacaaagaggaggcggacggggccaccagaggcgcaggagttggaggagcgcctggactctctcagggacaaaattgcggccgcaaggcttgtcgctggcagccgattcggcgaggagcagcgacggtccttgttgcgggagtggttgcgcctcgcatctgccaagttggatctggatctctcaggcatgagcgagttggaccgatcggcagaggcgttgccttggttggtgccgccggaggaggcagacaagaggacgacacacacgcggcaagaggtgcaggagttggaggagcgcatgacctgtctgcagttgctatccgaggacgcagcagatgacaggattctcgccagaagggagcttggagcagcagccgacgagttcctgctccgcttgacgacgcgtcaacgggccttggcgcgcgagtactcgcgcctcgccaacctgaagaggcctcccgatctctccggcatgactgaggccgaccggggggcggaggcggagaggctgagggaggagatgttgcagaaggcgcgtcaactccaggaccagggggacatgagcggcgcccgcgagtctgaaggtctggcacgcatcatcgacttcgatgtcaagcagggtggcgaatacctcaacagtatctgctgtgtcggcaacatctacaccttcgaccacacagaggagtcgcccgttggtccgatgagatttaccaacagaccctggcaagacaagatgtgtgtgaattgtgcgtcgataaacatcctatctgtcaagattgcatgctcggatatcgacttccccatccaagtctatggcaccgttgttgccagggactgcatcgactacaagtgtgtttacctcttccgccgagataatgaccattgccaactcatcagctctaataatcattgatcttgactggcccaaaacggggacttgcattgtggtacgatgctgattatgttcagactgatctctgggtcaaggatcgtcaagggcattgcaaacaattcagtaaggggatcgtgaggatcccaggcaatcaagtgtttgacaaatgtgagcctgaaacagtatctcttgctaccaggctcagtactgtggatgtgacatatgacgttgtggaatgtgcggtggaggcaactgttgcagctgaagttacacagggggaattctatggagcatgactgcccacaccaccagagcaagaggaggattgtgctgtttgatagccaagtaggaggtgataaatgtcatggtttgattcaattgatgcgacctgttgtatcggtctctgtgatggacaagctgaaaattttcgcaacgaccgctgctggtgtctctacaggcgttgaagttactcctagatggaacggtggacacgaattcgtactcactttaggtgacgctacgatttgtgtgaaggttacttggtcgatggtagatccacggctttaaatgggttcgcctgttcgttgttaagcatcatcggtggaagtgtagtagtgttgcattggaagggtttattctactcttgttatttgtctaaatgcatcattttttttgtgtggtggtggtggggttgtgttgctgggttctcaggtaatattttaaataaaacctgaaaatccaggcagagctcaccttttggtgcggccatggtggtcttcaccttttgctgggttctcatgcttgtttgaggcagatatgatgagtggctacaaacagactggagcgttcaggtgtgcgagcatccagagctgaacggaattgtgattctaactgactagaaactgaagagcctcctttcagttttaaattgtgcatcggaattgtagaattgttatcttagctttcaaggcatcggcacttcaaccttcggtttactcgtgtgtgaagtcgtagaaacattggccctttcgttcgttctcttgggagagttccagtggcgatgaagcttttcagttttcacagctcggatgtgagcaaatccattagctcctgcactgcatggtacggtacctgctacgttttgaacatttgtgaagcattcaattttttttttttttttgcctttgtttaagacagactgcttatcacaaagcatcctctgtcggttcaagatat

SEQ ID NO: 9643 - DNA, 827 bp, Zea Mays
atggtgcgcaaggcaaaggttgagttcgatgagcagccaccggataacttcgacccgaagaacccatatgcggacccggtggctatgctggagtaccgggaacacctggtgcgggagaagtggatccagatcgagaccgccaagatcatccgggagcgcctccgctggtgctaccgcatcgaggggatcaaccaccaccagaagtgccgccacctcgtggaccagtacctagaggctacacgcggcgtgggttggggcaaagatgcccgaccgcccgagttacacgagcccaagaagatcatcgaggcggagtagctgctgcctcggcttctcgtgctgctgttcctggattggaggggaaccttgagagagatggctgatgctgcagacctagacgaccgatgatgcattatgacctaccacattgctctcctcatcggagtgtgcttgcaactgtattactgatttgatgcaggttactattgttgtaacattggctgcatcctttgcgatctcctttttcccccctcatcacatatgtgtacagtggcctgttcaatgcttcatagaagcatataggctgatgtctttttcatcactgtgcaacttgccaccaatattccatctctgtcgagtccaacacagatagaattgtactgtcttttttcaaagaggtgcagagatcaggcacaccaaagcagcagcagcatcctattgaagaccaggattttgaagaatctataactaatcaagaagcagaccattatgattgttggtacgagagcaggagatcaggtggcacgacaaaaagtaggctgagagcgcaa

SEQ ID NO: 9644 - DNA, 861 bp, Zea Mays
atctttctctattacattgccgatcacttgcctgacaggggtagcagcctcttcgcggtggctggggatggcgggcggcaggcggagggcggcggcgagggctagctccggtggtcgccggccacgcgaatcatctctttctctgtgaatgtggcgtccgcttcgaactacatcgtccgttggccatctgcacctccttcccggtgaaccctacaagcccctaacctcccaagtatggaatgggtggcggagtttcagtggaaggtgatgtctacagctatgggactctcctgctcgagatgttcacggcaaagcggccaacagatcccttgtttcagggaggccaaagcatccgcagctatgtcgcagcggcttatcccgagagagtaacagcagtcgctgacctatctctgttgcagcacgaagagagaaacctggatgaagagagcctagaagagtccctcgtgtcagttttccgggtcgcgctgcgatgcaccgaggagtcaccgagagcaaggatgctcactagagatgccatcagagagcttgctggtgtaagggatgcttatgggtagctacttggtacgtaggggtgacaacgggctctatattttacactataaaattgaaggatttacactataaaattaaaggatcggatcgggttacgatcgggtcatatttatattcatttttgaactaaaataatttaaggcttagcaatttatgaagaaacatttgaatcacgatccattaccaccacccctacttgaacgttagcaagttacagtccatagagtaatatgtaaatagcactggaaacgattttattttttgtaagtgaagtagaatgtaggaatt

SEQ ID NO: 9645 - DNA, 966 bp, Zea Mays
atctttctctattacattgccgatcacttgcctgacaggggtagcagcctcttcgcggtggctggggatggcgggcggcaggcggagggcggcggcgagggctagctccggtggtcgccggccacgcgaatcatctctttctctgtgaatgtggcgtccgcttcgaactacatcgtccgttggccatctgcacctccttcccggtgaaccctacaagcccctaacctcccagggactttgggctgtcacggtttgtccagggagctaacagcaactcgttccaacccatagccaacactactggaatcaaaggcaccattggatacattcctccagagtatggaatgggtggcggagtttcagtggaaggtgatgtctacagctatgggactctcctgctcgagatgttcacggcaaagcggccaacagatcccttgtttcagggaggccaaagcatccgcagctatgtcgcagcggcttatcccgagagagtaacagcagtcgctgacctatctctgttgcagcacgaagagagaaacctggatgaagagagcctagaagagtccctcgtgtcagttttccgggtcgcgctgcgatgcaccgaggagtcaccgagagcaaggatgctcactagagatgccatcagagagcttgctggtgtaagggatgcttatgggtagctacttggtacgtaggggtgacaacgggctctatattttacactataaaattgaaggatttacactataaaattaaaggatcggatcgggttacgatcgggtcatatttatattcatttttgaactaaaataatttaaggcttagcaatttatgaagaaacatttgaatcacgatccattaccaccacccctacttgaacgttagcaagttacagtccatagagtaatatgtaaatagcactggaaacgattttattttttgtaagtgaagtagaatgtaggaatt

SEQ ID NO: 9646 - DNA, 2064 bp, Zea Mays
attgatttttttcccaaatgatgaggatgagacagatgacatagttgaggtggctcttgctgaacttgagatgatagaacaatatagtgccttcatgtctcctgtcgcggctgcggacagcatgacacccaaaaagttcatggcgcttgtctctgctaaaatccaaacatacttttgcaggggcgggtcgatccagagggcggtgcggaggatggccggcggcggcggcggccggaggagacccggcgccttggcggacccgaggaccggcgacgcgtcgtcggcgtcggctagctgctccggggatgataccagcattggtagtgccactgccaagagggaaggggcacgaaggtgcatcatgcagcggtacaggtcccagctcgagcaggaagtcaagaaactgcaaaggcaactgcaagaagagattgatttacatctggcgttggcagatgccattacatataatgcggcgctgatacttaagtcgtctataaagcttccagataaggcgcatgagctattaattagcatatcctctttggaaatcgctatcacaaagcttgaagaggatctaaatcacctgcattaccaattataccatgcaaggaatgaaaggtttcttgcggaaaataagccaggatacttgctacctacaagatcagattgtcaaccctccacagcttgcaattgtacatgggaagaacctgaacaaatgttaagagaattgatattcagagattatcactcagtccaagaagatttttcaactgaacctgaagatcaacaggatgatgaaaaatacgttaaaggtagagaacgtgtatctctaaatatgctgctagaaaagcaccaagatatttcttcaactgggctgtttgtacaccgagatgaagagatgcaagaggcatgctctatggaaaaagaaggcgaagaagatcagaagatagatatgttaccatttaacctgcccaatttgaagaaaggcaacatgagtgaaaatctgtggaataatccaaatcagctctctgaagagatggtgctctccatgaaagatatattccttaatttatctacatcttccaagatgtcaccagaggagcctttttctaattcatcttcatcagcagagcatctatctggttcaacattgactactttgtcggattcatctgtaatagcctcagtgcagcccagtccttcaatgtacctgaaccacgatgatggtaactttgacccgtacaatgttaatggaaaggaagcacagagagacattggcagctatagttcagtagctgaagtgtcttggatgtatattggcaatgaacaacttgaatatgcatctggagctctgagaaagttcaggtttcttgtggagcaactatcaaaggttgacacttcttgtatgaactgtgatgaacggttagcattttggattaacctttacaatgcattaatcatgcatgcctatttggcatacggtgtccctgaaaacgacattaagcttttcgcgctaatgcaaaaggcctgttacacgatctgtgggcagcctgtcagtgcagctgaaatagagtttgtgattctgaagtccttgatgctggcccttcacaaatttaaaacatcagagaatctcaagaaatattcaatcgatggtactgagcctcgtgtgctctttgcactctgttgtgggatgttctcttcgcctgcggtaaggattttctctgctgaaaatgttcgagccgagctacaagaatcaatgagagactacatccgagcatctgttggtgtcaatgacaagggggagcttatggtccccaagttactgcagagctatgccaagggcattgtggaggactctctgcttgccgactggatctgccgtcatctaacactagaccaactcgctgcagtccaagatacatcgtcgtcacatacacagcgccttcttggagtgcgcagtttcagcgtcatcccattcgattcaagattccggtacctgttcttgttcgacaacagtagatgacagaactgcattgctcaatgtgcacaaagccaagagtgggc

SEQ ID NO: 9647 - DNA, 2149 bp, Zea Mays
attgatttttttcccaaatgatgaggatgagacagatgacatagttgaggtggctcttgctgaacttgagatgatagaacaatatagtgccttcatgtctcctgtcgcggctgcggacagcatgacacccaaaaagttcatggcgcttgtctctgctaaaatccaaacatacttttgcaggggcgggtcgatccagagggcggtgcggaggatggccggcggcggcggcggccggaggagacccggcgccttggcggacccgaggaccggcgacgcgtcgtcggcgtcggctagctgctccggggatgataccagcattggtagtgccactgccaagagggaaggggcacgaaggtgcatcatgcagcggtacaggtcccagctcgagcaggaagtcaagaaactgcaaaggcaactgcaagaagagattgatttacatctggcgttggcagatgccattacatataatgcggcgctgatacttaagtcgtctataaagcttccagataaggcgcatgagctattaattagcatatcctctttggaaatcgctatcacaaagcttgaagaggatctaaatcacctgcattaccaattataccatgcaaggaatgaaaggtttcttgcggaaaataagccaggatacttgctacctacaagatcagattgtcaaccctccacagcttgcaattgtacatgggaagaacctgaacaaatgttaagagaattgatattcagagattatcactcagtccaagaagatttttcaactgaacctgaagatcaacaggatgatgaaaaatacgttaaagatgcaagaggcatgctctatggaaaaagaaggcgaagaagatcagaagatagatatgttaccatttaacctgcccaatttgaagaaaggcaacatgagtgaaaatctgtggaataatccaaatcagctctctgaagagatggtgctctccatgaaagatatattccttaatttatctacatcttccaagatgtcaccagaggagcctttttctaattcatcttcatcagcagagcatctatctggttcaacattgactactttgtcggattcatctgtaatagcctcagtgcagcccagtccttcaatgtacctgaaccacgatgatggtaactttgacccgtacaatgttaatggaaaggaagcacagagagacattggcagctatagttcagtagctgaagtgtcttggatgtatattggcaatgaacaacttgaatatgcatctggagctctgagaaagttcaggtttcgagtttcttgtggagcaactatcaaaggttgacacttcttgtatgaactgtgatgaacggttagcattttggattaacctttacaatgcattaatcatgcatgtaagtacgatctatcacctttttttaagaatgtcactaagtacttgtttagagatagaacttgatgctttctttcaatcattgttgtcaacataatatgcaccctgaacaccatgcgtgtttactggaactttattaggcctatttggcatacggtgtccctgaaaacgacattaagcttttcgcgctaatgcaaaaggcctgttacacgatctgtgggcagcctgtcagtgcagctgaaatagagtttgtgattctgaaggtgaagactccagtgcaccggccacaactctccttgatgctggcccttcacaaatttaaaacatcagagaatctcaagaaatattcaatcgatggtactgagcctcgtgtgctctttgcactctgttgtgggatgttctcttcgcctgcggattttctctgctgaaaatgttcgagccgagctacaagaatcaatgagagactacatccgagcatctgttggtgtcaatgacaagggggagcttatggtccccaagttactgcagagctatgccaagggcattgtggaggactctctgcttgccgactggatctgccgtcatctaacactagaccaactcgctgcagtccaagatacatcgtcgtcacatacacagcgccttcttggagtgcgcagtttcagcgtcatcccattcgattcaagattccggtacctgttcttgttcgacaacagtagatgacagaactgcattgctcaatgtgcacaaagccaagagtgggc

SEQ ID NO: 9648 - DNA, 2377 bp, Zea Mays
attgatttttttcccaaatgatgaggatgagacagatgacatagttgaggtggctcttgctgaacttgagatgatagaacaatatagtgccttcatgtctcctgtcgcggctgcggacagcatgacacccaaaaagttcatggcgcttgtctctgctaaaatccaaacatacttttgcaggggcgggtcgatccagagggcggtgcggaggatggccggcggcggcggcggccggaggagacccggcgccttggcggacccgaggaccggcgacgcgtcgtcggcgtcggctagctgctccggggatgataccagcattggtagtgccactgccaagagggaaggggcacgaaggtgcatcatgcagcggtacaggtcccagctcgagcaggaagtcaagaaactgcaaaggcaactgcaagaagagattgatttacatctggcgttggcagatgccattacatataatgcggcgctgatacttaagtcgtctataaagcttccagataaggcgcatgagctattaattagcatatcctctttggaaatcgctatcacaaagcttgaagaggatctaaatcacctgcattaccaattataccatgcaaggaatgaaaggtttcttgcggaaaataagccaggatacttgctacctacaagatcagattgtcaaccctccacagcttgcaattgtacatgggaagaacctgaacaaatgttaagagaattgatattcagagattatcactcagtccaagaagatttttcaactgaacctgaagatcaacaggatgatgaaaaatacgttaaaggtagagaacgtgtatctctaaatatgctgctagaaaagcaccaagatatttcttcaactgggctgtttgtacaccgagatgaagagatgcaagaggcatgctctatggaaaaagaaggcgaagaagatcagaagatagatatgttaccatttaacctgcccaatttgaagaaaggcaacatgagtgaaaatctgtggaataatccaaatcagctctctgaagagatggtgctctccatgaaagatatattccttaatttatctacatcttccaagatgtcaccagaggagcctttttctaattcatcttcatcagcagagcatctatctggttcaacattgactactttgtcggattcatctgtaatagcctcagtgcagcccagtccttcaatgtacctgaaccacgatgatggtaactttgacccgtacaatgttaatggaaaggaagcacagagagacattggcagctatagttcagtagctgaagtgtcttggatgtatattggcaatgaacaacttgaatatgcatctggagctctgagaaagttcaggtttcttgtggagcaactatcaaaggttgacacttcttgtatgaactgtgatgaacggttagcattttggattaacctttacaatgcattaatcatgcatgcctatttggcatacggtgtccctgaaaacgacattaagcttttcgcgctaatgcaaaaggcctgttacacgatctgtgggcagcctgtcagtgcagctgaaatagagtttgtgattctgaaggtgaagactccagtgcaccggccacaactctccttgatgctggcccttcacaaatttaaaacatcagagaatctcaagaaatattcaatcgatggtactgagcctcgtgtgctctttgcactctgttgtgggatgttctcttcgcctgcggtaagtgattgagtaaaaaatggaactctgttacagaaactaaagctatggcctataggtagataattcttggggtgctttcatgtagttgctggagatagaaaaattctcagcagctagtactacatggtttagaataactgagcgtggatctaaagacctttttttcataaagtttgtgaaacaataaaatttgtttccagtgtgcacagtaaagctgccataatacttaaaccatgtttttttattaatatttgggaaatgatgacttcctaccacccaggtaaggattttctctgctgaaaatgttcgagccgagctacaagaatcaatgagagactacatccgagcatctgttggtgtcaatgacaagggggagcttatggtccccaagttactgcagagctatgccaagggcattgtggaggactctctgcttgccgactggatctgccgtcatctaacactagaccaactcgctgcagtccaagatacatcgtcgtcacatacacagcgccttcttggagtgcgcagtttcagcgtcatcccattcgattcaagattccggtacctgttcttgttcgacaacagtagatgacagaactgcattgctcaatgtgcacaaagccaagagtgggc

SEQ ID NO: 9649 - DNA, 3807 bp, Zea Mays
cgcttcgttatataaaccctagactaaagcccccgagtccctccgcccccgctcgccacaaccactgcgcgtgatcccatttcgaaacaaaaaaggaggagcgcgctcgcactcaactccgcggagccccaatcccagcgtcgcctgcggtttagatggaggcgcacggcgaccagcggtggctggtggattgcctgacggctacgctcgacaccgcgcgcgatgtccgcgccttcgccgaggagtcgctccgccaggcctcgcttctccctggatatggagctgcccttacaaaagttacaatcaacaaagagatctcgtttggtttacgacagcttgctgctgtcttactaaagcagtttatcaagcagcattggcaggaagacgaagagaattttgtgccccctgttgtttctgcttcagaaaaggtggtcatacgacagctcctgcttacctcattggatgattctaatgggaaaattcgcactgctattagcatggctgtagcagctattggacagcaagattggcctgaagactggcctgagttacttccggttctcttaaagttaattggcgatcaaagcaatgggaatgaagttcgtggagcattaagatgcctagcccttctatcggatgatctagatgatatgtgtgttccaaagctagtgccagagctattcccatcactgtatagaataatatcatctcctcatctgtatgaaaattctcttcgtgcaaaggcttttgcaatagtccattcatgtatttctatgcttggatcaatgagtggtgtctataagagagatacagctagtctgatgacttcagtgcttgatccactaatagagcaattctccatagttctaaattatccggtgcagtcccaaaatcctgatgactggagcatgcagatggagccattcttccagcactgtggcagacatttgtttcgtcattcaagacctatcacctgtcatacattcaaggtgcagaaactttggattctattagttatgattctgatggcagtgaaaaaagtcttgagtcattcgagattcagttatttgagctatggacaacaattgtggggaattctagattagcaaaggttattgggggaaacattaaggagctagcatactatactatagccttgcaacagataactgaagaacaggtgcaaaactggtcacgcgatgctaaccagtatgttgctgatgaggatgacctaacctatagctgtcgtgtgtctggatctcttttgctggaagagctagtaacagcttatgaagattatggaattgactcaattgtggaagcttcacaaatgcgttttcatgaatcacgagaattgaaggaagcgggttctgctgactggtggagactgcatgaagcatcactttttgctttaggttcactgtcagaacagttgtgtgaagcacaggattctggtttgacaaaatacaatgtgcgggatttacttgagcaaatgctaattgacattatgggaacaggggtgcatcagtacccatttctccatgcgcgtgcattttctagtgtggctaaattttcttcactgataagtaaaggggtcagtgaacagtatctatgcaatgcggcccatgcgattgcctcagatgtgccacccccggttaaagttggtgcttgtagggcactggcccaacttttaccagaatctaatcagaatctgattcagccaaacattatgggcatactttcatctcttgttgaccttctgcggcaggcatctgatgaaaccctgcatcttgttctagaaaccctgcaatcagcaatcaaatctggtggagaacaatcaactttaattgagcctgtcatttcccccatcatactggatgtttgggcacagcacattgctgacccgttcatcagcattgatgctgtcgaagtgttagaggctatcaagaatgctcctggatgcttacagccacttgtgtctcgaatccttccaacaattggatccattttagtgaaacccaaggtccagccggatggactggttgcaggttcactggaccttttgacgatggtactcaaaaatgctccagttgctgtggttaaagcagtcttcgacacatgctttgtttctactgttcaaattgttcttgaaagtgatgaccatggagagatgcagaatgcgacagaatgcttggcagcattcatatcaggtggccggcaggagttgcttgtctggggtggtgaacaaggacaaacactcaagatgctacttgatgcagcttcaaggcttttagatccagcgttagaaagttcagtatcactatttgttggaagctttgttttgcaactcattttacaaatacctctacacctgtctcctcacataccggaccttattgctgctattatgagacgtatgcaaacgagcagcattgcaggattgaaaagctcccttattgttataatagccagattagtacatatgagtgcaccaaatgttgatgggttcatcaatctattgctttctatccctgcacaggggtatgacaattcacttgtttatattatgtcagaatggtcacaactacaaggtgaaattcagggagcctaccagataaaggttacaacgactgcattagctcttctcatatcaactcgtcatcctgagctatccaaggttgaagttcaagggcatcttattaagactagtgcaggtataacgacacgttcaaaagctcgagtgactcctgatcaatggaccaagattcctctcccagttaagatcttctcattgctggcagatactttaactgaaattcaggaacaaattggtgctggtgatgacgatgactccgaagaggataatgactgggaagaagttcagaatggtgatgctagtatatcagatgatatcatacactcagcatcggttccttcaatgactaatccatcagttgaacatttaaatgcaatggccaaggtttttgatgaggatgatgatgatagttatgacgatgatctgacaaaaaacgaccctcttaatgaggtgaagttagcggacttcctaacaaacatctttgctaacttgtgggagaataatcgaccaatatttgagtatctttgccagggcctgtcggattcacagagatcagctgttgaaaaggttttgaggaggtgaagcgttaacttgggatcctgtcttccacctttcgggatataatatatcttcatattagttatcgagtcctgtttgcattgctgtggactggttttcttgctcattatatgttcattggtgtaaactgatacatctctgaagccggtgttatgaggttttgttagtgtaggtttctttatgttctttgtatttaaaatctacaagatgtgagtatttgttgtaccgggtgtggtgatgttgggtattcatgtctgaagaattcccggcttgacttgttcttacgttgaattcctccggagggaccttgattccttggctttattcatcaatttcatgcatgcctatttggaggaacgccacctttggtgtttggcaggagcggttaagctcagggagttgggtcccggggttggagttccttagggctctactagtgtgtgcggtggtcaagtgttttctccttccttggtcaagtgtttgcctcggttcaacccctcactcttggtttggagtacgggtgtagtttttcttttgtaagaaccttcctttttattctatcttaatttaaagatgcagttcttctgtgtatccaagatttttttcatttatggactagttgagctccagtg

SEQ ID NO: 9650 - DNA, 3881 bp, Zea Mays
cgcttcgttatataaaccctagactaaagcccccgagtccctccgcccccgctcgccacaaccactgcgcgtgatcccatttcgaaacaaaaaaggaggagcgcgctcgcactcaactccgcggagccccaatcccagcgtcgcctgcggtttagatggaggcgcacggcgaccagcggtggctggtggattgcctgacggctacgctcgacaccgcgcgcgatgtccgcgccttcgccgaggagtcgctccgccaggcctcgcttctccctggatatggagctgcccttacaaaagttacaatcaacaaagagatctcgtttggtttacgacagcttgctgctgtcttactaaagcagtttatcaagcagcattggcaggaagacgaagagaattttgtgccccctgttgtttctgcttcagaaaaggtggtcatacgacagctcctgcttacctcattggatgattctaatgggaaaattcgcactgctattagcatggctgtagcagctattggacagcaagattggcctgaagactggcctgagttacttccggttctcttaaagttaattggcgatcaaagcaatgggaatgaagttcgtggagcattaagatgcctagcccttctatcggatgatctagatgatatgtgtgttccaaagctagtgccagagctattcccatcactgtatagaataatatcatctcctcatctgtatgaaaattctcttcgtgcaaaggcttttgcaatagtccattcatgtatttctatgcttggatcaatgagtggtgtctataagagagatacagctagtctgatgacttcagtgcttgatccactaatagagcaattctccatagttctaaattatccggtgcagtcccaaaatcctgatgactggagcatgcagatggaggtgctcaaatgtttacttcagcttgtccagaactttcctagattacctgaagctaaaatttctggcaaaatttgtgcagccattcttccagcactgtggcagacatttgtttcgtcattcaagacctatcacctgtcatacattcaaggtgcagaaactttggattctattagttatgattctgatggcagtgaaaaaagtcttgagtcattcgagattcagttatttgagctatggacaacaattgtggggaattctagattagcaaaggttattgggggaaacattaaggagctagcatactatactatagccttgcaacagataactgaagaacaggtgcaaaactggtcacgcgatgctaaccagtatgttgctgatgaggatgacctaacctatagctgtcgtgtgtctggatctcttttgctggaagagctagtaacagcttatgaagattatggaattgactcaattgtggaagcttcacaaatgcgttttcatgaatcacgagaattgaaggaagcgggttctgctgactggtggagactgcatgaagcatcactttttgctttaggttcactgtcagaacagttgtgtgaagcacaggattctggtttgacaaaatacaatgtgcgggatttacttgagcaaatgctaattgacattatgggaacaggggtgcatcagtacccatttctccatgcgcgtgcattttctagtgtggctaaattttcttcactgataagtaaaggggtcagtgaacagtatctatgcaatgcggcccatgcgattgcctcagatgtgccacccccggttaaagttggtgcttgtagggcactggcccaacttttaccagaatctaatcagaatctgattcagccaaacattatgggcatactttcatctcttgttgaccttctgcggcaggcatctgatgaaaccctgcatcttgttctagaaaccctgcaatcagcaatcaaatctggtggagaacaatcaactttaattgagcctgtcatttcccccatcatactggatgtttgggcacagcacattgctgacccgttcatcagcattgatgctgtcgaagtgttagaggctatcaagaatgctcctggatgcttacagccacttgtgtctcgaatccttccaacaattggatccattttagtgaaacccaaggtccagccggatggactggttgcaggttcactggaccttttgacgatggtactcaaaaatgctccagttgctgtggttaaagcagtcttcgacacatgctttgtttctactgttcaaattgttcttgaaagtgatgaccatggagagatgcagaatgcgacagaatgcttggcagcattcatatcaggtggccggcaggagttgcttgtctggggtggtgaacaaggacaaacactcaagatgctacttgatgcagcttcaaggcttttagatccagcgttagaaagttcagtatcactatttgttggaagctttgttttgcaactcattttacaaatacctctacacctgtctcctcacataccggaccttattgctgctattatgagacattactctgattacttaagcttctccaagacatgtcctcagttcactctgcctgcaggtacatatgagtgcaccaaatgttgatgggttcatcaatctattgctttctatccctgcacaggggtatgacaattcacttgtttatattatgtcagaatggtcacaactacaaggtgaaattcagggagcctaccagataaaggttacaacgactgcattagctcttctcatatcaactcgtcatcctgagctatccaaggttgaagttcaagggcatcttattaagactagtgcaggtataacgacacgttcaaaagctcgagtgactcctgatcaatggaccaagattcctctcccagttaagatcttctcattgctggcagatactttaactgaaattcaggaacaaattggtgctggtgatgacgatgactccgaagaggataatgactgggaagaagttcagaatggtgatgctagtatatcagatgatatcatacactcagcatcggttccttcaatgactaatccatcagttgaacatttaaatgcaatggccaaggtttttgatgaggatgatgatgatagttatgacgatgatctgacaaaaaacgaccctcttaatgaggtgaagttagcggacttcctaacaaacatctttgctaacttgtgggagaataatcgaccaatatttgagtatctttgccagggcctgtcggattcacagagatcagctgttgaaaaggttttgaggaggtgaagcgttaacttgggatcctgtcttccacctttcgggatataatatatcttcatattagttatcgagtcctgtttgcattgctgtggactggttttcttgctcattatatgttcattggtgtaaactgatacatctctgaagccggtgttatgaggttttgttagtgtaggtttctttatgttctttgtatttaaaatctacaagatgtgagtatttgttgtaccgggtgtggtgatgttgggtattcatgtctgaagaattcccggcttgacttgttcttacgttgaattcctccggagggaccttgattccttggctttattcatcaatttcatgcatgcctatttggaggaacgccacctttggtgtttggcaggagcggttaagctcagggagttgggtcccggggttggagttccttagggctctactagtgtgtgcggtggtcaagtgttttctccttccttggtcaagtgtttgcctcggttcaacccctcactcttggtttggagtacgggtgtagtttttcttttgtaagaaccttcctttttattctatcttaatttaaagatgcagttcttctgtgtatccaagatttttttcatttatggactagttgagctccagtg

SEQ ID NO: 9651 - DNA, 1679 bp, Zea Mays
gataattgcaacttcgacatttcatgattatgatccaatttacatttgaagcaccaaacaggtcaactgctgtctttgcttttgcagagttctatcttaattgtactgctagatatgcttggacattagtgccatggctcctcaataccaagctgcgaccttgattgcctctccatcttatccaagtgccattgcttggtcaagcgacaatcttgtggctgttgcatctggtcatattgtaactattctgaatccatctgcgcttgatggaccccgtggattggttggactttgtcgcagtgacccttttcctataggactggttaatagagaagcggcacaacaatcaagtgaagcgcaactcaagaggccaaggcgggcacaatactgctcaatggaccccgtggattggttggactttgtcgcagtgacccttttcctatatgactggttaatagagaaggagtcgcctgccggagttggtcagggaggagtgaaggagttgctggagttggtcaaggactggaggagcaggcgatctcttggagccatgtttattgtccacttccttagcgcgtgagactgaaccatgtgcccgatcgatttcatggtctcaacaaggatttgcacctaactctgggtgtttgctggctgtttgcactatggatggtcatgtgaagctttacaggtcaccaatttgggagctatgtgatgaatgggttgaggtcgcagatatatcacagttgctgtttaactactataaacttataaactttggagaggataatggttctcatttgacttctctgaagaatacaaatactggggagacagaggttttaggatctgcttatgaattgcaagaatctctttatttcaggtgtcctggacagagaaaactaaagcgatcaagagttgatggttttatttatgacgtcaatgaagttgatttagatgcatcaaaggatgcagacttctcgatcgaaccatgttctaaatcaaagaagaaatatttgaaaaagactgtaaaacccaggcatgaagtagttgctgtaaatgaacgaaacaacacaggaaatattaaaggatcattgtcctccaatggagaaaacaaatcccttcctcttatcacggcaaaacagtatgcttgtcgtgctgcacatttgtcttcccttgtagtttcatggtctccagttgtgtcatcaagtgataaaacatcttgtttattgaggcattggtgcattattgctgttggctctaaatccggaaatctttctttttggaaactacctaagccagaatattacacaatagatgctggcgtggttaccagtgatccaatgctcatcggggttttgcaagctcacaaatcatgtgtcagtgtcatagcttggcaagttctttctgcgggctcttcaaaatcctcgttgcttttagctactggatgctcagatggaagtgttaagatatggttagggaatattgaagggttaaatcaatgtgcaagtggagaagtgccatttgcgttagttgctgtggtcgccactgatttatcatctccagtgtcatcaatctcattagccatacctgcccagtctcaacacgagcatcaaaacttgttcccgaacattgggttgattgaagccattggattgttgaaagttggagagtctaagtaa

SEQ ID NO: 9652 - DNA, 2920 bp, Zea Mays
tcgagcagggcagctcccatctgacggagttctatcttaattgtactgctagatatgcttggacattagtgccatggctcctcaataccaagctgcgaccttgattgcctctccatcttatccaagtgccattgcttggtcaagcgacaatcttgtggctgttgcatctggtcatattgtaactattctgaatccatctgcgcttgatggaccccgtggattggttggactttgtcgcagtgacccttttcctataggactggttaatagagaagatctcttggagccatgtttattgtccacttccttagcgcgtgtttgctggctgtttgcactatggatggtcatgtgaagctttacaggtcaccaatttgggagctatgtgatgaatgggttgagaagaatacaaatactggggagacagaggttttaggatctgcttatgaattgcaagaatctctttatttcaggtgtcctggacagagaaaactaaagcgatcaagagttgatggttttatttatgacgtcaatgaagttgatttagatgcatcaaaggatgcagacttctcgatcgaaccatgttctaaatcaaagaagaaatatttgaaaaagactgtaaaacccaggcatgaagtagttgctgtaaatgaacgaaacaacacaggaaatattaaaggatcattgtcctccaatggagaaaacaaatcccttcctcttatcacggcaaaacagtatgcttgtcgtgctgcacatttgtcttcccttgtagtttcatggtctccagttgtgtcatcaagtgataaaacatcttgtttattgaggcattggtgcattattgctgttggctctaaatccggaaatctttctttttggaaactacctaagccagaatattacacaatagatgctggcgtggttaccagtgatccaatgctcatcggggttttgcaagctcacaaatcatgtgtcagtgtcatagcttggcaagttctttctgcgggctcttcaaaatcctcgttgcttttagctactggatgctcagatggaagtgttaagatatggttagggaatattgaagggttaaatcaatgtgcaagtggagaagtgccatttgcgttagttgctgtggtcgccactgatttatcatctccagtgtcatcaatctcattagccatacctgcccagtctcaacacgaggtcagtttggcaattggaagagtatctgggtcactagaaatatggatatggaatgcatctagcaacaaaattgagattttcagtgcatggcatgcacatgatcaagtggtaacaggtttacaatgggctatggatggctattgtttattcagctgcagtcaggacaattctgcacgttgttggatctctcacgaaaaccaccttgaagaaatttttatgcattcaaattttccagagctaagggagtcagcagacctatcagaactctctgatcgatgctatggtcttacactagcacctggagaacagatgattgctgtggtccgcagtttggatctgaaccttctgaaccagatgtatcaagtcaggacacaaaaggcggtggttgagttcatttggattggtggccaatttgttggtattccactagacaggagcattgatatttgcagttcacagtccacagacttatcctcaagtaatctcatgtggtggggatccaacattttgtggtcgctgaagaaatacgaaaatgtagaaaagaggcttgtgatatgggatgttgtagctgtgctgcaggagttgaagaaatccgcacctgcctttctggagactctagtgcatagttgggtctcagtgttactttcgggcgacccccagtgtgtttctatcgatgctccatcacgttcaatgcatgacatgatgccctatgtcagcacgcggaagctacacttactgaacataatgtgcagaaaagtaatggtcagcattcacacacatcatggtcctggtgctgaaaacggcaatgaggaaacaactgatttctggagcactcttttggtgaggagcgaaacagagctgcgagagaggctggttggcttcacctttgctgcagtcctgaaacggacagcgtatttgttcaatggtacctctactgaaaattgctggtttcctgttggggttgcccagatggattcttgggtaaccatgaattacgacggacaagtgcatgaccagctgcagtctatcagatcaaagatcaaagatttaggaagcaggatcgacggatactctgacgtagaaagctgcccctactgctcttcgccggtccatttcgagtcgcctgacgtagccatctgtggggaaaggcacacactgccgcggtgcagggcgtccatgatcctgtgctccgttgtgcagcctttgtggcactgcgtgtgctgcggaggcacggtcaacaagctgttgccggagtcgttcttcaccatgcaggcgtccaccatgcatgatgaaggatcgctcgatctgtcagcagcctccgtcccactttgccccttctgtggcatcctcctgcagaggtcgatgccggcgttcctgctctccacctcgccggcatagaggctctctgtggatgctagtaggcatccaccaggtgtagcatgcagtagcaatgtagtactagtaaagtttgttctagtcgatgctgcttacactcagttactcttaccaagtatggctggcagagtgtcggttactggtcattttttaggtcccttttgaatgaatacgatgagttcttttgtttggtttcttttggaccctgacggtggcagattaccaggccaagttcagctatctcgaattgtctcattcgattgttgcggacatgcagttctggcagttccaattggttgttgcggacatgcagtcctgtcagttgact

SEQ ID NO: 9653 - DNA, 2408 bp, Zea Mays
cctaagcctagccgagccgccctcccaaatcattagcctccctccccttcgtttgtttgtttgattgattggcgagtaacaactaccactacctgcaaccgcagcaatctcccctcgccaactccgtctcgggttaaccattcgtcattgccgaggaggaggcccggtcgtcgtgtgaggtgttctggatctcggatggcgtcggccaagtcgtcgcggtcgcggcccgcgggccactcgggggtgttcccggtgggcagcgccgccgcggtggggagcgggggcgggggaggcggcggcggcgatggcggagtgcagctcgccgacaagcttaagattttcaagaccgacaacttcgatcccgacgcctacgtgcagtccaagtgccagaccatgaacgagaagaacatctaaggagatatcagaccttgaaggggaactactgtcaattagaaatctgcttaatacacaggcagctttaattcatggtctatctgaaggagttcagatagattcattgacttcaggccctgaaggttctgcagaagacgacatatccaatgttgaagatcaggagccttcagaaatacagaaatggtctgcagatttccctgatatgcttgatgttttgctagctgagcgaagagtggatgaagcactggatgcactggatgaagcagaacgggttgctgttgatgcaaaacgaaaacagactctaactgcagctgaagttttggctttgaaaagatcaatctctgataatcgtcagaggctggcagatcagcttgctgaagctgcttgtcagtcttccactcgtggtattgagcttcgagctgcggcttctgccctcaaaagacttggtgatggcccccgagctcacagcctcttactcagtgcacataatcaaaggcttcaatgcaatatgcaaactatacatccatctagcacttcatacggtggggcatacactgcagcacttgctcaacaagttttttcagtcatagctcaggcactaagtgactctgtggatgtgtttggtgacgagtcatgctacgcgtctgaactagtaacgtgggctaccaagcaggttatgtcctttgcactcctggtaaagaggcatgtgttgtcctcttgtgcagctgctggaggcttgagggcagctgcagaatgtgttcagatatcacttggccattgttctttgctggaagctcgtggtctgtctgtttcatctgtcctcctcaaacaattcaagcccagtctagagcaagcgttagatgctaacttgaggagaattgaggagagtactgctgcactagcagcagctgataactggatactcacatatcccccaactggtattcgtccattaactagattgtctgctgctaatttggcacttcagcctaagctctctagcagcggacaccgtttcaattcaatggttcaggatttctttgaggacgttgcaccactacttagcttgcaattaggtggttcaacaatggatgggatcacacaaattttcaattcatatgtaaacttgcttataaatgctttacctggttccatggatgatgaagctaacttagatggtttaggtaataagattgttagaatggcagagactgaagagcagcagttagctttattagctaatgcatctttactagctgaggagttgctacctagagcagctatgaagttatcatcaataaaccagtctatggatgatttgtgtaaaagaggaacagataaacaaagccgtgtacctgagcaacgtgaatggaaaagaaaactacatcgaatggtggacaggttgagagatagtttttgcaggcagcatgctcttgaacttatatttacagatgaaggtgatactcatctcagcgcagaaatgtatatcagcatggacaatactgttgaagaaccagagtgggttccatctccaattttccaggaactgtatgcaaagttaaacaggatggcaagcattgctgcagaaatgtttgttggtagagaaagatttgctactttactaatgatgcgcctcactgagacagtcatactgtggctctcagaggaccaggccttttgggaagagattgaacagggggctaagcctttaggccccctaggtctacaacagttctacctggacatgcaatttgtcatcatatttgggcaaggtcgttttctctctagacatgtacatcaagtcattttggacgtcattgatagagcaatggctgcattttctgctactggaatgaaccctgatagcctgctgccctctgtagcctacagtaattgcaactggcagccagtagtaacctaaacaaattgccctactgggatggttttgacttttgagaaaaaatggctattagagaatcccttgatgaattatt

SEQ ID NO: 9654 - DNA, 952 bp, Zea Mays
aaaatgacaagtgttgtttaccgctcagtcatttttaaccaagccacggctggaaggcataccatcattctcatgcaaccatcacagaacagatcgacgaggacatttatggactacgattcagttaaccacgcgctggatggaatatgtggtctttacgaaaggaaaatcagaaacatcaacccgatggtcaggaacttgacttatgatatcggtgacctgtacaacttcatcgatggcctgaccgacataagtgcactggtgtacgacgattcacttcacgctttcctgccgtatgaccgccagtggataaaacagaagctgtttcagcacctgaagcggctggcgcagcagtagggtatcatcaccgctggcttttgacgtgcatgcgtcgtggggagaaccccctcacctaagccttaaggctttgtttgggtgctctagtattaacctcaattcatatgtattgaggtgaattaaggtgtacattagtttaatttacaactcagggcttgttcggttagctctcaatccatgtggattgagtggaattggataggttttaatcccaaacaagtcaaacttattctcaattttttctaatctcatccaatccatatgtattgggaataaccgaacaagccctcaatccatctcaacacatgtggattatggtcaatactagagcatccaaactagcctatggttcgggcttggatccaaatgcccaggatgtgtgtatagaaataagacctgtatcccgtgtttgatgtagaacatgtggtcatgctgcggcttgcttctgaagatgattggttgaacaatgcagatttcatgtttgtcatctctctcctttttctgatatctgacggactgggcagcatgaccgtgtttagagataggttgggatgatctgccattggattctagatcttttcacgttcacatatct

SEQ ID NO: 9655 - DNA, 2551 bp, Zea Mays
caagccctccaactgagtcgtcggagcggacgtcgagtcgtcgatacgcctgaaccccagctttccactcgcctcgctcgcccctttcgcgtccaccgaccccgaccccgaccccgatccccgccggtgcttcgccaccccgatccccaccgcgcgatggcggagccggctccggctcccccggtgaccgcgccgctggtggggctgctgtacgacgagcggatgtgcgcgcacgcgacgcccaacggggaggaacacccggagaaccccgagcggctgcgctccatctggcgcaagctcaacgccgcgggcgtcgcgtccaggtgtgtggcccttaaggcaaaggaagctgaggacaagaacaagattgctaggaaattcaattccatttacttgaataagggttcctcggaatctgctgttcttgcagctggttctgtcatagaggtagctgagaaagttgctgcaggtgagttaagttctgctattgctctagtcagacctccaggccaccatgcagaacatgatgaggctatgggattttgcctcttcaacaatgtggcagttgcagctaattatctcttaaacgagaggcctgatttaggtatcaagaagatattgattgtcgattgggatgttcaccatggaaatggcacacagaaaatgttttacgatgatcctcgtgtattgttcttctcagttcacagatttgattatggaagcttctatccttctgaaggggatgcttctcattgtttcatcggggaagaagctggtaaagggtataacatcaatgttccctgggagcatggcaagtgtggtgatgctgattatattgctgcatgggaccatgtactgcttcctgtcactaaagtttttgatcctgatataattctggtatcagcggggtttgatgcagcattgggtgatcctctcggtgggtgctgcattacaccaaatggatatgcactgctactaacaaagttgttaggatttgctcaaggaaggatagtgatggcccttgaaggaggttataaccttaggtccatagcgaactcagtttgtgcttgtgcaaaagttctcttgggagacaaattcacattcaacactccagagatgcaaccatttgaatctacatggagagtaatacaagcggtacgcaatgaattgaagacatgctggcctgttctgagtagcaagttgccagaaaatgtatcattgaggattaagcctgcaccaagcgagctctacgcttctgattctgaatctgatagtgaagatgttgatgagctccttggcactgttgcatctgtcagtgttattgaagctactggtgttgctataagtgaacacctctcaaagatgaaacttgatgatgacagccttgcagtgaagactaactcaagttgctcagcagcagaacagcatccagttgattcagtaaaattttggatcaaacatgtggagaccaagatttctatgttatattcaaggagggaaggctgagggtatgaatataccatgctgcggatcacgtgacacaagctcaccaaaaggaaccgtgtggaagactgtacctcacaggttgcttttcggtagatcgtctaccccttgttggggaactggtggtgtggcttttctcaaccctgagataaactacaatgagaagtcgtatgtctgcatgtacaaaataacgttggagcagttcaatgacatcttgtttcaggagaatcgtttagtgctggaggatggcaaagacggaaacactgtgtatcctgactctcctttgattggttcatctgaaatcaagtttatatctacaaacagagctgttcatcttgaacctattaaggatagctggtactccaatgtactttatcttgggaatgaggatgaagttccaattctaactatgacgtgccccgcatcagatattgagaggtataaatctggtgagctgcgtttagcacctccatcagagacgtatgcggccactctgataaagggactagtggaaggcaagcaaatggatgcggacggagctgccagctacatcaacgctgctgctgcaagagccttgtgaaggcggcttcagcgtgtgcttttgtacagccagtaaggagtagcaaggatacactatctgttagcgtggcgacaccaggaaaccttcattgtccgcaaatggagaacttggatccaatttgaattgggaagcatgattcgagcttgccctagcttgattactggtgaacggtgatctcccctggctggttgattctgggagaaacactagctgtgtcggggtggagcaacactagttggcggttgcaacaggtgctctcactgcactggtatcgtgcttgtctgacataccgtagtatttgcatggcatgctggtgatggtatttgtgcaattactgcattatgttctgttgcctggagttattgttgtttggccgccaccgctgctgctgctgggcagcgtaatatccactcgtcgaagcggattggcactccgccttcttggccggccgcgcctggtgcccaagcg

SEQ ID NO: 9656 - DNA, 288 bp, Zea Mays
ggttgacaatggcgggcgcctccgtgacaagagcacgatctctgctgctgctagtggtcgtcgtagtactagttgtctcatctgcaagttcttccgaagaagctcaagcaccgtcagatttcgccgggggtacgcggaagcttctgaaccgtgccgcacctccgccaccggcaccggcgtcacgcactccggttggcgcctccaccaccttgccgccaccgccagcagtagcagtatgatgcgaatgtgtttgtgtacgtggcttattgttattggaataaggttgtg

SEQ ID NO: 9657 - DNA, 2005 bp, Zea Mays
attgataaaataaatattacactttatcttagccaaaagctcgaaaatgtatgtgttaaaaacgagtccgaccctctttttttacagctcaattgattgttcgtcctctttagctaacaaggtgatattatataggagcgttatgctacatgtggtttggtgtcgtatagaaattatgtggtttatcacggtccatatttggtttaacggcctatatatagtataacggcatattagtagatgagaagtagggaaaatgaacagactatacgttttgcatgtggtgtatgatttcgcatatggtgtatctctactactccttaagaaaggagcgtaggcgtgcacaccaacccgttctgcctccgcttcgatcatggggtggtcgcgctttcgtcgccgccatcaacggtgtcgctatctcctccctatccggcgtccgcgatgctcgccacccctcctcccccacgcgtcggacgctcgccatgctcgcctccctcccctccggtccgcctcgctccccttccgcccttccgtcgcgtgcgcttggaaaaaggtccagcagccccaaactccccagcggggccatctcgcccacctctccctgcacgccggatccccgccgtccccaccatcgcctgtgttgggtccgacccagtccgctcatgcctcgacgcgcagttctcgcacaccgtccgcggcggcgtccgcctcgcgccggtctcgcacaccgtcccgcagcggatccaatcacgcctcctcaccctccgctgcctcctcccatcccctctcccatcgaatccgcgattccgcgtccacagtggataccgtgagctcgcccccgcctccatggctccatcctccgctcgcgattcccccgtgcccgttggaagggggtcacggatcctcacacggttcctgctgcactacctccgcgctgccacgcgcaggccgccgacgcttgagcgggagggcaccgcgctcgctggcctcgcggacacggccgtccacggcatggcgctcgtcgagggcacgacgttctcgtgccggggcctcttctgagtgctccggatcgtgtcggcggtggggctgagcagggagtgccgtcacaagctggagcggctcatggggctgatgctggtccaggccacgctcgacgacctccttgtctccagcgacgacggcggcgacgtgtacattgtcaacctggtcatgaggctggtcagggtgttcgtggcctccaaagaggaggcagacgcgccgtcggagaggatgcggaaggtggggcgcctggtcgacaagtacctcgacgaaatctcgcaggaccaggggctgaaggtgtccaagttcctcaccgtctccgagagcctgccggactcggccagggactgctacgacggcgtgtaccgggtgctggacatctacctcaagatggcatatcccaaaaccgctctacttacaaggatggcaaacatgctcatccaaatgagtcttcagaacccccttactttggctcatccgtgagcattttacagaagcaaccagccaaggaaccccatatggatggggacaatccgaatggctctgctaacagagatgattagcggcaagcccacgataggccggagcctaagagcagcgtgcttttaggattagttgagatttgagaacatgcaatatgctgtgacggtggatgttctgcaaactgtgttttctgtttttggcgctgttaaaaaaatcaccatgtttgagaagaacagtggattgcaggctctaatataatattcagcttgagaaggacctcaaggaacaacaagttgtgcaaggtgcagtggaaaacactttaggggctggttctatcaatttgctattagagaatccaataccaaaggcaaattctctttccaacacaccaaatccatatgaacaaggcatctcgattattgggcgaacactatcgaaattcgatgaagatgatctgattccatgtttcggatttggagatggt

SEQ ID NO: 9658 - DNA, 2580 bp, Zea Mays
ccacgacggcgcgccgcactctgcccacgacctcgacctcctcccccatgaccacgacctcaaccgctctgccagctccgccacttacgcacgcacgacctcaacctcgcctgattcagcgcatagaagagcgtgtggcgtcgaggtcgagcgtgcggcgccgaggtcgagcgtgcgtcaccgagggagaggaaaaccactgagcgttatttcctaagcctcctgcttgatgtctccaccgtccctcaacgcaattgccgccgcccgggatgcgctccacccccgcccgctaatcgtccccttgcaactgccgccgcggccgccaatcggcccccaagaaccaaaggttcgagctccgcaggtggcaagctccttcttcatccacgccctccctccgccttgagaaccagaggaaaccagagtcaccaaaactacgggcaagactgtacgaagggaaacatagtactcccacgaagaagaagtgctgcaactgcaggaactccaaatgtttgaagttgtttcgagtggcttcgcatcgcaggctgccaagcccaccgagaagcaggtcaaggtacttgccttatccgtgatgagcgaatgtagttgtaaaatgggaaacgttgctgttttattatatggccgggagtggtgaactggtgataggctactcttgtcagtgcatatgtattatttgcaacccatggattatgcaactatttctctattatatttatattttttccctgatagtgccttcatgttttgtgttgtgctttcacatcttgatattatgtgcctcagtcaaagtttcatatttgtttctattgttttcttggttcaaatcatgcgttgcttgatggtgctgctgatttagctctagagatatgggggaaactacggaggaggaacaaatacatagtgatattgccagctggcctggcattaatatgtctgtaaaacctaccaactccagccttaagttgtatggtggtgcagcttttgggagacatgcatgatttcattgtgtaatgtatttaatgaaatgcccacaagtccagtctcaagggagaaggtagtctttagcctgcaaccatacacatacacaatttattacgagaattgcttatataattatgtcattaggttgcaaacatactacttgctcatgttggatgacatggaagcagtaggttgaccaaggcaacagctgagatagctcgtgcagccaaccgatcatggcttgctcttcttatcgatactgcatgtgaccagttttcatttatcctacaaagtctgtttgatctcgctatggagcacaaccgcaataaggactcacaatgtaagagcttgaccttgctattcatgctggttcgtcttgctttacatttgcctgggtatcatttggttcacagtgaagtaaattataattgtttagtaaatatttcattttattttgttctacatgttcatcaaaaggtaggcaaggattgcattttctctactgcatatttagtcatctgcattccccaacttatgctgtaaattttgctaccaaattatgctgtagattttgctttgcgatatctcagtaattgcaggagcataatttggtagctaatgtgttattgttttggtcttcccaatgacgactgttgttggcacttggcaggatgattttgtacgtcgtttgtgccaaactgttttagttttgaccaggtttatatgaaaaatagttacacaagtacattgtaaaagttattttataattaatatagtgatactaatttagtgttctacatgttgatattttttactatactttagtcaaccctaacttcgttttgacccaagaattttggaatggacagaatggttctttcattaatccattgttttgttttatatgttgatcagcccatcacaatgcctttgacagtgactttgctttttaaggtgcagtcaatacacatggcatccatcaaattacagaagaagttatttttgcaaagagaatatcaaataaaatacttgttgagcttaagtttcttcatcaaatcatttttgggaggcttcaaatgtagcactataccatggtttggtgaaaggagagaagatgaaggtgctggtacatcacaatcaatactagaagcaagacagacgcacccactattgttactgaaggtcaagatgcacaagatgatctgacaacaccacatgcacctaagatgtccaaaaagattactccaaggaagaaaagcaattgaactaccttatgtatattcaaaattagtgtattatccactatgttgtgtcaagaactatgacttcaaaattagtgtgtcatgaactatgctgtttcatgaactatgtcttcaaattctgggaagtggagtgcagtttcttgtataattttgaacatgtccatgtgcacctactctgctaattgtgtcatggactgacatgaattatgtcatgaactctgccaactgtgtcatgaactgggaagtggagtgcaccaaccgtgtcatgaacatgtccagtttactgcaactctgccaatgataataaaatgtccagttt

SEQ ID NO: 9659 - DNA, 2944 bp, Zea Mays
ccacgacggcgcgccgcactctgcccacgacctcgacctcctcccccatgaccacgacctcaaccgctctgccagctccgccacttacgcacgcacgacctcaacctcgcctgattcagcgcatagaagagcgtgtggcgtcgaggtcgagcgtgcggcgccgaggtcgagcgtgcgtcaccgagggagaggaaaaccactgagcgttatttcctaagcctcctgcttgatgtctccaccgtccctcaacgcaattgccgccgcccgggatgcgctccacccccgcccgctaatcgtccccttgcaactgccgccgcggccgccaatcggcccccaagaaccaaaggttcgagctccgcaggtggcaagctccttcttcatccacgccctccctccgccttgagaaccagaggaaaccagagtcaccaaaactacgggcaagactgtacgaagggaaacatagtactcccacgaagaagaagtgctgcaactgcaggaactccaaatgtttgaagttgtttcgagtggcttcgcatcgcaggctgccaagcccaccgagaagcaggtcaaggttgcaaacatactacttgctcatgttggatgacatggaagcagtaggttgaccaaggcaacagctgagatagctcgtgcagccaaccgatcatggcttgctcttcttatcgatactgcatgtgaccagttttcatttatcctacaaagtctgtttgatctcgctatggagcacaaccgcaataaggactcacaatgtaagagcttgaccttgctattcatgctggttcgtcttgctttacatttgcctgggtatcatttggttcacagtgaagtaaattataattgtttagtaaatatttcattttattttgttctacatgttcatcaaaaggtaggcaaggattgcattttctctactgcatatttagtcatctgcattccccaacttatgctgtaaattttgctaccaaattatgctgtagattttgctttgcgatatctcagtaattgcaggagcataatttggtagctaatgtgttattgttttggtcttcccaatgacgactgttgttggcacttggcaggatgattttgtacgtcgtttgtgccaaactgttttagttttgaccaggtttatatgaaaaatagttacacaagtacattgtaaaagttattttataattaatatagtgatactaatttagtgttctacatgttgatattttttactatactttagtcaaccctaacttcgttttgacccaagaattttggaatggacagaatggttctttcattaatccattgttttgttttatatgttgatcagcccatcacaatgcctttgacagtgactttgctttttaaggtgcagtcaatacacatggcatccatcaaattacagaagaagttatttgtaggtatctaagaagttggagttgcatcaaaaggcgagggtgtcgctaagttccaacatgcattaaaattctatttttgtgatataatattttattaaataatttgtgtgtctttgcaacgcactagcattacgcaaactcaaatagaaatttatatattatagtcattcttgtcattccgtatctatgttttattctaatttttaactttcgtggcaacgcacgggcacatacctattatttcatgatgtgtgatctctttctaagacttctatttccatctgaactacaatatatgatatttatcatcatttttttctagatccatctttcatcccatccactctctgaaaatctaagcttgaatgcccaatactaaattttgcattatggaagcagtttgaacaaagaacaatctctgtcactttgtgtggcccaccagtaaaaataagacaacttgttagtctgattatatgcttctttgattaagagggctatgttcaaataaaacattccagtaaactggacaaagtatcttgaactggaagaagcctttcaaaaatacacatcctttttctacagttcaataactcacaacttcaattctggatgcaagtgtttattattctacactctgctgattcagacctgaaaatgtttgcagttgcaaagagaatatcaaataaaatacttgttgagcttaagtttcttcatcaaatcatttttgggaggcttcaaatgttctatgaacacaatgataataagatgagctacccagcaatggctcaacttctgtcaaatatactctactacaagagaaattgattgggataacatctctactactatgaagaatctaaggggtaggatgtctcccctggttcaattgaaagtagatgagaagagtaaggaacacaaaaaatacctaaggaggatgttgtatacctaaaagttggattgcaacttgagtatgataggggaactacgatggggaacagttggagtaatgatgctgcactataccatggtttggtgaaaggagagaagatgaaggtgctggtacatcacaatcaatactagaagcaagacagacgcacccactattgttactgaaggtcaagatgcacaagatgatctgacaacaccacatgcacctaagatgtccaaaaagattactccaaggaagaaaagcaattgaactaccttatgtatattcaaaattagtgtattatccactatgttgtgtcaagaactatgacttcaaaattagtgtgtcatgaactatgctgtttcatgaactatgtcttcaaattctgggaagtggagtgcagtttcttgtataattttgaacatgtccatgtgcacctactctgctaattgtgtcatggactgacatgaattatgtcatgaactctgccaactgtgtcatgaactgggaagtggagtgcaccaaccgtgtcatgaacatgtccagtttactgcaactctgccaatgataataaaatgtccagttt

SEQ ID NO: 9660 - DNA, 3307 bp, Zea Mays
ctgaacagccccccggtcgctcctcctccctctaccctccagctccagccgccagccgccagccgcccacgcccggagcaccgccgcaacccgcagcgccgctcgcccggaggccggagcaccgccgctctccccgcacggagcaccgccgcgaccacgccgctgtccatccgccgctccgcgctccctccttcgaccttcgccttggttccgacgcggtgaccgtgcgctaaacccttcgaccttcgcccggaggcgggagcgcggcggaccggagtccggagcaaccgtgagacgagcaggggcggccggcgggcgcggatatttgggcgcaacaactttctgcccttccatttctccaactaagaaggaataggatgccaagagagtttctgcaaccccaatgaagatggcaccagctccgcctccggaggggactgcaattctgctaattcgtggagctcagagttctatcttaacggtgctgctagttatgcttgggtgttagtgctatggctactcattaccaagctgctaccttgattgcctctccgtcttacccaaatgccattgcttggtcaagtgacaatctcgtggctgtcgcatctggtcatattgtaactattctgaacccagctgcgcttgatggaccccgtggattggttggacttcgtcacagtgacccttttcctataggagtggttaagagagaagatctcttggagccatgtttattgcccacttccttagcgcgtgaaactgaaccatgtgcccgatcgatttcatggtctcaacaaggatttgcacctaactatgggtgtttgctggctgtttgcactgtgaatgatcatgtgaagctttaccgatcaccaatttgggagttatgtgatgaatgggtagagagttggtggttttatttatgacggcaatgaagttgatttagatgcttcaaaggatgcagacttctcgatggaaccatgctcaaaatcaaagaagaaatctttgaaaaagactgtaaaacccagggatgaagtggttgctgtaaatggacgaaacagcacagggaatgttaaagcatcattgtcctccaatgaacaaaacaaatctcttcctcttatcacggcaaaacagtatgcctgtcgtgctgcacatttgtcttcccttgtagtttcatggtctccagttgtgtcattaagtgatagaacttcttgtttattgaggcattggtgcattcttgctgttggctctaaatctggaaatatttctttttggaaactatataagccagaatattacacaatagatgctggtgtggttaccagtgatccgatgctcatcggggttttgcatgctcatgaatcatgggtcaatgccataacttggcaagttctttctgcgggctcttcaaaatcctcgttgcttttagctactggatgctcagatggaagtgttaagatatggttagggaatattgaagggttaaatcaatgtgcaattggagaagaagtgccatttgtgttagttgctgaggttgccgctaatttatcagctccagtgtcgtcaatctcattgggcatacctgcccggtctcaacatgaggttagtttggcaattggaagagtatccgggttactagaaatatggatatggaatgcatctaccaacaaaattgagagttccagtgcatggcatgcacatgatcaagtggtttacgatgggctatcgatggcaattgtttattcagctgcagtcaggacaattctacacgttgttggatatctcacgaaaaccaccttgaagaattttttttgcattcagaattttcagagctaagggagtcagaagatctatcaaaagtttctgatcgatgctatggtcttacgctatcacctggagaagagataattgctgtggtccgcagtttggatctgaaccttttgaaccagatgtatcaagtcaggacacaaaaggcggtggtcgagttcatttggatcggtggccaatttgttggtattccactggacgggagtatcgatatttgcagtccgcagtctgcggacttatcctcaagtaaccttatgtggtggggatccaacatcttgtggtcgctgaagaaatacgaaaatgtcgaaaagaggcttgtgttgtgggacgttgtagctgcgctgcaagagctgaagaaaaccgcgcccgcctttctggagactctagtgcacagttgggcctcagctttatttgcgggcgactcacagtgtgtttctatcactgcccagtcatcacgctcgatgcatgacatgatgccccatgtcagctcgcggaagctgcacttactgaacataatctgcagaaaagtgatgctcggcaatcatgcgcggcatggtcctggtgctggaaacaacagtaatgatggaacaactgatttctggagcactcttttggtagcgagtgaaacggagctgcgagagaggctggtgggtttcacctttgccgcggtcgtgaaacggacagcgtgtctgttcaacggcacctccaccgcaaattgctggttccctgtcggcgtcgcccagatggattcttgggtatccatgaactacgaaaaggtgcacggtcagctgcagtcgatcagatcgaagatcaaagagctaggaagcaggatcgacggatactccgacgtagaaagctgcccctactgctcttcgccggtccgtttcgagtcgcctgacgtggccatctgcggagaaaggcacacgctgtcgcggtgcaggacatccatgaccctgtgctccgtcgcgcagccagtgtggcactgctcgtgctgcgggggcacggtcgacaagctgctgccggagtcgttcttcaccatgcctttggacgccgtccgtgacgacaaaggatcgctcgatctgtcggcagcctccgccccgctttgccccttctgcggcgtcctgctgcagaggtcgatgccggcgttcctgctctccacctcgccggtatagtcttcggatgcccccaggtgttacatgcagtagcaatgcaatgggaatatcgtagtggagccaactaccaagtttgttgtagctgatgctgtatggctgcagagtggcagtgccgtcattggggctcgaaatgtttgtgataggttttgtgacttctttctgcttagcccctctaatatatctcgagatacctattttttatttaccgtaccctgcctctggaccaaagcctatgtggcggtggccgccaggctgagtgcggggcgaggggcttgggccagctcctgcactcagcctgatgaccatgtccg

SEQ ID NO: 9661 - DNA, 3396 bp, Zea Mays
ggcccaaaaatcagcgaataggcccatcagctccagccgcgcgaccgcgtgaacactgaacagccccccggtcgctcctcctccctctaccctccagctccagccgccagccgccagccgcccacgcccggagcaccgccgcaacccgcagcgccgctcgcccggaggccggagcaccgccgctctccccgcacggagcaccgccgcgaccacgccgctgtccatccgccgctccgcgctccctccttcgaccttcgccttggttccgacgcggtgaccgtgcgctaaacccttcgaccttcgcccggaggcgggagcgcggcggaccggagtccggagcaaccgtgagacgagcaggggcggccggcgggcgcggatatttgggcgcaacaactttctgcccttccatttctccaactaagaaggaataggatgccaagagagtttctgcaaccccaatgaagatggcaccagctccgcctccggaggggactgcaattctgctaattcgtggagctcagagttctatcttaacggtgctgctagttatgcttgggtgttagtgctatggctactcattaccaagctgctaccttgattgcctctccgtcttacccaaatgccattgcttggtcaagtgacaatctcgtggctgtcgcatctggtcatattgtaactattctgaacccagctgcgcttgatggaccccgtggattggttggacttcgtcacagtgacccttttcctataggagtggttaagagagaagatctcttggagccatgtttattgcccacttccttagcgcgtgaaactgaaccatgtgcccgatcgatttcatggtctcaacaaggatttgcacctaactatgggtgtttgctggctgtttgcactgtgaatgatcatgtgaagctttaccgatcaccaatttgggagttatgtgatgaatgggtagaggtcgcagatatatcacagttgctgtttaactattataaaattataaacttcggagaggataatggttctcatttgacttcttcgaagaatacaaattctggggaggcagaagttttaggatctacttgtcgatcggaagaatctctttatttcaggggtcctggacagagaaaaataaagccagcaagagttggtggttttatttatgacggcaatgaagttgatttagatgcttcaaaggatgcagacttctcgatggaaccatgctcaaaatcaaagaagaaatctttgaaaaagactgtaaaacccagggatgaagtggttgctgtaaatggacgaaacagcacagggaatgttaaagcatcattgtcctccaatgaacaaaacaaatctcttcctcttatcacggcaaaacaccagaatattacacaatagatgctggtgtggttaccagtgatccgatgctcatcggggttttgcatgctcatgaatcatgggtcaatgccataacttggcaagttctttctgcgggctcttcaaaatcctcgttgcttttagctactggatgctcagatggaagtgttaagatatggttagggaatattgaagggttaaatcaatgtgcaattggagaagaagtgccatttgtgttagttgctgaggttgccgctaatttatcagctccagtgtcgtcaatctcattgggcatacctgcccggtctcaacatgaggttagtttggcaattggaagagtatccgggttactagaaatatggatatggaatgcatctaccaacaaaattgagagttccagtgcatggcatgcacatgatcaagtggtttacgatgggctatcgatggcaattgtttattcagctgcagtcaggacaattctacacgttgttggatatctcacgaaaaccaccttgaagaattttttttgcattcagaattttcagagctaagggagtcagaagatctatcaaaagtttctgatcgatgctatggtcttacgctatcacctggagaagagataattgctgtggtccgcagtttggatctgaaccttttgaaccagatgtatcaagtcaggacacaaaaggcggtggtcgagttcatttggatcggtggccaatttgttggtattccactggacgggagtatcgatatttgcagtccgcagtctgcggacttatcctcaagtaaccttatgtggtggggatccaacatcttgtggtcgctgaagaaatacgaaaatgtcgaaaagaggcttgtgttgtgggacgttgtagctgcgctgcaagagctgaagaaaaccgcgcccgcctttctggagactctagtgcacagttgggcctcagctttatttgcgggcgactcacagtgtgtttctatcactgcccagtcatcacgctcgatgcatgacatgatgccccatgtcagctcgcggaagctgcacttactgaacataatctgcagaaaagtgatgctcggcaatcatgcgcggcatggtcctggtgctggaaacaacagtaatgatggaacaactgatttctggagcactcttttggtagcgagtgaaacggagctgcgagagaggctggtgggtttcacctttgccgcggtcgtgaaacggacagcgtgtctgttcaacggcacctccaccgcaaattgctggttccctgtcggcgtcgcccagatggattcttgggtatccatgaactacgaaaaggtgcacggtcagctgcagtcgatcagatcgaagatcaaagagctaggaagcaggatcgacggatactccgacgtagaaagctgcccctactgctcttcgccggtccgtttcgagtcgcctgacgtggccatctgcggagaaaggcacacgctgtcgcggtgcaggacatccatgaccctgtgctccgtcgcgcagccagtgtggcactgctcgtgctgcgggggcacggtcgacaagctgctgccggagtcgttcttcaccatgcctttggacgccgtccgtgacgacaaaggatcgctcgatctgtcggcagcctccgccccgctttgccccttctgcggcgtcctgctgcagaggtcgatgccggcgttcctgctctccacctcgccggtatagtcttcggatgcccccaggtgttacatgcagtagcaatgcaatgggaatatcgtagtggagccaactaccaagtttgttgtagctgatgctgtatggctgcagagtggcagtgccgtcattggggctcgaaatgtttgtgataggttttgtgacttctttctgcttagcccctctaatatatctcgagatacctattttttatttaccgtaccctgcctctggaccaaagcctatgtggcggtggccgccaggctgagtgcggggcgaggggcttgggccagctcctgcactcagcctgatgaccatgtccg

SEQ ID NO: 9662 - DNA, 2863 bp, Zea Mays
acaagaacgagtgatcactgaccagagctcgctgcaggctgcagctggtggttgttttgcctcctgtagtcctgtccgtcgcatgccatgggggtgccttccttcttcaagtggctcgtgggcaagtaccccaacatcgtcgtcccggccaaggaagacgatggtggcgctggcgccggcgcgtcgtcgccgtcgtcaccgtgggacgaaccagccgccggccctaatggcgtctaccacaacctgtacctggacatgaacgccatcatccacccctgcttccacccggaggacgaggtgtgcccgccgacgacgttcgacgaggtgttcgcggccatgttcgagtacatagatcgcctgttccgcatcgtcaggcctaccaagctgctctacttggcagttgatggtgtagctccccgcgccaaaatgaaccagcagaggtcccgacgcttcaaggccgccaaggaagctaaagacgccgaactggaggagaagcttctgagggagaagttcagagctgaagggagggaggtgcgggcgcggccacgggagacgcatgaggtttcggatcccaacatcatcacgccagggacggagttcatggagaagctctccaaagccctcgagtactacgtccgttcccggctcaacagcgaccccgggtggaaaggcatcaaggtgaacataaggtcatgtctttcatccgaggacaacggagcctggcaagctatgatccaaacacaatgcactgcttgtatggactggatgcggacctaataatgctcgctttggcatctcacgaacttcacttttcaattctgcgtgaggatgggtcacgtcaaagtcagccagaaaaatgcatctctctatccaacgaaatgctcaaaactgaagattcctcaagaaaatgtcgtggatggttcccccaagtaatagaaacaactcccaagaaaccttatcagtttgtgaacatatgggttctgagggagtacctggagcttgatttgaagataccaaaccctgttgtcaaaacagatattgagaggctcatagacgatttcatatttatttgcttcctgacaggaaatgacttcattccacgtattccttcagttgagatacatgagggtgcaatagacctgctgttggaagcatacaaacaaacatttaacaagatgggaggctatattgtgagcactgagaagttaaaagacaaacacgctgcatatctcaaagtttcaaggttggagaagttctttcatgaactgtccttatgtgaagagaaaatatttcttaaaagatatgacctacgagagagtttacaacgcaaattcttgcgccaagctgcagaagaatgtaaagaaacaaactatgacactatggaagaaaatactgatggtctaaacttgacagcaaagtctttttctacaaactgtagcatttccacctacagccaagacgagtcagatgtaaaagcaaataccttagagctgaggcgaaacttaaaggatgctcttcgtaacaagcaagaccttataaaaagtggatcctgcaaacatgacatgataagattgggattggcggggtggaaatctcgatactacagagaaaagtttggcgtggaaaaacttagtgaagttgggaaactgaagaatgatatggttcaaagatatatggaaggactttgttgggtgttgcagtactattttacagatgttccatcatggagttggtactacccctactatcatgctccatttgcatctgattttaaaggactatctcagttcaagatatgtttcaccaccgacaagccactaaaaccattcgatcagctcatggcagttcttccaaaagaaagctcatgtgcactgccaaagtgttacagagaactgatggaaaatgaagagtctttggtacaaaaattctatccgtcagatctacagattgatacccatgggaaacgtttcttgtggcaaggtattgcaatgttgccattcattgatgaaaagctgctggtttcggctaccaagacggtggagggcaaacttgcagtgcatgagatcaataggaacgcagttcggcaagagaagatcttcatgaggaactcaaacactactgtgccaaacggttcagcattttcgaaggcatttgactgttcatcgaaaaagctttggttagatccatctaccagtgagcttggagggtggttgtcacctgtcgacgacaaagatacaagctccggtttcttccattcatcggtgatgagagatctaccggacattaggaatgaccagacaatatcattcctgttctcgaacccggaagcggtggaaaccattccaagactgcttgatgatgtcaagaaacctgaaaagactataactgaaactgagatttccaagaggccgctgtggcacacctatccgggttgccgactacctgaaaccaacccaagcgtgctggagccgcagccgatggtcagcagctttggacgtgggagagggagagccaccgctgccgagacgatgctgggcggcggcggccgtggctacgggagaagtttccatggggctgagtcgtcgcaaacgcaaagtcgaggcagcaggaatgacggaaactcttatgcaggaagagggacgtatggtggcgggttccagaggcagcagaccgcttggcgcccagctggggatgcaggcggacgtggtgggagcgagcaacgtcgtggttggtaggcctggcgacagatgacatggaagaactagcgtgtttttttgtcgatacgcggcgttccattttgtctgaaaacatcagtaatgcttatgttaatctctgaaattatccgtggtatctcaaactagag

SEQ ID NO: 9663 - DNA, 2006 bp, Zea Mays
atgacgggagcaggcatgaagcttaagatcaacaaggcatgcgacctcagctccatctccgtcctccctccccgtaggaccggagggagtggcggcgcaggttcctcggccgcggccgcggctgtggcggcggggtcgcagcagcggtcccagccgctgtcgcagcaatccttctcgcagggcgctgtggggagcggcggcgcgtcgtcgctcctgcactcgcagtcgcagctatcgcaggcctccctcgacgagaacctcctcacactccacctcgcttcgcccgcgcgcgaccagggattcaggttgcatgacgactcatcaaagaagatgacatcgttgcctgtcacctcagcttcttgtgtgcgagaagaatctcagctgcaactggcaaaaacatcaagcaaccctgtccatcgatggaacccttctcttcctgatagtagatgtgtggttcctgctgaggatgttgagcgcaaatttcagcatatggcaagttcagtgcataaggtagggatggtgctcgattcagtgcaaaacgacactatgcagttaaacagagccatgaaggaagctgcactagattctggaagcatacagcaaaagattgttgtcctcgacacttcgatgcagaaaaatcttaagggacaaggtgatctcaaagtgcttgttgagagcaacacaaaaaacattgctgatcagctggctgttctgaactcccactccaacaaactggttgagatatcctcagccctttcagtcttgccgaaacaaatagaaagagatttaaagcaacaacagagtgacatcttcagaatttttagaaacaacatggaggagattgctagagctgtcaaatctctcaacagtaagatcgatgcaatccaaatgccaacagagcagagatgcacaaccaatggaaggcccctgatgaaccaactaccagtcgatagaaacgaaaggcctcaggtgaaccaaacaccagaggtaacccgggtgagccagacaacagtagcaagcttagtgaaccaagcaccagcagcaaatggaaggcacctgatgagcaaaacaccagcagcaaatgggaaaagtgtgatgagacaaacaccagcagaaaatggaaggcacctagtgagccaaacacctgcagcaaatggaaaaactctgaagagacaaacatcagtaacaaatggaatttccctgatgagccaagtaccagcagcaaatgggaaacctgtggtgatccaaataccagcaccaaaaggaagacctatgatgaggcagaaaacagcagaaagcggaaggaccgagatgaacgaaatacccgtagcaagtggacgaccccatacaaacaaaatacccatagcggaagtgcatcccgcacctttggtgtgccctgcaaagcaggtagcaacagacccgaagcccaaggtagacgaggaaaagctgaaagcgcttccccaaaagctaactagttctagatccagggtggcacctaaacaggaagaggcggcaaatacaaaggtcatcagccgggcagcggcaactgagaaggtggtgatattcatcgacgactctgacgatgacaacgacgtccgtgcttcctgcgtgatcctcaggccctcgggatcaggcagcttaggtgagagggaatgcgacctgatgaaggtgggcgcggaggagagccaggagatcccgcggagggccaggaagcggaggagaagagaaatgcaggccactgtgggtgtggcatgtatgccgctgcctgcctgagcttcggtatggttgactgattggtataattgactgattaattgatgcggtcggtaatttagagcagtgtttgcactgcactgcatactctataaaaggaacagtagtagataggtgaacatgaatgaatgaggacaggaaaacaaaggatcagggttatattatgaatatagtagagagaaacacagttttgttgtggtgtttgttgtgttataataaatcatattggaggt

SEQ ID NO: 9664 - DNA, 2427 bp, Zea Mays
ggttgtagcggcgccattactttcgttcacttgttctcactcagctcttcccgtttcccgccctcgctcctcctggactagggttcatggatcccgacaccgccgtggcctccgcagacggggggccattcctagagttcgtagactatgccatctccatgctctcctcgtccgctggcgacggcgatggctatgagtctccgggggacgggccggcgccggcgcggccgccctgggggtgggcggtggcgcagctgctcaagtcctgctgcgcctactccagcggcgtcaccgccgccatccttctctccgacctcttccaatcttggacagaacagcggaaatccctgaccctgaagaggaaggtcaagctgcccaaacttataaacacgaagaataagaggaggaggcttccaaatactgtcacgatcgattctatccacgagaagaacttcctttctcccaatagtgtccttgaagttgttgtcattgccgtgtttgtccttcctggtactatgactgcataggacaaaatggtatattgaagaagggtcgagaagttatgctcacaggatgttgtcttcgtacagccatggagggatctggccatgctcgtattttgccaacagaatacatggtgatattactggatgaggaacaagatgaagatgccttgctacttgctgcacaattttgcaactattcattctcttctttgattctagaggaaagtagaaacaatgttccgtactcattttatgccaggattgaaaagattgagtccttggaaccatttagatgcgcagaaagaatgcagataattcttgaagacaatgacaatgcgaagatgaagttagttttatggggagagcagacttcacttgcaaatctgtgcagtgtagggagcatgcttgcactggacagacctttcatagcaaattttatagacaataatcatgaggattctcaggaactgtgccttgaatatggcagtgcaacacaggtttacatggtgccaatcgctcaacaagaggaacaggtgccttttacacctacccaagtaaagagccaaggacctcggctgtcatgtgttctgactgataatgtagcttcgcaagtaacattaccacgtgatttgtatggttcagttgatttcagcaaatacccgtttcgagcatatgtaagtgaccttcatgataaaatggtgggaatcagtctgtttggtaccgtaactagtgtttgcaaagtaagcacatcagggactacgttctatttggagttggaagacacaacaggagttgttctgatgaagcttatctttgttggaccctggtcattaggtagagtaggagttgggcatatggtgtacatctccggtttgacttgtgccttgagttcaacaaatatccttgaagtctcatggcgtgaaaaggagccagggtctctgtttgttaacttaagcttgctgccagcactcctaaactcatcgtgcctgcataatttatcacccttgtcagatcttccccgttcgacaaacagaacacatatatcccatgttcggttagatggcatcgattgtgacagtttaaaggtgtcgctgttccacaacatttgcggcagtgttgtgaatgaacattcaggtgtactccagtgttcattctgtaagtgtgcctgcgaaagtgtatgtgcgcgtggctttcagctgcacttgaccatcgcagacgacagtgcagatgtcttggcttggtgcgttgggcaaacggctgtcgagttccttcagatatctcctgacgaatacctagagctccccgaggatgaacgggcaatgtatctctacactctccagaacgaaagctttgtggtggctatcgcgaataccaggaagcgagtcgatggatgtgctgtgggtgatgaagccgtcccagcttgggagatcacgagagcccagaaatgcgaatgagttcgtatagcgctcgagaaagaaatgctgatgctgaaaagttactgtaacacgtgtttcaacctccgtttttcatcaaccaattcgtcgttcagcaatgcagccatatgcatgagttgtccattgactccaaatgatgcttaagcacgatggttaggatgggttcttcgttgacaaagtccgagagtaagacgtcgacgaaggcatagcgtttaactttaagatgggttcactactgaaaaatttcggttgttcttcattcatgttgacaataggttatttgcttggcaacgtagccagccgacttcagatttatctgaaactgtgccttttacatctagggacttgtacccagcaaacaaacgctgcccaccgcggttgagttacggagtgtttggttgtctgattaaaaggttattttgtgtcacattaaatatttaaattttaattatgagttttaaatataa

SEQ ID NO: 9665 - DNA, 2534 bp, Zea Mays
gaaacaaacaggggctttcatttctccccgccctgcagcacgaccgcgaccagccaccgtctccgcccccgccccggttgcttcagatctcctcctcccccacccggccacccccagccgcaccagccaccggccagctcctccgcaccaggataatctctgcccttcgtaccccctcgccattgcgcgcgcatataaatcccacatccccatcgctctcgcctctgcccacccacccgccgcgcccctactgcgcagcacgcacgtcccctccgcggccctggatctaggctgatcggtcgccggccgggagcgaggatcgggatctcggcccggggctgcccccccgccggaatggaggtcttcggccccgtcacgcccggacaggtgtcatttttgctaggtctattccctgtcctcatctcatggatctactctgaaatcctcgaatacaagaaatctttgtctcatgggaaagttcattcagacgctaatttggataatggaaccatcaaggaggatgaaaagtcagtattacttgaaggaggacagttgaaatcaccatctacaaagttcaggaacttgtctaccaaagcgaatttgttacggtttataactatggacgagtcttttctgcttgaaaaccgtgctgtactgagagccatggctgaatttggcgttgttctggtttacttctatatctgtgaccgcacagacatatttccagaaagcaagaagagctacaatcgtgatctgttcctgtttctatacattcttctcatcatagcatcaacacttacttcactaaagaagcatcatgaaaaatcagcattttcaggaaagtctatactctatcttaatcgccaccaaactgaggaatggaaagggtggatgcaggtcttatttctgatgtaccattattttgctgcttctgagatatacaatgcaatccgtgtgttcattgcttgctatgtctggatgactggatttgggaatttctcatattactatatcaagaaagattttagtattgcaagatttgctcagatgatgtggagattaaatttctttgtggcattctgttgcattgtccttgacaatgatctcatgctctattatatatgcccaatgcacacactatttactcttatggtatatggatcacttggtctgtttaacaaatacaatgaggtaccatcaatcatggctattaagattgcttgctgcttcttgtctgtaattttgatatgggaaatccctggggtatttgaatcattgtgggccccctttacgtttctgctaggctataaagatccatcgccatccaaggcacacttacccctgctacatgagtggcatttccgatctggcctcgatcgatacatatggattattggaatgatttatgcttacttccatcctaatgttgaaagatggatggagaagctggaagaatctgagactaaggttagattatcaatcaagggaaccattgtcactctttcattgacggttggctttctgtggtatgaatatatatacaagctagacaaagttacatacaacaagtaccatccctacacatcatggatccctataactgtttatatctgcctgcgcaattgcacccagcagttgaggaatgcctctttagctcttttcgcatggcttggcaagattacactcgagacttatatttctcagatccatatttggcttaggtctagcatgccaaatggacaaccaaagtggcttctttgtttcataccagattatcctatgcttaacttcatgcttactacagcgatctatcttcttctatcataccgtgtgtttgagatcacaaacgtcttgaagtcggcttttatccccagtagggataatagccgcctataccaaaatttgattgctgggatcgccatctcagtgtgcttgtatctctgctcgcttattcttctgaagattcctggtgtatagctcgggcctcgatccccttttgctgttgtggagatagttgggatgcgcggagaagcggctaaagttggacatacggggaattgaattgccagaggctgcagatacagaagtccgaatcttgatctttttgttcattcaaaacacggatggatacaacaagtaggcaatccttccattcttttggaagttgtagcaactgttcgctagactatgttgatgcaacctcgttgtatgagttatcctgtagaactgcaccgtgttgtgccataggtattctgaagctgtaaaaaaaacgacgggcatttcttcttccttgaaaagaagaaatataaaggcagaggcgcagagccctttcttctcctaattgtaatgtcgtgtttgctttggagtttgaaccatccagtctatatcctgcttcttcaagtgttcgtgctcgtgctgtacgtgcgtacccgcgggctcagtcgaccggtggacggtggtagactgtatgcacggctcaaacttggtgtatgtgtgaaaaattacccgccactgttgttggttacattgaaata

SEQ ID NO: 9666 - DNA, 2636 bp, Zea Mays
gaaacaaacaggggctttcatttctccccgccctgcagcacgaccgcgaccagccaccgtctccgcccccgccccggttgcttcagatctcctcctcccccacccggccacccccagccgcaccagccaccggccagctcctccgcaccaggataatctctgcccttcgtaccccctcgccattgcgcgcgcatataaatcccacatccccatcgctctcgcctctgcccacccacccgccgcgcccctactgcgcagcacgcacgtcccctccgcggccctggatctaggctgatcggtcgccggccgggagcgaggatcgggatctcggcccggggctgcccccccgccggaatggaggtcttcggccccgtcacgcccggacaggtgtcatttttgctaggtctattccctgtcctcatctcatggatctactctgaaatcctcgaatacaagaaatctttgtctcatgggaaagttcattcagacgctaatttggataatggaaccatcaaggaggatgaaaagtcagtattacttgaaggaggacagttgaaatcaccatctacaaagtttataactatggacgagtcttttctgcttgaaaaccgtgctgtactgagagccatggctgaatttggcgttgttctggtttacttctatatctgtgaccgcacagacatatttccagaaagcaagaagagctacaatcgtgatctgttcctgtttctatacattcttctcatcatagcatcaacacttacttcactaaagaagcatcatgaaaaatcagcattttcaggaaagtctatactctatcttaatcgccaccaaactgaggaatggaaagggtggatgcaggtcttatttctgatgtaccattattttgctgcttctgagatatacaatgcaatccgtgtgttcattgcttgctatgtctggatgactggatttgggaatttctcatattactatatcaagaaagattttagtattgcaagatttgctcagatgatgtggagattaaatttctttgtggcattctgttgcattgtccttgacaatgatctcatgctctattatatatgcccaatgcacacactatttactcttatggtatatggatcacttggtctgtttaacaaatacaatgaggtaccatcaatcatggctattaagattgcttgctgcttcttgtctgtaattttgatatgggaaatccctggggtatttgaatcattgtgggccccctttacgtttctgctaggctataaagatccatcgccatccaaggcacacttacccctgctacatgagtggcatttccgatctggcctcgatcgatacatatggattattggaatgatttatgcttacttccatcctaatgttgaaagatggatggagaagctggaagaatctgagactaaggttagattatcaatcaagggaaccattgtcactctttcattgacggttggctttctgtggtatgaatatatatacaagctagacaaagttacatacaacaagtaccatccctacacatcatggatccctataactgtttatatctgcctgcgcaattgcacccagcagttgaggaatgcctctttagctcttttcgcatggcttggcaagattacactcgagacttatatttctcagatccatatttggcttaggtctagcatgccaaatggacaaccaaagtggcttctttgtttcataccagattatcctatgcttaacttcatgcttactacagcgatctatcttcttctatcataccgtgtgtttgagatcacaaacgtcttgaagtcggcttttatccccagtagggataatagccgcctataccaaaatttgattgctgggatcgccatctcagtgtgcttgtatctctgctcgcttattcttctgaagattcctggtgtataggtaaccatcagaaacttacaatgtttgcggttatctctctgtgattcatgtaacccaggtatagcttattgcatctgcagggatgaagatcttgatagaaggtttcttgtaaaatgtttgcttgataggatgtttcagctcgggcctcgatccccttttgctgttgtggagatagttgggatgcgcggagaagcggctaaagttggacatacggggaattgaattgccagaggctgcagatacagaagtccgaatcttgatctttttgttcattcaaaacacggatggatacaacaagtaggcaatccttccattcttttggaagttgtagcaactgttcgctagactatgttgatgcaacctcgttgtatgagttatcctgtagaactgcaccgtgttgtgccataggtattctgaagctgtaaaaaaaacgacgggcatttcttcttccttgaaaagaagaaatataaaggcagaggcgcagagccctttcttctcctaattgtaatgtcgtgtttgctttggagtttgaaccatccagtctatatcctgcttcttcaagtgttcgtgctcgtgctgtacgtgcgtacccgcgggctcagtcgaccggtggacggtggtagactgtatgcacggctcaaacttggtgtatgtgtgaaaaattacccgccactgttgttggttacattgaaata

SEQ ID NO: 9667 - DNA, 1360 bp, Zea Mays
gtaccatgttagtataatacagctttcgtgtggttgcataccaaaagataagggcatactactatactgctctgtgcgtaatacggttatgggatctccagtatgactcggaatcggcacatcatgcattccaccatttttccttggtatatagtactcaaatacacacatcaccccatatatggcatctgtattgaataccaaaaaatggcttgtgtttcagttcagtatggtttggtgcacttgctgaccgcctacttctcgccaattggataattgttgtccactgatccattcaagattgatttcatgctgcagtcctcgcttcactgtgaagtcccgaacggtgccattgacatcacctcaattctcattttcctgaacgcctcgacggacgcaccacatttcctactggagctcatacaaggcagctcaacttcaatggtggtgattctggacctgcttccacggaaagacctcgcgtttcacccggactacctgcagaagtactacgaggaaactggaatggatgagcagcgcagaaagatcgaggagctaccgcaggctcgtccatacagatctccgtcactcttcgtgcgcagcgcatgctcgcctacagcaataatggtgagcattgactgtggacaagggggtgagaaagccttggaagagataatacatggacagttagcaaaggtcattcaggaggctcttcagacttggcttgacaactgtgttgattccaccatagagatggatgaggcggagagggactgcctgctcaagagggaccggattgtaaggtcgaaatcgatagaggttgacctgactgcaaaccttcccaggatgtttggtccggatgtgtctagtcgggtcataactgaaatccgcaaggcctttggtgtacaagagccgtgaagatgatcagttgttaggaccaggtttccaggaacagtctctcatcacagagttcctaagccgttcctgtcttcctgatgctaacatacccaataagcataagaattagctctgcctaaaaaggaggtactgaatggcggtgtgttttgctgcatcttgttttatgtatataaaactttggtgtatatggtgtacatattaaaaaaatatccatccatgttagatctactatcctttgccgctgtatgtattttgcaaagaacactctccatcaccatttttcgcaatgttcggatatggcatcataatagtattatgtgtacctgatatgttcaaatgacaactacaaccaggttgttccgtgttcaagcgaaactgtggcgagctagcatagcagcagccactcctgagctcggatgcacatgatgatggtaacaagtaa

SEQ ID NO: 9668 - DNA, 876 bp, Zea Mays
gagagcctccctgccagtgccggactgccagtgtactgtgactgcgagggatcacctccgactccgactcagatccaaccccgaccgatgcgagcgccggcgatgcaccgctgggccgcggcggcgctcgcagcgttcctcgttgccttgccggctgccgccttctacctccctggcgtggcgcccaatgacttccacaaaaaagatccacttttggtgaaggtgaataagctgacatcaacaaagacacaacttccctactcgtattactctcttcctttttgcaagccaaacatgatagttgacagtgcagagaatcttggagaagttctgcgtggtgatcgcattgagaactctccttatgtgttgagatgggggagcccaagatgtgccagattatttgcaaaacaaaaattgatgataaacaaacaaaggagctcaaggaaaagatagaggatgagtatcgggtgaacatgattcttgacaacctcccactagttgtttctattgcaaggcaggataggggtgctactgtttaccaggctgggtgtcaagggccaatatgctggtaacaaggatgagaaatcctttatccacaaccacttgacatttttagtgaaataccacaaggatgaaactacagatctctctagaattgttggatttgaggtcaagccattcagtatcaaccaccagtttgaagggccgtggaatgataaaaccactcgtttaatcacatgtgaccctcatgccagcaagcttgtggtaaactcagatactcctcaggaggttgaagctggaaaggaaatcatatttacctatgatgtgggcttcgaggtgatatttctcacatctgcttctctttttgtgctctaa

SEQ ID NO: 9669 - DNA, 1813 bp, Zea Mays
gctgttggaggttggagccagcctagaactccacttccgtgttagctttgccctcgtgcgagactctggtactcaatttctgaaggtcgaggcgtgaaagaaaaactccggaggtcgaaatggcggcggcggtgcggcgagcggaggagctggtggagagggagatgggcgggcgcgatgcctcccacgacgccgcgcacgcgctccgcgtccgagaccttgcgctctcgctcgcagccgaagagggcctctccgctcccgaccgcctcctcaccgtggaactggccgctctcctgcacgacgagattacaagtataccaagaacaatgtggaggatataagcgtcgttgagatgtttcttcaagaggtaggattggatgaaggccaaaaggatgaaatagtggcaattattaaggggatggggttcaaaaatgaagtttcaaataaatctattgttgagcccactcttgaatttgcaattgtacaagatgcagatcgcttggatgcaattggggcaattggtattgcaagatgttttacatatggtggtagcaagaacagcgcattacatgatcctagaattctgccacgtgatagcttgtcgaaggaaaagtacatgtccaaggaagagaagcagacatcaatcaatcattttcatgagaagctttttaaactgaaggacatgatgaagacagaggccgggaaaaggagagctgagaaaaggcataggttcatggaggaatttgtggctgaattctacgaagagtggagtggcagggcttgaggttgaacaaccagattttgagcctgtgtcaaagtgtgcagttggcgaaccatttctcaacaacccatgatgatgttgtctacctggcctacttttttgccgatgaagccaggcaaataaacaatggtttgtccagcctattagattggctggacaaatcatacggtcctgtgataagctatcaacccactaccaattccgtggatgaagctggatttttttttccaaacagatgccatggcatcttgctgctgttgtattgaaataatactgctacaatattaccggttacatcacctgaaggtcaagcgttttgccaacacatatacatatgtatctatacatatatatagaagttctatactagatgtaaatgaaacaaatgaagagccctgcttctttcatactgtatatctctcttcagtctcagagtcttattggcaagctcagctcggcaccaacagttcagagcttggtcttgtctctcttggtcagcgtgaccttgaggccgtacttcatgtacatggtgagcgccatcttgggcgcgacggggtggccctcgacgacgtcgacgcggtagcggcggaggatggaggcggcggcgaacttcatctggtagtaggcgaagtccttgccgaggcacaggcgcgggccgccgttgaaggcggtgaacttgtaggcggactcgctcatgaagcggccgtcccggagccaccgctccggcctgtactcccggcagtcgtcgccccagatgctctccatccgccccatggagtacatggcgtagaccaccttggtgcccttcttcagcaccgtcccgtccggaaacacctcgtcctccacgacctgccgtgcgttgcgtcagtactggctggaatcagttactgttaccaataatgatctactattgtctcaaattgaaagtcctatctgcacagtgcataattaagcttcttgatttagttatcggtgctcaagacaagatcatggccaggacgaatttcagtgattgttgttaaaacagatgtg

SEQ ID NO: 9670 - DNA, 1924 bp, Zea Mays
atgcgccatggcccatggcccaacaaggagcggaacacgggccacggagactgtaattcgtcgggctcatccgccttgtgggggcccctcaaccgagtcgtccaagagaaggttttgaatgcactgcgacgcttggactccgactctccgtgcatcgtccactaccagtctaccactctacccacaagagttcatggcgttcggggcagcctcaccacttcaccagcggtagggcacgactcggcgccggcggcgaacggcggcggatcgagggagggagcggggcctgcagaggaaggggtgttgggaatgcgggtagtggagggggcaccggaagctgacgaggaggaagagaagtggctagggcaatactcttctacgcagagcatactgctcgtcggcgacggggatttttcgttctcactggcgctggccacagggtttggctccggggccaacctcgtcgccacgtcgctcgacacctacgggcactgggcaacaaattctgcagagcgaagtctaatataacagccctgaaaagtttgggagctactgttttgcatggcattgacgtgaagacaatgaagttgcagattgacctgaaaaacagacggtttgatcggattatctataactttcctcattctggcttcaaaggaaaagaacatgaggtgcacatgatcaactcgcacaagaagctggtgagggaatttttctgtaatgcacgccgcctacttcggccttatggtgaaatccatgttagtcacaagagaggaaagtggtacgaaaagtggggtcttaagcatctagcagctgagttttctcttgtgttggtcgagaaagttagtttccaaaaggcagactatcccggttatcaccagaagaaaggagctggtccaaattgtgacaaacctttcccgctaggtacctgttccacattcaagttcagaattggaagctcgaagaaacagaatgggagaagggctggaccaatctcatccattggaggcgacacaaggccatgtcgtcctctttcacttgttcagccatggtccgggctacagtttgttccacgagattacatagttcctgtgcccatgactgcgccatctcatgtagttgatcaaaggcagccaggtatgccactaaacttcgttggcatctattctcatcaagggagcactgcccgttcactgctcagcactccagggtcatcgctgacgaatgctttgggcgctccaggccgcattccttcaccaatgggcagaatctcgagcaactgtttgttcgctcgtctggggcaaactctgtatgaaaacagaatcattgctgaatcgctaggaaacactgactacttcgcatgcgaataccaaaggagtctgctgagggagtacaggatgcagagtcaactagtccctgaggcaaccagcttgagctattctgccttcttggaagctcgccaatgggagtctgttcagagacaggagcggctccgcaggaggatcgcatacggtcgttcccagtgaaggatcgtctccctgaggccgaacttggtcttcccagatacgaccacaatgtgttttgtgtatatacaggtacggcccttttgtgtggcaaacactgccacagcagcgaaaggaacgctgatccaagttgctgcgtggagatgtattcctagacagctaacctgcttttgctgtatggagctgccttgaggagacaggagtacattagctgtagcatgtagtaacctcaccttttgggaacagtactttgtgtggggttactgtcaaataccgtaaactggaggtgccagtatactagctactccattgttgaggaacgagtaccaggtactactagcaattgctgagaaaagtggttacagttaacaatggctacaatactttgccctagacgctac

SEQ ID NO: 9671 - DNA, 2126 bp, Zea Mays
ctttcacccaccccaagccaccgcttccactcgatcgagagagagagggaagtgacggaaaaaatatttttttaccttagtgatgtcgcctctcacctcagtgtccttgtcatccctttcacctaagccctaaacagtaccgcgtctccggagtctctgttcccgtctcccagttgctccgtagatctcccttttttaggccaaacaatccagccaccaccacgcctgcacatccccactcctaaaaatagtagccggcggcatgcaaatacgataccccacgccttcttcccgttcatgatatggagctctcctcctcagatcaataatgggcctatatatgagacgcacgagcaacgccagttagcaaccagccaccactaccaaccctccagtctcagtctccgtctcctgctgagcaacaaggcttcagcagttcagagattctgctggagcctggaggaagcttctctacccaccactccgacgcggccgccgtcgacgagatcagccgcgccgtcgccaccaaaggcaaaagaagagatcgagctcgaggctcgagctcgagcaggcagcagggagggggcacccagatatatagatcccccaaaagattaattgatggacctgtccccgaaccccgagagcccgggaagcggtggtgatggcggcggtggcggaggcggagccgggggatcgagcagcggcggggcgtctccgtcggcgggcttcggcacgccgcagacgccgagccggtacgaggcgcagaagcggcgggactggaacacgttcgggcagtacctgcggaaccaccggccgccgctgagcctggcgcagtgcagcggtgcgcacgtgctggagttcctgcgctacctggaccagttcggcaagaccaaggtgcacacgccggcgtgccccttcttcggccacccgaacccgcccgcgccgtgcccctgcccgctgcgccaggcctggggtagcctcgacgcgctggtgggccgcctccgcgctgccttcgaggagaacgggggccgcccggagtccaaccccttcgcggcgcgcgccgtccgcctctacctccgcgaggtccgcgagcaccaggcccgcgcgcgcggcgtcagctacgagaagaagaagcgcaagaaggcgcagcggccggctgatcacgccagcggcagtggaggcggccaaggacctcaccacccgccgcccgccggcgcgtcgggctgaggaacccatggtatgccggccggactgagcatattttatgtagtttcgatcgatttgcggctgcatgcatgcacacggtctacttactcctaccattttgctcgcgccatgctactgcttcttcttcttcttcttcggttagactctccgcagatcgtgtgcctacattgttattgtgcttctgctctctctgctgctactagcttcagttcctagctaccgcttatttttggtgtcaatcagtttaatttgccggtggaagcaaatcttgtcatttgatcaatgaattatatgattgctagctttttataactttttcatccagcattgctcattgtagatcgacttgcatacacttgtgtatcgattcactgtacatatacgtacgtacgtgtcctcaattcaaagtacatggcgaggacgagagagccaagtcccatcgaggacgtacaagcttgacgcaccctcatctttggctctctttctagttctgcttcctgcgccgtttcctttttctggtcagctggcgctcgatcggcgccgcgccaaacagcgaactgcaccagtgagcagtgtgacaacgggcatggccggaccgatcgatcgatcggatcgccgctcgtactggcgcggcgcactgttgcatgccatccgccgtcccattggctcggtgcatatcttgctagatcttgcaatgtctgacggttgaacaggatgccactgttgttcttctctagcgcgctcgtgccactggtcggcctgccggttggccgggttcgccatccccagctgcagactgcagtaacgcccttatagataggaggtcaaatgaatagtaacaggtaacaacaacatgtgtgctgtgccccaatataataggtacctctcctgcctag

SEQ ID NO: 9672 - DNA, 2200 bp, Zea Mays
gccgattgcttccccgaatctcttcccccaatccggcgcccggcagaatgcgaggccgccacctcctaaaacccatgcccgtcctcctcaacactaccccttcccggctccccgccgcccacttccgcgtccgtgacgcagcccgcccgcccgcgccgctggcagagcccgacgtcggcatctctcgcttcgcctcctccatcccgggcttccgcggcgcgctgaagcagcgctactccgacttcatcgtccacgaggtcgcctgcgacggcgccctcgtccgcctcacttccttcgatctccccgacatcgaggagagtggagataatgcggaggacggtgattccgacgccaccgcggatccatcgcgggcgctcgagtcgttccggctgctctgcggcgaagcggattaccacgccttgaggggattcctggagagggtttcggagggaggtgatggttatttgtcgccaatcattctgtcagctgatgcagataaggcacatcgatccgaggtgcacgagttcatcaagaggaatttcaagttcctgaacacggatacagttgagcacaatgatggtattcagaaatgcattagggtgcgcttgggttcagggccacgctgtggtaggggaaggaacaggagaggcatggacacttcaggctggagagatgacaagccgtttgacagtagaggctctacattctggccttatcacctggggaagttcctgaggtttcacctttataaggagaacaaggacacgcatgaggcactaggggttataggaaaattggcaggggttcagccaagatcgtttggatttgcagggacaaaggataaacgtgctgttacaacccaacaggtgacagtttttaaagtgcatgctagcaggctggctgctcttaatagcaaactcacagttacgtgaaggagggccttgctcttggtcgactcagagggaaccactttgcaattactttgaggaatgttattgcagaatcggccgatgatataaatgctgcagttaatggtctaagtaaaaatggatttatcaattactatggcttacagcgctttggcagcggttctgtacctacccactttgttggtgctgctttgctcagaggagaatggagacatgctgttagcttgattcttggtacaagggtacattataaatggcatgttgatgttgatgcagcacttaggggcatgccccgacatctcacagtggagagagctattcttcagagattgaagaactaccctggcaactatctacaagcactaatggctatacctaaagcactgaggctgatgtatgtacatagctaccagagttacttatggaatcatgctgcaagtatgagagtggaaaagtatggtatttcacaagttgtagaaggtgacttagtttacaaaactgggtcctcccttggagaagcaattaccacagatacatttgatgacgatgatagccacgttaattcacctgaaatggaaatgtcttgtgaaacacttactgaagaaatgatccaatctgtgaaggtagttgattctgaagatttattgaaggcagtctattcgtttgaggatgttgttctccctttgcctgggtcagaaacattgtttcctgggaatgaagttactatgatttatcatgaaatagccaagaaggatggcattagcctgatagagagcgcccatggtatcaaggacctgatgacttacacagatgacaatacacctttagtaccaactgatttagatgttctatcagaaacccagttatcagaaacaaatgagccattatctgatgggacttgcagttgtccatcaagtgattccaggttgcaagttttattggacacctctggaccaaccattgaagctagctcagtagaaaccaaatcaattggcatctcagatctgtcaccagagaaactggctgtgaaattagaatttactctaccagcatcatcttatgctacaatggccataagggagttgacgaaaacttcaacttcggttgcttgccagaaaacattaaacggctgaccaagccttgcagtgtaaaatgctttcttcgcaagctggtatccattgtgacaaaacacaccatgtgggtttaactgatattttcttttctgaatcatacaacttggaggatttctctacttatggagcttctaaaac

SEQ ID NO: 9673 - DNA, 3823 bp, Zea Mays
gttgctgttcccctgcgaggcccgcgtctccccttcgtctcaacacccaccgcctcctcgccggagccagtaagcttccggcgaagaaatccggcgggcacatcacaagggggccgagcagggggacctaggcgagcgccggaatgggggccagcgcccgggggctcgccgtcgtcgtggctctagggttagataggtgtccgtagcttttttcttcgctcgccctcccccacgcggccagggtgtgcagccccggcgtcgcattgggtcccgggacgaccgtaaggccgcgtgatccacccgtgctcgagctcggacagggtcccggttgcgtggcatgggggcatctcttccgcctgctcccgctgcctgcgagtttggcaccgtttttgagctctgaagaggaggaggtggtggcagcaggcaccgatctggatgccatttcaagtcatggatccgaggcaccacctctcccagttcaccaatacaaccgtagctgcgtcctccttctctgaggagcagcttcgccttcccacagagaggctggtgggtttttggaagcaggagtcgttgcatcacattgggagcaagtcagttgcatcttctccaattgaaaagccccaacccattggtacaaaaacaatgggtcgggtagatccacaaccatacaagccgagaggccagaagtctgcatttagccttgaacacaaaacttttggtcaagagaggcatgttaacatgccaccatctctgtggagagctgatcaagacccttatgttcaatctgattcatctttatttcccgatggaaggagtactaatccatatgaggcctacaacgagaatgggcttttctcaagctccctgtcagaaatttttgacagaaaattgggactgagatcaaatgatgtgcttctacatcaaccacttgaaaaggttgaaccaactcatgtagatgatgagccctttgagttaacagaggaaatcgaggctcaaataataggaaacatacttcctgatgatgatgatctactatcaggtgttgatgttgggtacacagcccatgctagcaatggtgatgatgttgatgatgatatattttacactggaggtgggatggaactggagaccgttgaaaataaaaaaagtacagaacctaacagtggagctaatgatggtcttgggtcgctaaatggcacaatgaatggtcaacatccatatggggaacacccttcaagaactcttttcgtccagaacattaatagcaatgttgaggattctgaattaaaggtcctatttgagattcgtgatgcaccgcaaaagggccatcacaaagttatagaattttacgatgtcagagcagctgaaggtgcagttcgtgctttaaacaggagtgatcttgctggcaagaaaataaatttggggactgttggtctgagtggtgttagacgattaacacagcacatgtccaaagagtcggggcaagaagaatttggtgtatgcaaactgggcagtctaagcacaaatagccctccattgccttcattgggttcatcttatatggtagccatgacatcttctggccgtgaaaatgggagtattcatggtttgcattctggactgctcacatcaatgagcccgttcagagaggcttcttttccgggcctatcatctaccataccacagagcctgtcctctcccattggaattgcatctgctacaactcatagtaatcaggctccccttggtgagctcagccactcacttagtcggatgaatgggcatatgaattatggttttcaaggcttgggtgctcttcatccccattctcttcctgaagttcacgatggagcaaataatggcaccccgtacaatctaaacaccatggtaccaattggtgtgaatagcaactcaagaacagccgaagcagttgactgcagacatcttcataaagtgggttctagcaacctcaatggacattcatttgatcgtgtcggtgaaggagctatgggattttcaagaagtggaagtggtcctgtccatggtcaccagctaatgtggaataattcaaataacttacaacgtcatcccaattcccctgtgctgtggcaaaatccaggatcatttgtaaataatgtaccgtctcgctccccagcacaaatgcatggagttccaagagcaccatcacacatgattgagaatgtccttccaatgcatcatcatcatgtgggctctgcgccagcaatcaatccatcactttgggacaggcggcatggctatgcaggggaattgacagaagcatcaagttttcatcttggcagtgttgggagcttgggatttcctggtagccctcagcttcatggcctggagctaaataacatattttctcacactggtgggaatcgcatggatccaaccgtgtcttcggctcagatcagcgcaccatctcctcaacagagaggtcctatgttccatggaaggaatcctatggttccccttccatcatttgattcacctggtgagcggataagaagcatgagaaatgactcaggtgctaaccagtctgataataaacggcagtacgagcttgatgttgaccgcataatgcgaggggtagactcacgaactacactgatgataaagaatatcccaaataagtatacctccaagatgctcttggctgctattgatgaaagtcataagggcacttatgactttatttacttgccaattgattttaagaataaatgtaatgttggctatgctttcatcaacatgaccaatgctcagcatatcattccattttatcagacttttaatggtaaaaagtgggagaagtttaacagtgagaaggtggcatcacttgcttatgctagaatccaagggaaaacagctctgattgctcatttccagaactctagtttgatgaatgaggacaaacgttgccgccccatactcttccactcagatggtcctaatgcaggagatcaggaacctttccctatgggtacaaacatccgagccaggtctgggagatcccggacttcctctggtgaagaaaatcaccatgatatccagacagtcttgaccaacggtgacacttcttccaatggagctgacacttcaggtcccaccaaggacactgagtagctgaactgcagcttgctgcgttgctgaccacaaaggcccaaactataactttttgcaaacccattttcagttctttcccccctttcccattttggttctgttttgtaaagtctcccgatctgtatttattgacttccacgatgcgggtcaccgaagacttaggttgctgcaaaattttgtccctgacgggaagctatatgcaagagggtggtactggctatgtgcttgttaacctgaaggccgagaaaggtgaaaagcgcagggagagcctccagattttggtcgctgtaagaattaaccccatgttgtacagcaggtcccagtaacttgtagtgatgggagagtggagtcattttcatcagtttttagtggtggttgtgtggagaggaagagtcttgcctgcgttttcttttggaaccttctcttgtgcctttacatttttttagtcgagggttcctcttaaattgtgtgcagagggggctcaattttgttaaccggaacaaggcgcatgtgcgtcttggatcaaccccggtcttgtcttcaggcactgttaccttatttatcaaacatatgtacacctccatctatatatagtatgagttttgatgcctatctattttgtggctgtcgtctcacaaggttatttatctatatatagtgtgagtaattcttg

SEQ ID NO: 9674 - DNA, 4081 bp, Zea Mays
gttgctgttcccctgcgaggcccgcgtctccccttcgtctcaacacccaccgcctcctcgccggagccagtaagcttccggcgaagaaatccggcgggcacatcacaagggggccgagcagggggacctaggcgagcgccggaatgggggccagcgcccgggggctcgccgtcgtcgtggctctagggttagataggtgtccgtagcttttttcttcgctcgccctcccccacgcggccagggtgtgcagccccggcgtcgcattgggtcccgggacgaccgtaaggccgcgtgatccacccgtgctcgagctcggacagggtcccggttgcgtggcatgggggcatctcttccgcctgctcccgctgcctgcgagtttggcaccgtttttgagctctgaagaggaggaggtggtggcagcaggcaccgatctggatgccatttcaagtcatggatccgaggcaccacctctcccagttcaccaatacaaccgtagctgcgtcctccttctctgaggagcagcttcgccttcccacagagaggctggtgggtttttggaagcaggagtcgttgcatcacattgggagcaagtcagttgcatcttctccaattgaaaagccccaacccattggtacaaaaacaatgggtcgggtagatccacaaccatacaagccgagaggccagaagtctgcatttagccttgaacacaaaacttttggtcaagagaggcatgttaacatgccaccatctctgtggagagctgatcaagacccttatgttcaatctgattcatctttatttcccgatggaaggagtactaatccatatgaggcctacaacgagaatgggcttttctcaagctccctgtcagaaatttttgacagaaaattgggactgagatcaaatgatgtgcttctacatcaaccacttgaaaaggttgaaccaactcatgtagatgatgagccctttgagttaacagaggaaatcgaggctcaaataataggaaacatacttcctgatgatgatgatctactatcaggtgttgatgttgggtacacagcccatgctagcaatggtgatgatgttgatgatgatatattttacactggaggtgggatggaactggagaccgttgaaaataaaaaaagtacagaacctaacagtggagctaatgatggtcttgggtcgctaaatggcacaatgaatggtcaacatccatatggggaacacccttcaagaactcttttcgtccagaacattaatagcaatgttgaggattctgaattaaaggtcctatttgagcattatggagaaatcagcaacctttacactgcctgcaaacatcgcggttttgtaatgatatcttactatgacataaggtcatcatggaatgccatgagggcacttcaaaacaagccactaagacatagaaaacttgacatacattactccattccgaaggataatccttcggggaaggatattaaccaggggatgcttgttgtatttaatgttgacccgtctgtaacaaacaatgatatccataagatatttagtgactatggtgaaataaaagagattcgtgatgcaccgcaaaagggccatcacaaagttatagaattttacgatgtcagagcagctgaaggtgcagttcgtgctttaaacaggagtgatcttgctggcaagaaaataaatttggggactgttggtctgagtggtgttagacgattaacacagcacatgtccaaagagtcggggcaagaagaatttggtgtatgcaaactgggcagtctaagcacaaatagccctccattgccttcattggccatgacatcttctggccgtgaaaatgggagtattcatggtttgcattctggactgctcacatcaatgagcccgttcagagaggcttcttttccgggcctatcatctaccataccacagagcctgtcctctcccattggaattgcatctgctacaactcatagtaatcaggctccccttggtgagctcagccactcacttagtcggatgaatgggcatatgaattatggttttcaaggcttgggtgctcttcatccccattctcttcctgaagttcacgatggagcaaataatggcaccccgtacaatctaaacaccatggtaccaattggtgtgaatagcaactcaagaacagccgaagcagttgactgcagacatcttcataaagtgggttctagcaacctcaatggacattcatttgatcgtgtcggtgaaggagctatgggattttcaagaagtggaagtggtcctgtccatggtcaccagctaatgtggaataattcaaataacttacaacgtcatcccaattcccctgtgctgtggcaaaatccaggatcatttgtaaataatgtaccgtctcgctccccagcacaaatgcatggagttccaagagcaccatcacacatgattgagaatgtccttccaatgcatcatcatcatgtgggctctgcgccagcaatcaatccatcactttgggacaggcggcatggctatgcaggggaattgacagaagcatcaagttttcatcttggcagtgttgggagcttgggatttcctggtagccctcagcttcatggcctggagctaaataacatattttctcacactggtgggaatcgcatggatccaaccgtgtcttcggctcagatcagcgcaccatctcctcaacagagaggtcctatgttccatggaaggaatcctatggttccccttccatcatttgattcacctggtgagcggataagaagcatgagaaatgactcaggtgctaaccagtctgataataaacggcagtacgagcttgatgttgaccgcataatgcgaggggtagactcacgaactacactgatgataaagaatatcccaaataagtatacctccaagatgctcttggctgctattgatgaaagtcataagggcacttatgactttatttacttgccaattgattttaagaataaatgtaatgttggctatgctttcatcaacatgaccaatgctcagcatatcattccattttatcagacttttaatggtaaaaagtgggagaagtttaacagtgagaaggtggcatcacttgcttatgctagaatccaagggaaaacagctctgattgctcatttccagaactctagtttgatgaatgaggacaaacgttgccgccccatactcttccactcagatggtcctaatgcaggagatcaggaacctttccctatgggtacaaacatccgagccaggtctgggagatcccggacttcctctggtgaagaaaatcaccatgatatccagacagtcttgaccaacggtgacacttcttccaatggagctgacacttcaggtcccaccaaggacactgagtagctgaactgcagcttgctgcgttgctgaccacaaaggcccaaactataactttttgcaaacccattttcagttctttcccccctttcccattttggttctgttttgtaaagtctcccgatctgtatttattgacttccacgatgcgggtcaccgaagacttaggttgctgcaaaattttgtccctgacgggaagctatatgcaagagggtggtactggctatgtgcttgttaacctgaaggccgagaaaggtgaaaagcgcagggagagcctccagattttggtcgctgtaagaattaaccccatgttgtacagcaggtcccagtaacttgtagtgatgggagagtggagtcattttcatcagtttttagtggtggttgtgtggagaggaagagtcttgcctgcgttttcttttggaaccttctcttgtgcctttacatttttttagtcgagggttcctcttaaattgtgtgcagagggggctcaattttgttaaccggaacaaggcgcatgtgcgtcttggatcaaccccggtcttgtcttcaggcactgttaccttatttatcaaacatatgtacacctccatctatatatagtatgagttttgatgcctatctattttgtggctgtcgtctcacaaggttatttatctatatatagtgtgagtaattcttg

SEQ ID NO: 9675 - DNA, 2378 bp, Zea Mays
cactttctagtttcctttctcctcctccagccctccttaaaaaatcggccacggttatttatttctctcgccccgctccgctttcctaatctgcgagctggggggagatcgagaccctagaacggagggcgggtgtgcggcgctgagggccttagacgaatggcggtggaggagaccgcggagagctgcggcagccacgccgcgaccgctgcgtccggcggcggcgcggcggggcccgcgacgtcctcgtcatcggccgccgcggcggcgcaggcgcggaagcagcaacagcagcagcgccataagctcgaggtgtacacggaggttcttcggcgcctccacgacgccggcctgcccgacgcgcgggcgcccgggttcgacgacgagctctggaatcacttcaaccgcctccctgcccgctacgccatggatgtgaacgtggagagggcggaggacgtgctcacgcacaagcggctcctggagcaggccaaggatccggctcatcgcccggctttcgcggtgcggtccgtgcagactgattctgattcgaacactgcaggggaggaagtcgcttcaagactgttgaacaggcagcaaagcatatatcctcctcctgccttcggttcttctacaaatcttgaggcccttgctcttgaagctagcaagtctcatgatcacgatagcacttctgataatggccgatctctatacaggcccatgcatgaaatcaccttttcaaccattgacaagccaaaacttctcagtgagctgacatctctgcttggtgagcttggtctaaacattcaagaagcacatgcattttcaacaaatgatggctactcacttgatgtcttcgttgttgtcggttggcatgatgaggaaacagaggatttagtagaagcagtgcagaaggaaattggcaggattgaagagacacaagcatggtcttcatctcattcatggtctactccagttgaaaaaatgcagattgctgagaattcagcagctgaccgtgttgagataccaacagatggtgctagtgaatgggaaattgatgtaaagcttctcaagtttgggaataaagtagcatcaggatcatatggtgacctttaccggggtacatattgcagtcaagatgttgctattaaagtgctgaaacctgagagaataaatgcagacatgcaacgagaatttgctcaggaagtatatattatgaggaaggtccgtcacaagaatgttgtgcaatttattggggcttgcactaaacccccaaacctatgtatagtcacagaatttatgtccggtggaagtgtgtatgattacctccataaacataaaggtgttttcaaacttcctgctttagttggagttgcaacggatgtgtcaaaaggcatgagctacttacaccagaataatattattcatcgtgatttgaaaactgcaaaccttctgatggatgaaaatgggactgttaaagttgctgattttggtgttgcacgtgttaaagctcaatctggagttatgactgcagaaactggtacttaccgttggatggccccagaggtcattgagcacaaaccctatgatcacaaggctgatgtttttagttttggaattttgatgtgggaactactcacagggaagattccttatgagtacctgactccactacaagccgctgttggtgtggtgcagaagggattacggcctacaattccaaagcatactcacgcaaagctttccgagcttcttcagaaatgctggcagcaggaccctacccaaagaccagacttctccgaaatattagaaactcttcagagaatagcagaggaggtcggagaggagcacgatgggaagcacaaggacagaacactgggtggtttcttttcggctttgagggggcggagccattgagacacagtcgaagacttttaataataaaaatgtacatggcctcggtccgtcctttgaaggacctgagctacaaccagtgcagtgcctgttcctcgcacgtcagcaccagtacacagaaatacagacctgctgtgcagctgcagttgactgaagcggcaatttttatttagctgcagccatcgctttccgcatatccgcttgttattcctgagttccattacgcaatgtataacataggtgaggaagcttgggaactgtatcatcagtctgatttccctgggagtgcaatcctgctgtagatgaaaaaaaaagccagattcaggccgtggcatgattcttttaagactccatcatttagcatcttttcgtttatggcagcgcggcgagcttgagtagctgaacaacagaacaaggcacctgcatctgcatgggttctgctcgcttgtgccaatttttgttcccca

SEQ ID NO: 9676 - DNA, 2108 bp, Zea Mays
ggaggagtgtccatgaccggagcctgacgcgcctacagagggagaaaggagggggaatacccggcccggtccagatctctcagaccgaagcgctggacaaggggccgatggcttcggcggctgcagcggtgatcccggacggccggcgatggagcaaaggtccgggctcctcgtcgtcgccggtgacaacggccattttcctcttcttcttcgttgtcgtggtcggcgtcctcgtgtccgcccgctggatcaccaccacgactcatctgtcgaccaccaatctggatcagtggagctcaaagctggtaggctatcttaaccgcgacgcacaccacctcctccatcccggccatccccgcggcaccgccgccgcctcggccgacctactccctctcctgcccggcgccgccgcttcaccgtgacccgaccatccccagcaacatctcccagaccctcgacctcgtgctctcccccaacgcctcctccgcctccacttgcgccgcctttcccgaccccccgccgctccctgccaactccaacgcctcctccacctgccccgcctacttccgcttcatccacgaggacctccacccatggcgcgccgctgggggcatcacccgcgccatggtcgaccgcgcgcgcgccaccgccaacttccgcctcgtcgtcatccggggccgcgcgtacatcgagcgcatcgcgccggcattccagacgcgcgacctcttcaccatctggggcattctgcagctgctccggcgctaccccggccgcgtccctgacctcgacctcatgtttgactgcgtcgactggcccgtcgtgcacgccgaccagtaccagggggagaacgccacgctattgccgccgctcttcaggtactgcggcgacaacgagacgctagatgttgtcttcccagactggtcattctggggctggcctgagatcaacataaaaccgtgggatgctctgcagaaggaattgaatggtggaaacaagagggtgaaatggttggctagagaaccttatgcttattggaaagggaatccagatgttgcagttacaaggcaggagcttgttaagtgtaacgtctccagtaagcatgaatggaatgcaaggatttacaaacaggattggctcaaagagatcaaggcaggatacaaacagtcagatttggctagtcaatgcactcataggtacaagatttatattgaaggatcagcatggtcagtcagtgagaagtatattctagcttgtgattccatgacactagttgttacaccaaaatactatgatttttattcaagggtgctgatgcccatgcaacattattggccaatttgggatgacaataagtgtagctccataaagtttgctgttgattggggcaactctcacaagcagaaggcacagaggataggaaagcaaggaagcaactttattcaaaaagagctcagcatggaatatgtatatgattacatgtttcacctcttaactgagtatgccaagctcctaaggttcaagccaagaaaaccacctgaagctattgaggtctgtcctgaatctctggcttgccaagctataggccgcgagaagaagttcatggaggactccatggtgagatccgccagcgatgctggcccatgtgacctgcctcctcctttcagtcctgaggaattcaaagcactgcgacgtaggagagagaaggcaatgaagcggatcgaaacatgggtgcaaaaaacttcgaggcccatggttagcaagccctgagagagcttcatgcttttccctccccaatagatacatacccaatttttgtcgtgctaataacccaaggcatttcttatctgtttgaatcaaatgtgtgattctgcagaagttatagatggtttcagttctccagatcttatcagtattcttctatttgtcttgtggcttgtatttttcgatactctctgctttagctgtaggatgtagcgatattgcttagtgacccgactttagagtgagagtaaagaatgtgtttgtctagagccagttgaggggagggtttagatagagggattccaggacattttgtttggttggtgggacgagaaatgcggttttag

SEQ ID NO: 9677 - DNA, 3679 bp, Zea Mays
ccaagtcctttttttacggaacaactgacggcttttgaagtgtggcttgatcatggctctgaggacaagaaacctcctgaacagttacccatagttcttcaggtactgcttagtcagtcacacagatttagagcgcttgttctgcttggaagatttcttgacatggggccatgggcagttgatttggccctgtctgtcggaatatttccttatgtactcaaactgcttccaacaaatacaatagagttacgtcaaattttagtgtttatatggacaaaaattctctctcttgataagtcttgtcaggttgacttggttaaagatggaggacatacatattttattaggtttcttgacagtttggatgctttcccagaacagcgtgcaatggccgcttttgttatagcagtcatcgtggatgggcataggatgggtcaagaggcttgtatgaatgcagggcttatagatgtttgcctgagacatctgcaacctgagaatcttcatgcacaaacagaacctttgcttttgcagtggctttgtttatgccttgggaaactctgggaagatttccctgaggctcagttacttggtctgcaaacaaatgcaccagaaactgtaatatgcttattgtcggagcctcgacctgaggtcagagctgctgctgtttttgcacttgggaatcttactacattatcaaattgccctgatgatgattctgatgatgatgaaaaggtgaaagctgaaataaatgtagttcgaagccttctccagatatcttcagatggtagtccccttgttagatctgaggttgctatagcgcttactcactttgcgttgggtcacaacaaaaatctcaaatctgttgctgcggagtattggaaacctcaatccaaatcgttgctgaagtcattaccatcattggcaaatataaataatccaagcaatgtttacagtcccaataatattctccaaggcagcattggtcctgtgctgagggttggcagtgatagcggtgccgctggtcgtgatggacacatttctacaagtagcccaattgcagcaagtagcatcatgcatggctctccccagtcagatgattcttcccaacactctgattcaggcatattactgagggagaatgcaagtaatggtggtctcagctacactaggtcgaggcctgttgataatgtcatttattctcaatttatatcaactatgtgttctgtttctaaagatcctgacccaagaattgcaactattggttggagagcactgacccttataggtgttgaacaagtggccatgaaaagtactcgatttaacagtggaggtctacaccgaggagagacatctgcgtcaacctttggaatggcacactcttcttcttggagagatatgaattctggaagcaactcgatgaaatttatgacccctcctgttagccctcctcagcatgattatcttctactaggattgcgccgagtgtgttctatggagtttggacagcatcctataaattcacctgatggctttgctaatctccttttaagctctgctacaggtcccagtaatgcagaactaaagaaacttcccgaatcaacaatttacaactggagttgtggtcacttctctaggccacttttaactgcctctgatgataatgaagaaaccaatgctagaagagaagagagagaacggattgcactagatttcatcactaagtgccagcgctcctcagcctgcaagattacaagccaaattgctagttgggatacaagatttgagttggggacaaaggcagctttattattgccattttctccgattgtcgtagcagctgatgaaaatgaaaaaataaggtgaaattattattgcaattaaaaatcctagtgcctgaatgcctaatacggactgctacaattgtgctgaagttctgtatcatgccagtgtgtggaactatgacgatgcacaaccagtgaactcttttcacaaccataagttgtccgacagagggctatctaaacttttgcttatcaacgagcttgatgagtgcttgcttttggctgcctcaagtgatggaaatgtacgcatatggaaaaattttgcttgtaagggagggcagaaacttgtaactgctttttcatcagttcagggacatcgagctgctggtcgcagtattgtgattgactggcagcagcaatcttgttatctgtacgcatctggtgacatgtcttccatcttggtatgggatcttgacaaggaacaacttctcaacaccattccgtcatccgctgatagtgccatttctgccctgtctgcatctcaggtccgctctggatactttgctgctggttttgctgatggttctgtcaggatatatgatgtttgctctcctgataggcctgtctatgtggccaggccgcatgccccaagaacagaaaaggttgtgggcatagggtttcagcctgggtttgatccatacgagattgtaagtgcatctcaagctggagacattcagtttcttgatgttagaatggcagcagaaccctacctgactattgaggcacacaggggttcacttacagcattagcggttcatcggcatgccccagttgttgctagttcagccaagcagatgattaaagtgtttagtcttgaaggagaacagttgaggataattcgctacctgccatcttttatgggccaaagaacaggcagtgtaaattgcctttcttttcacccatacaaatcactcctggctgccggtgctggtcataatgctcttgtctctatctatgctgaggaaaattacaagtaagatcgaggcctatatctcatgctcatgataatgcagacacagtgcgatcgacaggccttacatttttggccaagtgatgctccacagcatggtgcagcttcaagatccaagatgatggtaagctttgtcacagagaaggtgttgatggctccatggctttcggtgcatattgcctgttggacggcgtgtgcaatttgtatgatacagtcaagaactcaagattcattaggcctccttgcattgtgaaccctaccctgatcctgccgttgaacttggaggccccatcaacaaattaatcatacctaagttaaccaaaatgtaaatagccagtgcattcgggttgtactttgtcagcattaatccctttttcaagtgtaaaaaggtctgaaggtgcttgatatgataaacatggcttggtagtggctgctgactgggcaagtggggttgtgcatatgggcctggtcgcacatttctgctcacagatgatgttgaatagatagatgtctgctcacagatgttgttgaatagatagatgcatttgtccagctaatatagcgctagatgggggtagcgttggcctgcatgaatgaaggaaagttgtcgagtgaggagtgaccttcattgccattctgtgccgcaacaagtctccatgtgttatcagatggccctgtagataatacatatatttgtagatgtgttttgttcggtgaattgtgctgaccgctgagtaaaatgtattgtgaacgttgttgataaatgctattgtaatgaatttgcaacaagaaaaaattatatgctattgtagtgtatatcacaactctggttgctttttatttttatttttttaaaaaaagatctttc

SEQ ID NO: 9678 - DNA, 3688 bp, Zea Mays
  misc_feature (1)..(2): n is a, c, g, or t
nnaagcttcctcagttaattgatgatccaaatgctgagtttcagccaagtcctttttttacggaacaactgacggcttttgaagtgtggcttgatcatggctctgaggacaagaaacctcctgaacagttacccatagttcttcagtcagcctacaaaaaaaaaacgattgttatttgctctggtgcgcattgagattgggcatttgaaaatattatggctagatttgtcccaaaacatactccctccgattcgttttagtagtcgttttggacatcatttcacataccaaggtactgcttagtcagtcacacagatttagagcgcttgttctgcttggaagatttcttgacatggggccatgggcagttgatttggccctgtctgtcggaatatttccttatgtactcaaactgcttccaacaaatacaatagagttacgtcaaattttagtgtttatatggacaaaaattctctctcttgataagtcttgtcaggttgacttggttaaagatggaggacatacatattttattaggtttcttgacagtttggatgctttcccagaacagcgtgcaatggccgcttttgttatagcagtcatcgtggatgggcataggatgggtcaagaggcttgtatgaatgcagggcttatagatgtttgcctgagacatctgcaacctgagaatcttcatgcacaaacagaacctttgcttttgcagtggctttgtttatgccttgggaaactctgggaagatttccctgaggctcagttacttggtctgcaaacaaatgcaccagaaactgtaatatgcttattgtcggagcctcgacctgaggtcagagctgctgctgtttttgcacttgggaatcttactacattatcaaattgccctgatgatgattctgatgatgatgaaaaggtgaaagctgaaataaatgtagttcgaagccttctccagatatcttcagatggtagtccccttgttagatctgaggttgctatagcgcttactcactttgcgttgggtcacaacaaaaatctcaaatctgttgctgcggagtattggaaacctcaatccaaatcgttgctgaagtcattaccatcattggcaaatataaataatccaagcaatgtttacagtcccaataatattctccaaggcagcattggtcctgtgctgagggttggcagtgatagcggtgccgctggtcgtgatggacacatttctacaagtagcccaattgcagcaagtagcatcatgcatggctctccccagtcagatgattcttcccaacactctgattcaggcatattactgagggagaatgcaagtaatggtggtctcagctacactaggtcgaggcctgttgataatgtcatttattctcaatttatatcaactatgtgttctgtttctaaagatcctgacccaagaattgcaactattggttggagagcactgacccttataggtgttgaacaagtggccatgaaaagtactcgatttaacagtggaggtctacaccgaggagagacatctgcgtcaacctttggaatggcacactcttcttcttggagagatatgaattctggaagcaactcgatgaaatttatgacccctcctgttagccctcctcagcatgattatcttctactaggattgcgccgagtgtgttctatggagtttggacagcatcctataaattcacctgatggctttgctaatctccttttaagctctgctacaggtcccagtaatgcagaactaaagaaacttcccgaatcaacaatttacaactggagttgtggtcacttctctaggccacttttaactgcctctgatgataatgaagaaaccaatgctagaagagaagagagagaacggattgcactagatttcatcactaagtgccagcgctcctcctgcaagattacaagccaaattgctagttgggatacaagatttgagttggggacaaaggcagctttattattgccattttctccgattgtcgtagcagctgatgaaaatgaaaaaataaggtgatggaaatgtacgcatatggaaaaattttgcttgtaagggagggcagaaacttgtaactgctttttcatcagttcagggacatcgagctgctggtcgcagtattgtgattgactggcagcagcaatcttgttatctgtacgcatctggtgacatgtcttccatcttggtatgggatcttgacaaggaacaacttctcaacaccattccgtcatccgctgatagtgccatttctgccctgtctgcatctcaggtccgctctggatactttgctgctggttttgctgatggttctgtcaggatatatgatgtttgctctcctgatagtaggcctgtctatgtggccaggccgcatgccccaagaacagaaaaggttgtgggcatagggtttcagcctgggtttgatccatacgagattgtaagtgcatctcaagctggagacattcagtttcttgatgttagaatggcagcagaaccctacctgactattgaggcacacaggggttcacttacagcattagcggttcatcggcatgccccagttgttgctagttcagccaagcagatgattaaagtgtttagtcttgaaggagaacagttgaggataattcgctacctgccatcttttatgggccaaagaacaggcagtgtaaattgcctttcttttcacccatacaaatcactcctggctgccggtgctggtcataatgctcttgtctctatctatgctgaggaaaattacaagtaagatcgaggcctatatctcatgctcatgataatgcagacacagtgcgatcgacaggccttacatttttggccaagtgatgctccacagcatggtgcagcttcaagatccaagatgatggtaagctttgtcacagagaaggtgttgatggctccatggctttcggtgcatattgcctgttggacggcgtgtgcaatttgtatgatacagtcaagaactcaagattcattaggcctccttgcattgtgaaccctaccctgatcctgccgttgaacttggaggccccatcaacaaattaatcatacctaagttaaccaaaatgtaaatagccagtgcattcgggttgtactttgtcagcattaatccctttttcaagtgtaaaaaggtctgaaggtgcttgatatgataaacatggcttggtagtggctgctgactgggcaagtggggttgtgcatatgggcctggtcgcacatttctgctcacagatgatgttgaatagatagatgtctgctcacagatgaggttgaatagatagatgtctgctcacagatgttgttgaatagatagatgcatttgtccagctaatatagcgctagatgggggtagcgttggcctgcatgaatgaaggaaagttgtcgagtgaggagtgaccttcattgccattctgtgccgcaacaagtctccatgtgttatcagatggccctgtagataatacatatatttgtagatgtgttttgttcggtgaattgtgctgaccgctgagtaaaatgtattgtgaacgttgttgataaatgctattgtaatgaatttgcaacaagaaaaaattatatgctattgtagtgtatatcacaactctggttgctttttatttttatttttttaaaaaaagatctttc

SEQ ID NO: 9679 - DNA, 3793 bp, Zea Mays
cggtcctttgccgagggtcacgtttcgccaagtgtttgacgctcggcaaagactcctttgccgagcgtcagcttatgccgagtgtttggcactcgacaaagggggtctgtgccgagtgccgttcgtcgccgatagtggccctcaacaaagcttgttttgctgagtgcccaataaaatgcacttggcaaagaacttgacgctcggcaaagagccggattccggcagtgtacgcgtggcttaggaagtggaaacgctgcagcggtaatcgtgtactgcttagtcagtcacacagatttagagcgcttgttctgcttggaagatttcttgacatggggccatgggcagttgatttggccctgtctgtcggaatatttccttatgtactcaaactgcttccaacaaatacaatagagttacgtcaaattttagtgtttatatggacaaaaattctctctcttgataagtcttgtcaggttgacttggttaaagatggaggacatacatattttattaggtttcttgacagtttggatgctttcccagaacagcgtgcaatggccgcttttgttatagcagtcatcgtggatgggcataggatgggtcaagaggcttgtatgaatgcagggcttatagatgtttgcctgagacatctgcaacctgagaatcttcatgcacaaacagaacctttgcttttgcagtggctttgtttatgccttgggaaactctgggaagatttccctgaggctcagttacttggtctgcaaacaaatgcaccagaaactgtaatatgcttattgtcggagcctcgacctgaggtcagagctgctgctgtttttgcacttgggaatcttactacattatcaaattgccctgatgatgattctgatgatgatgaaaaggtgaaagctgaaataaatgtagttcgaagccttctccagatatcttcagatggtagtccccttgttagatctgaggttgctatagcgcttactcactttgcgttgggtcacaacaaaaatctcaaatctgttgctgcggagtattggaaacctcaatccaaatcgttgctgaagtcattaccatcattggcaaatataaataatccaagcaatgtttacagtcccaataatattctccaaggcagcattggtcctgtgctgagggttggcagtgatagcggtgccgctggtcgtgatggacacatttctacaagtagcccaattgcagcaagtagcatcatgcatggctctccccagtcagatgattcttcccaacactctgattcaggcatattactgagggagaatgcaagtaatggtggtctcagctacactaggtcgaggcctgttgataatgtcatttattctcaatttatatcaactatgtgttctgtttctaaagatcctgacccaagaattgcaactattggttggagagcactgacccttataggtgttgaacaagtggccatgaaaagtactcgatttaacagtggaggtctacaccgaggagagacatctgcgtcaacctttggaatggcacactcttcttcttggagagatatgaattctggaagcaactcgatgaaatttatgacccctcctgttagccctcctcagcatgattatcttctactaggattgcgccgagtgtgttctatggagtttggacagcatcctataaattcacctgatggctttgctaatctccttttaagctctgctacaggtcccagtaatgcagaactaaagaaacttcccgaatcaacaatttacaactggagttgtggtcacttctctaggccacttttaactgcctctgatgataatgaagaaaccaatgctagaagagaagagagagaacggattgcactagatttcatcactaagtgccagcgctcctcagcctgcaagattacaagccaaattgctagttgggatacaagatttgagttggggacaaaggcagctttattattgccattttctccgattgtcgtagcagctgatgaaaatgaaaaaataagtgtgtggaactatgacgatgcacaaccagtgaactcttttcacaaccataagttgtccgacagagggctatctaaacttttgcttatcaacgagcttgatgagtgcttgcttttggctgcctcaagtgatggaaatgtacgcatatggaaaaattttgcttgtaagggagggcagaaacttgtaactgctttttcatcagttcagggacatcgagctgctggtcgcagtattgtgattgactggcagcagcaatcttgttatctgtacgcatctggtgacatgtcttccatcttggtatgggatcttgacaaggaacaacttctcaacaccattccgtcatccgctgatagtgccatttctgccctgtctgcatctcaggtccgctctggatactttgctgctggttttgctgatggttctgtcaggatatatgatgtttgctctcctgatagtaggcctgtctatgtggccaggccgcatgccccaagaacagaaaaggttgtgggcatagggtttcagcctgggtttgatccatacgagattgtaagtgcatctcaagctggagacattcagtttcttgatgttagaatggcagcagaaccctacctgactattgaggcacacaggggttcacttacagcattagcggttcatcggcatgccccagttgttgctagttcagccaagcagatgattaaagtgtttagtcttgaaggagaacagttgaggataattcgctacctgccatcttttatgggccaaagaacaggcagtgtaaattgcctttcttttcacccatacaaatcactcctggctgccggtgctggtcataatgctcttgtctctatctatgctgaggaaaattacaagtaagatcgaggcctatatctcatgctcatgataatgcagacacagtgcgatcgacaggccttacatttttggccaagtgatgctccacagcatggtgcagcttcaagatccaagatgatggtaagctttgtcacagagaaggtgttgatggctccatggctttcggtgcatattgcctgttggacggcgtgtgcaatttgtatgatacagtcaagaactcaagattcattaggcctccttgcattgtgaaccctaccctgatcctgccgttgaacttggaggccccatcaacaaattaatcatacctaagttaaccaaaatgtaaatagccagtgcattcgggttgtactttgtcagcattaatccctttttcaagtgtaaaaaggtctgaaggtgcttgatatgataaacatggcttggtagtggctgctgactgggcaagtggggttgtgcatatgggcctggtcgcacatttctgctcacagatgatgttgaatagatagatgtctgctcacagatgaggttgaatagatagatgtctgctcacagatgttgttgaatagatagatgcatttgtccagctaatatagcgctagatgggggtagcgttggcctgcatgaatgaaggaaagttgtcgagtgaggagtgaccttcattgccattctgtgccgcaacaagtctccatgtgttatcagatggccctgtagataatacatatatttgtagatgtgttttgttcggtgaattgtgctgaccgctgagtaaaatgtattgtgaacgttgttgataaatgctattgtaatgaatttgcaacaagaaaaaattatatgctattgtagtgtatatcacaactctggttgctttttatttttatttttttaaaaaaagatctttc

SEQ ID NO: 9680 - DNA, 5333 bp, Zea Mays
  misc_feature (3846)..(3853): n is a, c, g, or t
ctctagtagcaaaagggagaggcgaaccagctcagagccggcgaccgccaccccacaccgcatctcccgactcccgctgctgtagtgctgtgcactagccaagccagcttgcatattccttctcccccacgctttcccgtgcttccattccaccaccagggccgcggaacgccccgccccgcccggcccccgcgcctcccctttccacctgttcgtcgcgtgcgcattcgttcgcgcagccagcgagccagccaccaccggcccccaccatcgatcgatatcctcctcctgtctctcttgctgctagctctcgcagttccgtccgatcgactatactgatccagctcctgctatgcgcggcggctagctcctcgacgacgagctgatcaatccgacaatccgagtccgccggcgcggatcgtcgatcgatcggccaccagaccatggggactccggtgaacatcatcgtcggctcgcacgtgtggctggaggaccccggcgaggcgtgggtcgacggcgtcgtcaccgagatcaaaggcggcgacgccaccatcgccaccaccaacggcaaaacggtcgtggcgagccttggcagcgtataccccaaggacacggaggcgccgccggcaggagtggacgacatgaccaagctagcctacctccacgagccgggcgtcctgcacaacctctcctgccggtacggcctcaacgagatatacacgtacaccgggaacatcttgatcgcggtgaaccccttccagaggctgccgcatctgtacgacgtgcacatgatggagcagtacaagggcgccagcttcggggagctcagccctcatctcttcgccatcgcggacgcctgctacagggcgctcatcaatgaccaggcgagccaagcgatcctggtgagcggcgagagtggcgctggcaagacggagaccaccaagatgctcatgaggtacctcgcattcatgggaggacggtccggcaccgagggacgcaccgttgagcagcaggttctagagtctaacccggtacttgaagcatttggtaacgccaagacagtgaagaacaacaactcaagtcgattcggcaagttcgtggagatccagttcgacaagcatggcaagatatccggggctgccgttcgcacgtatctcctcgagcgatcgcgagtgtgtcaggtctccgatcctgagaggaactaccactgcttctacatgctctgctccgcgccccccgaggacgtgaagaggttcaaggtgggagacccaaggtcgttccattacctgaaccagacgaactgctatgaggtggccaacgtggacgacgcgagagagtacatagaaactagaaacgctatggatatcgttggcatcgatcaagaggaacaggacgcgatcttcagagtagtagcggcgatcctccacctaggaaacatcaacttttccaaagggcaggagatcgactcgtccaagctgagagacgataaatcggtccatcaccttaaaacagttgcggaactgctaatgtgtgacgagaaggccctcgaagactccctctgccagcgtgttattgttacgcctgatgggaacatcacgaagccccttgatccaggctctgcggcgttaagccgtgatgccttggcaaagacagtgtattcacgactgtttgactggatcgtagacaagatcaataactcgattggccaggatccagatgcgaccaatataataggcgtgcttgatatctatggatttgagagcttcaagatcaacagtttcgagcaattatgcatcaatttgacaaacgagaagctgcagcagcacttcaatcagcatgtgtttaagatggagcaagaagaatacacaagggaggaaatagactggagctatgttgaatttgtagacaatcaggatgtgctggacctgattgaaaagaaacctggaggaataattgcactcctggatgaggcatgcatgtttccaaagtctacacatgagacatttgctcaaaagatgtaccaaacgtataaggtccataagcgcttcagcaagcccaagctagctcggacagcctttacgatcaaccattatgcaggggatgtgacgtatcaagcggatcagttccttgataagaacaaagactatgtggtagccgaacaccaggccctactaaattcttcaaggtgcccttttgttgcaaacctcttccctccattacctgaggaaacctctaaacagtccaaattctcttcaattggtactcgctttaagcaacaactgcaatccctcatggaaacactgaatactacagaacctcactacatcagatgtgtcaagcctaatgctgtactcaaacccggcattttcgagaactacaacgtcttgaatcagttgagatgtgggggtgtcctggaagcaattcggatcagctgtgctggttatccaacgaagaggacatttgatgagttcattgatcggtttggaatgcttgcaccggagcttgtcgacagcagcgatgagaaggccgcctgtgcagcgatatgtgatagaatgggtttgaaaggatatcagatagggaaaactaaggtattcctaagagctggtcagatggcagagctggatgctcgaagagcagaaattttggctaatgctgcgcgactaatccaaaggcgtattaagacacatcttatgcgaaaggaattcatcaaattaagaaaagcctcagttcaatctcagaagttctggagagcacgactagctaaaaagatttttgagtatatgaggagagacgctgcttcaattaggatacaaaagcacgtgcgtgcgcattctgccagaaaagcgtacctgcaagtatatgaatcagctacagcaatacaaacaggattacgagcaatggcagctcgcaacgaacacagattccgaagagagaccagggcatccataattatccagactcggtggcgccaacacagagcttatactgcttacaaacagcaacagaaagcttctttgattctccaatgcttgtggagggcacgcattgcaagaaaggaacttcggaaactgagaatggaagcaagagagaccggcgcactgaaagaagcaaaagacaagctagaaaagagagtagaagaactcacatggcggttagacgtcgagaagcgtttgagggctgaccttgaagaagcaaagagccatgaaattgaaaagttgcaatctgcactacaaaaaatgcaagaaaatctcgaggaagcccatgcagcaatagtaaatgagaaagaggctgcaaagttagcgattgaacaggcaccaccaaagatagtagaagtgccggttattgacaatgcgaaacttgaggagttgacaactcaaaataaagaacttgaggatgaactaagtacgtttaaacagaaggctgaggatcttgaaaataagcttattgagttccaaaaacagtctgatgaactgtcacaagagacacaagaacaagcatccaaagttactgaacttcaagagctggtcgaaaggcttgaagcaagtttatccaatatggaatctgaatacccttttctacgacacatactcatgtcctatgagaaagtctcataaactaaaaataataatacatttagcttggaaagcaagatcgccaccttggagtcagagatagagttgctccacagcaattctgcactagctattcaggccgtggttactcctgaaatgaatcagacaacagtaatcgaggaatttgacaagggacaccagcttgaagaagtaaaacggtcaatgtatttgctattatttttacctggcaaacatttatacagtttaagataannnnnnnngcttccacaggaaaaccacgacgccctgattaaaagtatggtagaagacaggagatttgacgacaaaaaatccgctgcagcatgcattgtctacaaatcactcctacactggcattcatttgaagcggagaagactaacatatttgatcgaatcatccaaataattaggtcatcagttgagggagcagaaagttctggagagctagcctattggttgtcgacaacatcaactctcctctacttgttacaaaacactctcaaagctagcagttcattaagtaaaggaacaaatcgcagccggaccacaacaggcagtctgttcagtagaatggtgcagagtgcccggacatcatcaggcttaggcatagctagtggatacagtggaatggtgggaaggcctgacactgatgcatcgatggtagaggcaaaatatccagcacttcggttcaagcaacacttgacagcatatgtcgagaagatatacgggataatcagagataacctgaagaaggaaataagtccgttcttgacaatgtgcatacaggctccaagagctaaccgtgtgaggccatcacggggatcactaaaaagcatacactctaatgcactagctaggcaagcatcaagtctgcattggcaaaacattgtcaagtgcctggatcatacactggaaacgatgaaaaaaaactatgtagctccggtgataatcaggaaaacatttaaccaagtatttgcatacttgaatgtgcaactcttcaacagcttactgcttcgtcgggaatgctgctcttttagcaatggggagttcttaaaggctggtttacaagacctggagcagtggtgctctaggacaactgaagagtatgtagggacgtcctgggatgaactgcaacacattaggcaggcagtcgggttcctggtatgcatgaaaaacatgcagttattttaactgatatactagtttgatctgtctacttattagatgaatccaaatcacaggttttgcatcagaaatcacacaaaatcctggaggaaattacgaatgagatttgccctgttttgagcataactcaaatataccgcatagcaacgatgttctgggacgacaagtacggtgcacaaggcgtatctcaagaggtcattggaaggatgagaacgatgacaacggacgactcagtaactactccaaacagttcgttcttgctggacgacgactcaagcagcacacggactgatatcttctacagataaagagcagaatgaatggtacagttacttgtggagttacagggaactgaagatttttttttaggagtgcacagattgagttgtgattttttttcccttccttttttttatggttttgggtgggaaatggctacaaagaaagggaaatatagggtatatcgtgatatcattcatttgattggtttgattgtttggaacagagagatttgtaattatttgaatatgtatataa

SEQ ID NO: 9681 - DNA, 3846 bp, Zea Mays
aaagaaggcaagtaaacaaagcagcaaggaccaaggaggacgaaagcgagcgagacacacaacagtgacaccagcacaagcaaggagaggcatagggaggagagcagccagcagcaggaaagctgagcagccgtcagctgagagctagagcaagagcatccaccagtggcggcagcagctagcgacaaaggctgaatccgagagtgcgcgccgcagccgtggctgccgtcccaggcgccgctgccgcttgtgagaggcgctcgtcttgtattcacgaggagggcgacgatctcccgcgcggcaaaggaactaaccactggccccgccctgtgatggctgctgtccgtgccccggcggcgaagggaggtgtaggtgctccggaggcggcggcgtggagtggcagtggtctccgcgcgaaccaggccgggcgcgccagctgccgcggcgcctagagcgagcgcctggacgtggtctctctcgcagtccgagttggagcttgggttttggcgcggagggacgccggggttctggttctggcaacgcggctggaggaaggggggaaacggagatggcggtcggggacgcgctgcgacggctgtgcgaggagatcgggtggtcctacgccgtcttctggaaggccatcggcgccgccgaccccgtgcatttggtgcgggaggacggttactgtggccacacttcatgccctgtcggatctgagccttctgaatctctgcctctgcccagcgacgctgggtgctctgttcctgcagctgacaccatctgctggcttgttaacaacgatatggcgtcgcaggttcatgtcgtcggacaagggatcgtgggccgtgccgcgttcagtggcaatcaccaatggatcgtccacggtactgccaatggtcacgggctctcctccgaggttgctgctgaggtgaacaatcagttcagagttggtattaagactattgcgatcattcctgtgctgccacggggtgtcctacagttaggctctactggtttggttatggaaaacacaaattttgttatgtttgcaaagaagttgtgttctcagctaaacaaccgttcaagcatggctgcatctgcttcggttaagaacacttctagtcagcatggtcagtcacgtcctgatactgcaactgtgtcaactagtacaccaccaaatgcattgctgagtgcatctttgcttaaggttgcgcaacagaatggtcaccctgttagagagcacagtgtctatgctgagcgtgatcttaggtttatacaacaagcatccatctgtgagagtcaatttggaagtaatttacagagtggtgttatgaactcatgtttgacctccccaagcttcgcatcagttaaaaagcagtcacttttgatgaacagcattgggcagttacagttcagtaataatgtgcattcatcagcagatttggcaagggagatcatattaaaatcccttgggcgccaggactcttctgtctgcgaaaatacaaacatgaatatgcatcgtggaagatatgtagtatccaatgatataaatggttctaggaattttgattttcttcctattggtgcgaaagaaagcagagccaacttatcaatccctgcgtcgagtcaaattttggaccacatgccaggaacattgcagcagaaacagtctctagtcccattcagggttacccaatcttctgaattttctaagaaagtggagaaccctgaaagtggatcatttcaaattccttcagttacaacttctgattctggtggtcaggtttctaacagtttcaacatggtccaagagaatcgattgagtatgtcaaacaatgtccgacaagtccaaaagattgacagatttagtgatccaagtgctaatgtcagcactcagagaatgaagaacagagatgaatgcgagccaggaatgcccattgagagagcctcctcgttcctagtcgaacctggtgcagataatgacttgtttgatatgtttggttctgaatttcatcagtcctcccacaacgttggtgctgatttggtcacctggagtggtacagagtctcagaactcagatagagatgtccctgaatcgtcaatatgtttcaatagttcaccacttttcagttcgctagacaacgagcttcactattcaggtatcttatcgctgactgatactgatcaactattggatgctgtcatatcaaatgtcaatccaagtggtaaacagtgtcctgataatagtgcttcttgcaagactgcactgatggatgttcctagcacatctcatctttgttcaatagatttgaagagataataatggaatgcacaaatctcagatacggctttggattgagagtggtcagaacatgaaatgtgagagtgcttcagcttctaatagcaaaggtcttgatgtgccaagcaaggcaaatcgcaagagatctcgaccaggagaaagccctaagccacgacctaaggaccggcagctgatacaggaccgtattaaagagcttcgtgagcttgtaccgaatggggcaaagtgtagcattgatggtttgttggagaagacagttaagcacatgcttttcttacaaagtgtgacgaaaaatgcagacaagctcaaggactctactgagtctaagatacttggtagcgaaaatggccccctttggaaagactacttcgaaggtggggctacctgggcttttgatgtcggctctcagtctatgacatgtccgatcattgtcgaggatcttgaccgacctcgtcaaatgcttgtggagatgctctgcgaggatagaggaatcttcttggagatagctgatttcatcaaaggacttggactgactatcttgaggggtgtgatggaaacacgcaaaagtaaaatctgggcacgattcactgttgaggcgaaccgggacgtaaccagaatggagatattcctatcgcttgtgcgcttattggagccaaattgtgacggcagtggagcggcggacaacactaacaacatgaacatgcatcttggtttggtgcaccaacctgtcatcccagcaacaggtctcatccaatgagattaagactaagaggaaaccctcaagcatcttccaagtgctaagagcaggaggagctcagctaactcctgccatgactagcatcaccaatacgccatgcagtgcaccacctgctttcccgagacaccttaatctgtgcaaaagtgacgtccttcttgagaccaggtcgcagaaatggaagaaggaaaacaacgcaagagtgatcatcaggcagtgttttgttcgtatgatctttagattgtttgttagttagcgctgtttggtcgtatattagtggttttttttgggtactgttatccagaatggaagttcttgggttggtttatttcacacacacaaaaagatggaatgccacctttgttataagtctcttcacattagaaccagtgagcatagctagtgaaaaattgtttgagaagactcttgagtcattgctctgatcagattatttgttattactcactgctgctgcctgccaacatccagaagtagatcactggattctagctgaagccacaatgtcatccagcagcacatggtgctgccaatgagttgcaatgtgatatgtttactttaagcaaaacagatactaataatactagtaggcaatttttgtaaaatgtttgggtatcaactagttacttatcaccatcctatactagataggtgcccgtgcgatgccacggaacataaatctcgatttgtatatcagctatgcttcctatggagcaaggaagcgaacgcaagccagccttttgtattagtgcattct

SEQ ID NO: 9682 - DNA, 1216 bp, Zea Mays
gccacactcattactcgccactactcttgctgtctcttgcatcgcatgcccggccgcctctctatctctctctggctctcccccacagctatctgctatgcctatctagcttagctgcagacctaactaaactgctgccaagaatttggccaaagcaagatctcacaatcccatataacagatcggagcccgcccatgtatgtgtagatagacagattcccatagatatatggcggatcaccaggagatgatccacccaccagcggctgctgccaccacgggcagcacgacgactcacggcgattggtggaccacggcggtgtcgtggtcgccggaccagcagctacctgctgggttcggcggctgggcgtcgtctgccgcggccacagctggaggcaacaggtcgaggtccggcaacaacgcggctgcctcctcggagtcccccgggtccaagtccaaccactcgctcaccaccgaccaaggcgtggtctccgtgccgccgcacccgccgccagcggcgtctgctcacgccgccagcggcagctggaacgagccttcttactacttggacggatctgctggtttcatgagctcatcaagaagcgaccaggctcatcacctcggcctgagctgctcctcatcggatcacaacagcgtgatggtacagggcgcccacgatcccaaccagcagttcctatccaatctagggttcgagttgctctcgtcgccgacttcgtcttccggcgggttccggtcctcctccccctcacttctcagaagcctcacggagccatcggccgccgcgaacactacgccgccaggcctcctgcagcaataccagcagcagcagcagcagacgatggaccaggcgccagccgggagcatcagggaggctctgcagctcactactaacaggacgccgttttggaacccttgtgcggaaggggcagcgagcttactagggactgccagaccaccgtcgtcagggctagcgagttttccgtccaagggcgcaatagaaggtgccgggggctctagcaacataattgccaagaggacaaacaccgttccaacgccgtcgcttaagaaaccgagaacagggacaccatcgccattgcctaccttcaaggtgaggaaagagaagcttggtgacagaatcacagcacttcagcaactagtctctccttttggaaaggtaagtgatccaaggtcttag

SEQ ID NO: 9683 - DNA, 2858 bp, Zea Mays
ctcacacactccactgctcccctcctttttccttcaaatcctcccaacaccacccagggagacaaccacccccgccgcaatggacaagattgagacgacgacgaggaggaggaggaaagggagaagcagcagccgccgccgccgccagggggcacggggaccggcgggcctcgtagccacggccttggccctcctctgcgcctgcgccttctccacgcctgccgccacggctctcaccccggacggcgaggcgttgctggagctcaagctggccttcaacgccaccgtgcatcatcggctcaccagctggcggcgcagcgaccccaacccctgtgtctgggagggcatctcctgctccgtccccgacctcagggtacaatccataaatctcccatacatgcagcttgggggcatcatttcgcccagcatcgggaggctggacaagctgcagagactagctctgcaccagaacagcttgcacggcccaatccccgcagagatcaagaactgcaccgagctcagggcaatttacctgagagccaactacctgcaaggaggtatcccttcggagattggcgagctcgtgcacctcaccatcttggacctgtcaagcaatctgttgaggggaacgataccggcctccatcggaagcctcactcaccttcgcttcctccagacccaggcccgttgtgtgcattgaccatgaacgagtatgcgattggttgcctgtgccatccgaacgcagcctgcacgcgcggaaacaggccaggcgttttttcagccctcagcctgcacgcgcggagacacagaaaagacgcttctccggtcgcccaggccggcgtgggcgtggctcgcattggcactgcaaccaatcacgtagtatgtatctcccaggaacctgtctactaatttcttctccggagagatcccaaatgtcggtgtcctcggagccttcaaaagcagctcgttcgttggaaatctggagctctgtggcctgtccatccagaaagcttgccgtggaaccctcggctttcctgccgtgctgccccactccgatccgctctcttcagctggcggtgtctctccaatcagtaacaacaacaagaagacatcgcgctttctgaatggcgtcgtgatcggctcgatgtcaaccttggctcttgccctgatcgctgtgctcggattcctgtggatctgcttgctgtccaggaagaagagcgtcggtggaaactacgtaaagatggacaagaaaactgttcctgacgtggaaccttccgtactcgtcgagtgagatcattagaaggctggagctgcttgacgaagaggatgtggttggctgcgggggcttcggcacggtgtacagaatggtgatggacgatggcacgtcgttcgccgtcaagaggattgatctcagccgccaaagccgcgacaggaccatggagaaggagctcgagttcctgggcagcatcaggcacataaatcttgtcactttgcgaggctactgccggctgctccctgcagcaaagctactcgtatacgatttcgttgagctgggcagcttggactgctaccttcatggagatggacaagaggaccagccgttgaactggaacgcgcgtatgaagatcgcccttggctcggctcgaggcctggcatatctgcaccatgattgctcgcctgggatcgtgcacagggacatcaaggccagcaatatcctgctggacagaagcttggagcctcgtgtctctgattttggacttgcaaagctgcttgtagacaatgccgccgcccatgttaccactgttgtggcgggcacctttggatacctagcaccaggtacatctcctgcctatcttcttgccagatgatatcgttgtagtgggaaaaaaaaacaaggcatctagtagctatgaagttggtgaaactaaaactggctggttgctttggctttggtggctggcaacagagtacttgcaaaacgggcatgctactgagaaatcagacgtgtatagctttggagtgcttttgctggagctagtgacgggaaagaggccaaccgattcatgcttcatcaagaagggactgaacattgttggctggctgaacaccctgacgggggagcaccggctggaggatatcgttgacgagcgatgcggcgacgtcgaggtggaagccgtggaagccatcctggacatcgcagcgatgtgcaccgacgcagacccggcgcagcggccgtccatgagcgctgtcctcaagatgctggaggaagagatcctgtccccctgcatgagcgagctgtgctacgagcagcacctggagctctgagccgaggaagcctgacctgactacgatgcagtgcatgatggatgagactgtgtaggaaacaaaagttttgtagatatgacgatgatgaaccgcgtacgtagtgtaggtgtttgtgagcagctcaaaagtaggacaagtgcagaaccaacaacctgatcggcacgttacatacatagatcttctctctgtctgtcttctaatcctttttggcctttttgttctcagttttctttggacggccgtattctgtagatgagctgggaaacagtgaacggcattgagacctgagaatgaataccagagcaggacaaaataacaacagcagagggtgtttcggtataaaaagaaagacggtttaaagaaaactgatttttacaatgtccaaaccgaaaggacagttaagactgcaatatctaaactagaacctgataactgggatacagagcaccaccagtgaccagagcattgcaaagttgacgagtgaaggtaatacttgtccatacatgatgtaccagcatgtgagccttgcaaag

SEQ ID NO: 9684 - DNA, 2383 bp, Zea Mays
tatagcaattttcagttcaaagatgctaagactatattcttccaggggatgcaaaaagtgttatacttgtaagcatcggaggtcataaggtaatcaaaggtggaaatggcattgctgatggtcctattgacagttcaagtcttaatgtggtgatgcagaaggttaatgcaaatagttttggacatgaagattatccagatgcaagggaaggtattattggtgatggttcatttgactgtactgttgatcatgagaagtatgcgagcatttatggacctaccaccggtgataagattaggcttggtgataccaatctttatgctgagattgaaaaggacttcgccttttatggtgatgagtgcatatttggcggtggaaaagttctgcgtgatggcatgggacaagcttcagggtacccagaatctttctgcctagatacagttataacaaatgctgttgtgattgattataccggaatatacaaggctgatatcggtataaaaggtggacttatagttgctattggaaaggctggaaaccctgatgtcatggatggtgtccataacaacatgattgttggggtcaatactgaagttattgcatctgaaggcatgattgtcactgctggtggcatagattgccatgtccactttatatgtcctcagttggcagaagaggcaattgcaagcggcatcacgacattggtgggtggtggaaccggaccagcacatggaacttgtgccacaacttgcactccagcaccatctcaattgaaattaatgttgcagtccactgatcaattgccaattaacatgggattcacaggcaagggaaatacttcaaaacctgaaggattggctgaaatcattaaagctggagcaatgggtttgaagctgcatgaagattggggaactaccccatccgcgatagataattgtttatctgttgcagaagattttgatattcaggtcaatatacacacagataccttaaatgaatcaggctgcgtggagcatacaatcgcagcttttaaaggtagagccatacatacatatcacagtgaaggtgctggtggcggtcatgctccagacatcatcaaagtttgtggggtaaaaaatgtgttgccctcttcaacaaatcctacccggccatttacttcgaacactgtagacgagcaccttgatatgctgatggtttgtcaccaccttgataaaaacattccagaagatgtagcatttgccgagtctagaattcgagctgaaacaattgctgctgaggacatattgcatgacatgggagccataagtattatatcatctgattcacaggccatggggcgcgttggagaggtgataacacgaacatggcaaactgcaaacaagatgaaggtacaaagaggtagtttacctggatctggtgacgctaatgccgccccggacagtgacaacctccgtataagaagatacatagcaaaatacacaataaatccagcaatagtgaatgggttttcagactttgttggttctgttgaggtgggaaaattagctgaccttgttctttggaaaccatctttcttcggcgctaaaccagaactggttgtaaagggaggtgcaattgcatgggctaacatgggtgatcccaatgctagcattccaacacctgaacctgttgtgatgcgacctatgtttggtgcatttggaaaggctggaagttccaattcaattgcatttgtgagcaaggctgctaaagaagctggtgtcgcaacggagtacagactagaaaagagggtggaagctgtaggccgtgttcgaggcctgacaaagcttgacatgaagctcaacgacgccctcccgaaaatagaggtcgacccggagacctacacagtgaccgctgatggagaggttttgacatgccaaccagcacccacactgccactgtctcggaattacttcctgttctagaaagccactgcatcagcaaaccaccaccactactcacgccctatgcatgcacatcgtcatatacgagtataaaagatgcaagttcaattctgtacgctaccctctttttaataatatggccaatgagcaaattctttggcagtagaacacttttgccctctgctatctgcagatgctcgcatatttgtgcggaataaaacttggaacggtgtagatttctgttccctgctccaaatgtggctatacatactgttgtatttgccgagttgttatcttctcccatgttgtcaaggttgccacgtatattattcagagtcttcgctccattggtttcaagctgatgctcagaggagtacacgctctcgactacactctcgcccctattgcttcggtgcacaacctgcaggcagcctataaccata

SEQ ID NO: 9685 - DNA, 3596 bp, Zea Mays
atgtcgacgcgcgacggcggaggcggccggcgtggcggcaatgcagcagcaggccgtggaggtgacggccaagggcggggccgtggagggggcggccgaggtggcgccggcggccgtggcggtggcggccaatggcgggcccaaggcggcgcggagcttggcggtggccgaggtggagccgtcggcgcagcgcgtggcggccgcggaggtgtcgagagagggggtcaccagtccttccacggcgccaggccggtcggtggggaccgaggcggacgcggacactaccaccatggcgtgcctgctcaggtccagccgcagtggcaagtggccgcgccgccttcgacgtcgaggccgacacccgcggaagtcgaggagctgagaggcgaggtggagaggaaggcggcggtggcggtgccagacgcagaggcgcacgaggggccgtcgtcgggcaccgcgcatgagccttccgccgcgccggcgcgggtcgaagcggagcaagggacgtcgctggtggtggaggcagaccaggccgctcaggggaggctgcctccgtcgtcgagcaaggcgctggttttccccgcgcggccggggtacggcacgctcggccggaggtgccgcgtgcgcgccaaccatttcttcgttcaggtggcggacaaggagatctaccactacgacgtcgtgattagtccagaatcgcagtcaaggaaaagaaatcgttggattcttaacgaactcgttaaattgcacaagaattacttgaatgggcgactgcctgtttatgatggtagaaagggccttttcactgctggtccgctaccgttcaaaaccaaagaatttgttctggaactaaccaatcctgagagagcaaaccagggggcgaaagagtacagcgtgaccataaaagatgctgccaaattagatctttacagccttaggcagttcttggctggtaggcagagggaactgccacaggatactgtccaagccctcgatattgctatgcgagaatgcccaactgaaaagtatgtatccatctcaaggtcatttttctctcagtcatttggacatggtggtgatattggcagtggtgtggaatgctggagggggtactaccaaagtctacgtgctacacaaatgggattgtctttaaatattgcaactgcattttacaaggctcaaccgattttggagtttgcattggagtacctcaacatacgtgacacctcaaggcgtttgtctgaccaggatcgcttaaaactgaagaaagtcctcaaaggagtacgtgttgtggcaacacatcgtcgtgatatagccatacattacaagattactgggataacctcacttcccttgaatagtttaacgtatctattcagttttaattgatattctttttcttaattcattctgcactgttttttaatggcacatgtttaaatattcatgtttgtttatataggtttaatcaagatggggcaagtgtttcagttgtccaatactttaaacaccaatataattacagtttgaaacacattcactggccatgccttcaatctggcaatgatagtaggccgacttatttaccaatggaggtttgcagtatacttggcggtcaacgctattctaggaagctaaatgagtaccaagtcacaagcatcctgaagaaggcatgtgagcgaccacctcaaagggagggcagcattttagaggtagttaataggaacgactatggtaatgatcattgtgccaaagaatttggtattaaggtgacaaatgaacttgccttggttgatgcacgggtgctgccagctccgacgcttaagtaccatgactctggacgagaaaaggtgtgtagtccttccgttggtcagtggaacatgaacaacaagagattgatcgatggagtatccattcagtattgggcttgtgtgacttttgcttctcggttgcatccaaatgatgtccgcatgttttgcaacaacttggttggggcgtgcaatgatatgggcatgcaaataaatgggagaccttgtgttgatgttgggcaagcacgcccagataacttagaagctgcactcagaaatactcatagacaatctgcacaaatgcttgcccaacaaggcgtgactagacagcttgatttactaattgttgtattaccagatgcaaatgcaagtgtcttttatggtaggataaagcgtctttgtgaaactgaacttggtttagtaactcaatgttgtcaaccaaagaatgtttttaaaggtggccgacaatatctccaaaacctggctcttaaaattaatgttaaggttggtggccgtaatacagttctcgaagatgctttaaataggagaatacatttgttaacagatttacctacaattatctttggagctgatgttacccacccagctccaggggaagatgcatccccgtctattgcagcggttgttgcatcaatggattggccacaagttgcaaagtacaggtgcttggtgtcttctcaaggtcatagggaagagatcataactgatcttttcacacaagtgaaggatccacaaaagggacttattaacggtggaatgatcaggcatgccgaacatcttagggaactactcgtgtcattctataaggcaaacgggagccgcaaaccaagcaggataattttctatcgagatggtgtcagtgaggggcagtttagccaggtcttgctttatgaagtggatgcaattcgaaaggcgtgtgccagcttggaagagggctaccttcctccaattacattcattgtggtgcaaaagcgccatcacacacggcttttccctgaagatcatcatgcacacggacagatggatcgaagtggaaacattttgccaggaactgttgttgacacgaagatatgccatccaagtgaattcgacttctacctttgtagccactctggcatacagggaacgagccggccagcacactaccatgttctgtttgacgaaaacaaattcactgccgatgcactgcaaacgttgacctacaaactgtgctacacgtatgcgcgatgcactcgatcagtctctatagttcccccggcgtactacgcacacctggcggccttccgtgcgcgccactacatggacgatgacctctccgaccaggggtcgtcttcagtggcgagttctcgcatgaaagatggcgctgttccggtgaagcagctgccgaaagtgatggagagcgtcaaacagttcatgttctactgctgaaggtggcctttgcaggaaggaccttcatcgacacttttgttgccatgaaatgaaacgagtaattctgggttggtgtaattatggtgaagtaaccctgaagggtgggccgcacgacctccaaatcatattttgggtctggcgagtcttctatccaaaactcgtcagaaaacgccttttatttttggtggacttcgtataagtccaaggcattgcctgtgattttggggtttcttttaggttgcaaccttgttttgtttttgaaattttctgctttgaattgatgcattatatatgaagaaatgagcctctcacgctagctccagcaagtgacccaagtatgac

SEQ ID NO: 9686 - DNA, 3995 bp, Zea Mays
acgcgtccgtgatccgtccgtcgccctccccttcctgcgcaagcgtgcgcctacctgcatccgctatccgtcggcgatgtcggtgccccccgccggcaagcgccaggtgtccctgcggggctcgagcgcgaaggagatcacacgcgacgcgctgctgcagaaggtttccgaggagcgccagctccgcagccacctccgccgcgccgccgcggccgccttctccatccagcgaatatggagaaggtaccatgtgataagaatggtttcagaacagctccatgaagactgggaactattaatgaaccagcctaacatcgacttgactactcaatggatatccaaaaagatgcttagaccgtttcttttcttcattactcaaccttctagctggtatattggacaatggagcaagactgtggaatctatcttaacatgcttcaagattatcttgaatagtataaattcaatggatgcaaggaaaaacttctgctcctttgctgtgggtataccagaagagagatctatttggctttatcaggccaaaaagctgatttcactgtgctcttccattcttgccaggtacgaccattcctgttgcaaggatggaagcatagtcgacatgactgctattgctatgagattggctgtctctctaactgattgcaaaacatggaaaagtttgaacagtgagaacactagcgctgcagatgcttctgtacagagtttgattgaatttattggtacgtgccagagtggcatgtataattgtgttaggcaatatataaagtctcttggtcctcatgttacttcagcgaagaaaagttctgcaactgcaacagatgatgattttcttattactgctagtgcagtcactttagccttgcgcccattcgattctaagaaagcaaagggcggtgttgatctgaatggtgcttcaaagaaatacttcacacttatacttacaataccagatctgtgcaaacgcatgccacctcttttgttacctgctcttaaacatttttctgtgctgcaaccgagtctcaatattttactgatctccaaggataaaatatttgaagaaataataaaactggaacagtcagaggtttcagctagtattattccttgttctggttgggctcttggaaatatagtgaacttagctaccaatcatgatgacttatccaattcagggtgtttcattcaagagttagatttctgcttatatgttgatgttattaattgtatttctgaaaacttactggaaagttttgagaaaagcaagggaacgtctcaaaatgttggtaatatcactttccatgccgacacatctgttgcagaggaagaggataccaatgacgactgcagaatgagaacattatttatggaccttctgaagccaatttaccagcaatggcaccttagaaaacttttgatgttggcaaaagaggattttccatgccgcagggcaactgattatgatccaaacttgaagaatattcactttcgaatcctaaagttgtcagatgttatatgcttctactatcacatgcttagaattttctcatcacttaacccttctatcggtgcaatgcctattctcaacatgcttgcattctcacctggatttctagttgatttatgggaggcactagaaatgcccatttttggtccacctatccagaattcacaagaaacaggacacgagaaacagttggctacaagtagttcaggtgtgcaagtatcctccatgaggcaaagaaggaatgccaaggacacagcaaacaggtggtcaaatgtgctccagaagattactggaaaatccaatgattcagaggagggcactttatctgatagtattttattttctcatgagtctaatgatgatgcattaacttcatgggatattgaagccatgagacatgcatctgagggtattggaaaggacttaatgtgcattatgtatcttttctgtgctatatatggacacctattacttgtgctagatgatatcgagttttatgaaaagcaggttccttttactttagagcagcagcggaagattgcatcagcacttaatacatttgtatacaattctttcattcaaaatagtggaagctacagcaatcctcttgtggatgtagctgtcagatgtcttaatctactctatgaaagggacagtaggcataagttttgtcctatttccttgtggttggcacctgctagaaatggccgaattccaattgctgctgctgccaggtctcatgaggcagcatttggtatttttccagggattcctcatcggagctctgtacttaccacattaccacatgtatatccatttgaagagagagtgcaaatgtttagagaatttattgagtcagacaaagcatcgagaagggttactggtgaagtttctgggccaggcccgggatcgattgagatagttattcgtcgaggccatataattgatgatggatacaggcagttgaactgcctaagatcaaagttgaaatcttgcattcacgtgtcatttgtgagtgaatgcggtcttcctgaagctggtttggactatggtggtctgtcaaaagagttcctaacagatctctcaaagtccgcttttagtccagagtatggactattttcacaaacatcagcatctgatactagcttaattcccagcaattctgctaagcttctggataacggaattgatatgattgaatttcttggtcgagttgtcggcaaagcactctatgaggggattctgttggactattctttctcaccagtatttgtgcagaaacttcttggacggtataattttctggatgaactatcaactcttgatcccgagctttatagaaatcttatgcaactaaagcactatgatggagatgttgaggatctatttttggattttactgtaactgaagagttgggtggtaaaagaatcgtccatgagcttagacctggtggtaaaaatatatcagtgacgaacgaaaacaagttacactatgttcatgcaatggcagatttcaaacttaaccgacagcaccattgtccttgcagatacttccatttgcaaacgcattttatagaggactcagcgatctcatttcaccatattggctgagcctgtttaatgcaaatgaatttaatcagttactttcaggcggactacaggattttgacgttgatgatttgcggaacaacaccaagtatactggtggttatactgagtcaagtcgaactgttaaactcttctgggaggtcatcaaagcatttaagccaacagagcgttgtttgctcttaaagtttgtgacaagctgttcacgagctccactgcttggattcaagtacttgcaaccttctttcacaattcataaggttccatgtgatgtaacactttgggcatcaattggaggccaagatgtagatcgtcttccatctgcttccacatgctacaatacgctcaagcttcctacatacaagcggtcaagcacgctaaggagcaagctgctttacgccataagctcaaatactggatttgaactctcgtagaggtatattcagtggttttgtaaccctgctttggttttgctgtgaatagaggtatagcaaaattcgatcggatgtacaattgcatcttgattaatcggagtaacagcttctatgaaggtagcgcaatgcataaaaaatgtttgtttggccggcggggccgtttggatcgatcccaggcaaaatccgacgcctggggagctccgttcaccaggccggtttgcaattcaaacagccatacgtgtgtttctattgattgtgctgagagagagagagagagagagagagagagagagggaggggggagggagagggagatagagagagagtgagggaggagagagagagagagagagagagagagagagagagagagagagagagagagagagaaagagagagagagagagagagagagagagagagagagagag

SEQ ID NO: 9687 - DNA, 4378 bp, Zea Mays
cctcatttgtagctacaaatgaggggttttttgggctccccagaaacaatctgtcgctttaagggatctgttggagaaaggattaaaatctacccccacttattatttagatgtcccttaaaactgattttgaggagtcgttttatggagagctcttggagatgctcttaagcttttggattgaactggtcaattaaataaaataattgttgctcgctcctatattccacgtcagaggctcgatgtgagggggagtgttagaatataatataagtgaattgtctacctccttccaccagcttaagcttttggattgaactggttggtgtatgcaatttaatagtatataaaaaggattctgattctgccggatagaatctcatcatgatgttacatttttccttgaaagtgtgttattccattaaacattcttcattttcttgtaggaattaaaccagggtcggatgttttgtgtatgtttcattaccttttctttttagtctgaactattttgcattcgttgtgtagcaaaaccacatttaggaactctaatgttatttgagagccttctagtaggtttctgtattgtagccaagttacaccaacatgggatctggaatggtgctataactgaatatgaactttatccttgtctcccaggttgcatctatcaagcaaagatgttcttcctccgccttctatctggagggattcttgggtggcaacaagatctgtcatgaaagtgaagacgtttcagatcattgtcctgcaagggatcattggctcgttgccgtggactgctatagttttcttcacaatgtggttcgaactcattggttttgacaacaacagctcagcagcactgaacagcctcttcgccatcgggtgtgccagcggagcatttattggcggggtgatagcagatcacctgtcaaagtacttcccagattcggcacgggtcatgtgtgcccagtttagtgccttcatgggcatcccgttttcttggatcctcctcacagtcatcccccagtcagttgactactggtatgccttcgccgtcacgcttttcttcatgggcatcacgataagctggtgcgccacctcggcaaacaaccccatgttcgccgaggtggtccctcccaagcaccgcaccatgatctacgccttcgaccgcgcgttcgagggctcattcgcctcgttggctgcccctgccgtgggcctaatcaccgagaagatctatggctatgataccaagaccgtgaaccttgcgaacgggtcagcggaaggggcgtacgcgctctcaagggggctgctgaccatgatgatcgtgcctttcggtgtgtgtgtcctgttctacagccccctgtaccttgtgttcaagcacgacagagagaacgctaaatttgccagcttcaaggagcaggagctagtatgatcaatgatcatacgaatgtgcttccttggtccgcattcataacctctcgtcatcccgggctggagctttgcgtgatgattatgaagataactgccttgatcggcattcagaacatctggtcataccgtcctgggtcattctgagtttcttgttgagattatggcaattgtgccacggagaggtgtggatcaacgtttgttctggcagattttgaagattgttataaggcgacctttttttttgtgctgatcacctatccagaaagccatggcttctcccgacgactgatttgtgttgttaagggatgatttgcttttttgcatggcttctcctgacgactgatttgtgttgttaagggatgatttgcttttttggtaattcttagtcttacaagagaaccccaaggagaagcatatgatatgatctgaaccatgctgaattgctgatgttacatgtagttggaacagatcactaataatgttctgatcactgggatcagctcgttttcagtaatctttctggtttttttttcgcaggaaaaaatttctgtgttttttttgggaaaaacacaggaaattttgcttctgttgattatgaaagcagtgctagcagtttgatttcatctattaaaactatgtgcggaagcaaattccgcaaagaagcaaaggaagaaaatggaaaatgctagctgcctcacgtgggacctcctgtcagagacagacccctttgcacgctttggagccgcagcaaagctcgaactcgatccgggtctccgggccattcgatctccgatcggacggcccagacagctcacttcctctccacctttgcacgctatagctcctctccgagtcgtcgtctccgtcgctgcctgctctgcttgctgcgccactccaaacccaacccaaaacccccacacgagatctgcgcagcaatggcgacgcggtgccacgtcctgctcctcctcgccgccgccttcgcgtccctcctcgcgctcgtggccgcggaagggggcgaagaggggccccgcgggcgccggctgctcgtcctcctggacgacctggccgtgcggtcgtcgcactcggccttcttcggctcgctccaggcgcgtgggttcgatctcgacttccgcctcgctgacgatccaaagctctcgctccaccgctacggccagtacctctacgacggcctcgtgctcttcgccccctccacaccacgttttggtggatcagtggaccagaacgcagtcctcgaatttattgatgctgggcatgacatgatcctggcggcagattcctctgcctctgatctcattcgtggcattgcaacagagtgtggggttgattttgatgaggatccagaggcaatggttattgaccatatgaactatgccgtcacagatgttgaaggtgatcacaccttgattgctggtgacgatcttatccattcggatgtgatactagggtctgaaaagattgaggctcctgtattgtttcgaggaattggacacatggctaatccatcaaacagtttggttctgaaggttctatcagcctctccatcagcatattcagctaatccaaagactaagttagcgtctcctccatcgctcactgggtcagctatatcattggtttcggttatgcaggcaagaaataatgctcgggtgctgttatctggatcactcgatctgtttagcaaccggttcctgaagtctggtgttcaaaaggctgatagcaaaacaagatatgagagagctggaaacgagcaatttgtggcagagataagcaaatgggttttccatgagaggggacatctaaaggctgttaatgttaggcatcacaaggttggggagaccaatgaaccaggcatgtaccgcattaatgatgacctggaatactctgttgagatctatgaatggtccggaacaagctggaagccgtatgttgctgatgatgtgcagcttcaatttttcatgatgagcccttacgttctgaaaactatgtcgactgacaacaagggtttgtattcaacaaccttcaaagttccagatgtttatggagttttccagttcaaagttgagtaccaaagactgggatatactggtctgtcttttacaaagcagattccagtacgtccttacagacataatgagtatgagagattcataacatcagcgtacccatactacaccgcctcattttcaacaatgggtgctttcttcgtattctcgtttgtgtacctgtaccacaaataaaggactcatgggagcgcacaagtctctggaggctgacgtgaccaagatctgtgggcactgaatgttgtgctataagccaagagttacccggcgccaattttatggaaccatgtttttgtactgccaacttagataacatttgacgaccgtgaccgcactcatgggaaatttactcgtgctaggatgttcgatctgcccccacttcttttttttctttcttggaccctttctgatcagcacttgtcagaacgtttacagtctatagcactgaaacgtgattttggaagtactacacccccagtaattttgcactcgtgcccagttctgatttctgatcctgggtgtggacttcaaagtctgcctattatacttccgcaattgttcgtgtttataacctggacgcacgtattttttttcacgggcttattgaacatgatgctcgaagagtgcactaaacatgccatgcacgtattttttttcacgggcttgttgaacatgaatgctcgaagagtgcactaaacatgccgcttcatgtacagaattcgaaatttgtaatgttatatgagcattttctcgggcagtggatgcattttaggtgccgtttggttcacatttgtcatgtacatttgtcatgtaatgggtaattgataacgttaaaccatgtttatttaagtttaactgtaatt

SEQ ID NO: 9688 - DNA, 1895 bp, Zea Mays
caccgcgccaccgggacgggaagagcgtcccctgcaccggccatttgctccgctcgcgtccccgcctcctgcgcacgagacgctctccgctttttttttatcgacgagtttgagacagaccaaagaggcggaagaagcggggaagccgacgggcaacgaccggggcgtgaggcgatgtcgtggctccgcagcgcggtgcaccgcgccgtggaggcgagcgggggtcacagctccctccttacccgcaccgtccgcacctcccttgacaccgtcgtccaccatgccggccaggctgtcgcgggcggcgccaggctcatcaccgggagccggagttacaagagcgcgaaggtggcagcgaagaggctggaagaggaggcgctctcctgcaaaggggacgaacgggtgcagctgctgcgccggtggctcgtcgcgctcaaggagacccagcgcgcgaccacggcggtccgggagccgcaatttggggacaatccggaccagactgcgcccctgctggatttgtacatcgattacgacagcggtgcggagccgatgaactttttccatgtcttcctctacagtcaagccctcgagtgtgttgttctctccttgattagggaagccccaactgaggaagaagttccactggtctcagaagtttttggaatgtgcctttcgggagggaaggatgtgcacaatgcactcttaagtagtgtaaaggacctggcaaggttattctcaagttatagtgacgaagtgttggcaaaacgtgacgagctgcttcagtttgctcagggtgcgatctcagggctaaagataaatgctgacattgcaagattagataatgaaattactcagttgcaacagcagataaattcaatggatgcgctccatgctacatcaatcgtcaatcagaataaaaaagctcaaacagccactgagggtttcagaaaggcagtttctgaagttcggctttgctctagaatggaagaacttctattgaagaagaaatcaatacaccccggtgattcattggagactcattttgagaaggtagataaactgaaggttttgtctgaatcccttgcaaattcatctgcaaaagcagaaaagcgtatcatggaaaataggctacaaaaggaagaatctcttatcttccgggtcaccaaaacaaatgaagttagtggtatagaaaaggaattagttgctgagatctctggacttgaggagcaaaggaatcaactcgaggcagaactgaaaaaggtgaatactaaattgaaagttgctacagtgaagcttaaaaaaactagagaggaacgggaccaatttgatgaagcaagcaatcagattgtgttgcacctaaaaacaaaggaagacgaactttcaagatccatagcttcatgcaaagtagaagcaagtactgtcagtgcatggatcaactttttgaaagatacgtggaaattgcagtccttgtttgaagagctaagagaaaaacaggccaacgaagaattggatagatgtggactctgctttgcgaaattgatgaagtatcatgtttctgcatccatggaagagctaagcacttctattgaccgtatcaaaacctttgttgataacttgaaaatatttggtaacagatccgtgtcagcagaggatggagctaatggtccgtctaagcaatcaaaccctcgtagatatcttgaggaagaatatctccaaactgagaaaaaggtcgtagctgcattcagtttggttgatagtatcagagcaatatattcttcaaaccaggattactataaaacgagtttgtgcagaagggatgacactgaggtaaaaaatctgtttacctccattgacaatctgcggatcgagttcgaatccgtgccacgtccagtgct

SEQ ID NO: 9689 - DNA, 1766 bp, Zea Mays
gccgccgattctgcctggcgctactgcccctgaagcgcacatggcaaggaagacaagagtccctgaagaaggtgcaagcatggaaattccaacacgatgtcgtcgatcccatcgttcttctaacacaaccacggggaccctaccacaagaggttcttgcagccctgacgtctgccttcaacctcgatgggtcggcgaaggagaacttcgaggatgctttgcttgcgatgctttggcccttcgctgatagagtggcaaccttcaagtcgggcctagtggcaccagaggagggattacgctgctatggagcaccatccatgtggaactttctgattttttttgtgggtgatttccacatttctgtcaagattggttcgtctcttcggctcctccttggcttcgcaagagtggtgccgccagtagctcctccgcgctccgccgggaccgacttgccgctggccgccaggggctccctcgcccaggaccggctccgccgtccaaccgtcctatcccctccggcctccgcccagatggttcatatccctctaatcctcatttcaaatgccatcttggggagaagaaacctgttctgattttattcagtattcactatatggcatttggttgtaaatagactacgatcacgatgactcttgaataagtgcgggaagcctacaacactgggtacacccttttttaaagaagggtgggcctagcgcagcggtagagcctaccgtctgtaactggaaggtcctgggttcgagccacaacctcatattatgcgggtaaggcttgacgcttaaagatacccttctccagaccccgcacagtgcgggaagcctacggcacttggtacgccctttatattgcaggtgattcatatcaaagatctgattcacataattaccaagttcagcagttttgcctctgacgatatgggttcttgggagggccaagctaggcagcttttgttggatgaggaagaagacgatgaagagtttttctttcttcttctccctgctatactttcattcctctctgaagagcaaagcgaaactggagcagctattgaaagtttcgtggaattcaagaggagcaccgcagccaaaacgctcgaagctcttgaagaaaagaagaagcatgatgaagatttctctattaaaaagtgtctagaggagttggatacaattgatgggctgacagatgaggatagatcatatgcaatggaagtctttgaatctgggttcaacagagaagtgtttatgagttcaaaaaaccacaatgttaggttgttttggctcaagagagaaattaaagcgcttgctgctatcatgtgatgtgaagtgaatgtggttgtgaagagataggcttacagaaaccgaagaaatccaactgctagtaccgttccagcgagaagacttcagccctgctttctgagtgcttggtgaacgatggaaggcctaggatgctgtttttgtttatgttgcttagagacggatattggaacgaggatataccttgtttgtacggtatcgtgctgccaaaattaatgcgttttaagcaatattttgctaggctaaccacggtttcttttaacggaacttgcctgacgtgatggagcctgctctgtctctagccagaaccccgcgtgttgtcaaggcgaactgtcatactgatcctaaatttagaagcgtcaatgttgagttatcagaacttgaaacaagacagcgtacatatactctacatggataatctcattcgagcaag

SEQ ID NO: 9690 - DNA, 1775 bp, Zea Mays
gaaagctcgtcatcagggtccattatgtattcttcaatacgtgtatcttttccaacccccaaaccttcaactagaagagccatttcccccctaaacccaggtaaccaacaagtttctacaggacttctttagggcacccacgccgccgattctgcctggcgctactgcccctgaagcgcacatggcaaggaagacaagagtccctgaagaaggtgcaagcatggaaattccaacacgatgtcgtcgatcccatcgttcttctaacacaaccacggggaccctaccacaagaggttcttgcagccctgacgtctgccttcaacctcgatgggtcggcgaaggagaacttcgaggatgctttgcttgcgatgctttggcccttcgctgatagagtggcaaccttcaagtcgggcctagtggcaccagaggagggattacgctgctatggagcaccatccatgtggaactttctgattttttttgtgggtgatttccacatttctgtcaagattggttcgtctcttcggctcctccttggcttcgcaagagtggtgccgccagtagctcctccgcgctccgccgggaccgacttgccgctggccgccaggggctccctcgcccaggaccggctccgccgtccaaccgtcctatcccctccggcctccgcccagtgcgggaagcctacaacactgggtacacccttttttaaagaagggtgggcctagcgcagcggtagagcctaccgtctgtaactggaaggtcctgggttcgagccacaacctcatattatgcgggtaaggcttgacgcttaaagatacccttctccagaccccgcacagtgcgggaagcctacggcacttggtacgccctttatattgcaggtgattcatatcaaagatctgattcacataattaccaagttcagcagttttgcctctgacgatatgggttcttgggagggccaagctaggcagcttttgttggatgaggaagaagacgatgaagagtttttctttcttcttctccctgctatactttcattcctctctgaagagcaaagcgaaactggagcagctattgaaagtttcgtggaattcaagaggagcaccgcagccaaaacgctcgaagctcttgaagaaaagaagaagcatgatgaagatttctctattaaaaagtgtctagaggagttggatacaattgatgggctgacagatgaggatagatcatatgcaatggaagtctttgaatctgggttcaacagagaagtgtttatgagttcaaaaaaccacaatgttaggttgttttggctcaagagagaaattaaagcgcttgctgctatcatgtgatgtgaagtgaatgtggttgtgaagagataggcttacagaaaccgaagaaatccaactgctagtaccgttccagcgagaagacttcagccctgctttctgagtgcttggtgaacgatggaaggcctaggatgctgtttttgtttatgttgcttagagacggatattggaacgaggatataccttgtttgtacggtatcgtgctgccaaaattaatgcgttttaagcaatattttgctaggctaaccacggtttcttttaacggaacttgcctgacgtgatggagcctgctctgtctctagccagaaccccgcgtgttgtcaaggcgaactgtcatactgatcctaaatttagaagcgtcaatgttgagttatcagaacttgaaacaagacagcgtacatatactctacatggataatctcattcgagcaag

SEQ ID NO: 9691 - DNA, 1788 bp, Zea Mays
cccaaaccttcaactagaagagccatttcccccctaaacccaggtaaccaacaagtttctacaggacttctttagggcacccacgccgccgattctgcctggcgctactgcccctgaagcgcacatggcaaggaagacaagagtccctgaagaaggtgcaagcatggaaattccaacacgatgtcgtcgatcccatcgttcttctaacacaaccacggggaccctaccacaagaggttcttgcagccctgacgtctgccttcaacctcgatgggtcggcgaaggagaacttcgaggatgctttgcttgcgatgctttggcccttcgctgatagagtggcaaccttcaagtcgggcctagtggcaccagaggagggattacgctgctatggagcaccatccatgtggaactttctgattttttttgtgggtgatttccacatttctgtcaagattggttcgtctcttcggctcctccttggcttcgcaagagtggtgccgccagtagctcctccgcgctccgccgggaccgacttgccgctggccgccaggggctccctcgcccaggaccggctccgccgtccaaccgtcctatcccctccggcctccgcccagattttattcagtattcactatatggcatttggttgtaaatagactacgatcacgatgactcttgaataagtgcgggaagcctacaacactgggtacacccttttttaaagaagggtgggcctagcgcagcggtagagcctaccgtctgtaactggaaggtcctgggttcgagccacaacctcatattatgcgggtaaggcttgacgcttaaagatacccttctccagaccccgcacagtgcgggaagcctacggcacttggtacgccctttatattgcaggtgattcatatcaaagatctgattcacataattaccaagttcagcagttttgcctctgacgatatgggttcttgggagggccaagctaggcagcttttgttggatgaggaagaagacgatgaagagtttttctttcttcttctccctgctatactttcattcctctctgaagagcaaagcgaaactggagcagctattgaaagtttcgtggaattcaagaggagcaccgcagccaaaacgctcgaagctcttgaagaaaagaagaagcatgatgaagatttctctattaaaaagtgtctagaggagttggatacaattgatgggctgacagatgaggatagatcatatgcaatggaagtctttgaatctgggttcaacagagaagtgtttatgagttcaaaaaaccacaatgttaggttgttttggctcaagagagaaattaaagcgcttgctgctatcatgtgatgtgaagtgaatgtggttgtgaagagataggcttacagaaaccgaagaaatccaactgctagtaccgttccagcgagaagacttcagccctgctttctgagtgcttggtgaacgatggaaggcctaggatgctgtttttgtttatgttgcttagagacggatattggaacgaggatataccttgtttgtacggtatcgtgctgccaaaattaatgcgttttaagcaatattttgctaggctaaccacggtttcttttaacggaacttgcctgacgtgatggagcctgctctgtctctagccagaaccccgcgtgttgtcaaggcgaactgtcatactgatcctaaatttagaagcgtcaatgttgagttatcagaacttgaaacaagacagcgtacatatactctacatggataatctcattcgagcaag

SEQ ID NO: 9692 - DNA, 2013 bp, Zea Mays
cttttccaacccccaaaccttcaactagaagagccatttcccccctaaacccaggtaaccaacaagtttctacaggacttctttagggcacccacgccgccgattctgcctggcgctactgcccctgaagcgcacatggcaaggaagacaagagtccctgaagaaggtgcaagcatggaaattccaacacgatgtcgtcgatcccatcgttcttctaacacaaccacggggaccctaccacaagaggttcttgcagccctgacgtctgccttcaacctcgatgggtcggcgaaggagaacttcgaggatgctttgcttgcgatggtagaggaaggaattgtggatctacaagatggccttggtagcctgcgcattgatgaactgcatgcgactgcgtgatccagcgacctgcgactaagggccttttcctctaattcatgttttcatcagacctcgatcctttgcctcatttgtgtgtcgaggtttcagtttgttgcatgtgctcgatgtatgttttggacatcttaagtgtggctcttttgtctgtctcgcgccagcaatgccaaaacgtgcttgtttcaatgattttgtggtttgcacgcttacagctttggcccttcgctgatagagtggcaaccttcaagtcgggcctagtggcaccagaggagggattacgctgctatggagcaccatccatgtggaactttctgattttttttgtgggtgatttccacatttctgtcaagattggttcgtctcttcggctcctccttggcttcgcaagagtggtgccgccagtagctcctccgcgctccgccgggaccgacttgccgctggccgccaggggctccctcgcccaggaccggctccgccgtccaaccgtcctatcccctccggcctccgcccagtgcgggaagcctacaacactgggtacacccttttttaaagaagggtgggcctagcgcagcggtagagcctaccgtctgtaactggaaggtcctgggttcgagccacaacctcatattatgcgggtaaggcttgacgcttaaagatacccttctccagaccccgcacagtgcgggaagcctacggcacttggtacgccctttatattgcaggtgattcatatcaaagatctgattcacataattaccaagttcagcagttttgcctctgacgatatgggttcttgggagggccaagctaggcagcttttgttggatgaggaagaagacgatgaagagtttttctttcttcttctccctgctatactttcattcctctctgaagagcaaagcgaaactggagcagctattgaaagtttcgtggaattcaagaggagcaccgcagccaaaacgctcgaagctcttgaagaaaagaagaagcatgatgaagatttctctattaaaaagtgtctagaggagttggatacaattgatgggctgacagatgaggatagatcatatgcaatggaagtctttgaatctgggttcaacagagaagtgtttatgagttcaaaaaaccacaatgttaggttgttttggctcaagagagaaattaaagcgcttgctgctatcatgtgatgtgaagtgaatgtggttgtgaagagataggcttacagaaaccgaagaaatccaactgctagtaccgttccagcgagaagacttcagccctgctttctgagtgcttggtgaacgatggaaggcctaggatgctgtttttgtttatgttgcttagagacggatattggaacgaggatataccttgtttgtacggtatcgtgctgccaaaattaatgcgttttaagcaatattttgctaggctaaccacggtttcttttaacggaacttgcctgacgtgatggagcctgctctgtctctagccagaaccccgcgtgttgtcaaggcgaactgtcatactgatcctaaatttagaagcgtcaatgttgagttatcagaacttgaaacaagacagcgtacatatactctacatggataatctcattcgagcaag

SEQ ID NO: 9693 - DNA, 6480 bp, Zea Mays
actagggttacttaacactttgtattttacgcctcgtttccccctccttccattaaaaaaaaaacacacccagacaccctccccccaactccacccgcttccttcgcttcccttcacccccactccaccaaaccctcacgtcgctgggactgggcagcgcagagcagagtagcagacagagcacagcggagcagaaggtggcgagtggaagcaaatggggaatgagtggcggcaaatgggcaatgagtggcggcggcggtagtagctagcatagcatcctcctcgccttttcttctccccgccctctcgcgctctggttgttgcagccagtgggagcgagaggactcgtgctgcctccgtcgcttctccggcacgcctccctcgcccggatctgcgccgctcgcgtgggatcctgagctccgggttggagagctctcgcgttccgggtgggaatttcgtcggtcggttgatgggtcggtgggtgttggttgcgttcaactcgtgctgatttgcgcttgcttggtgtactggttgaatgacaggtcaggtgacggtgatggagcccgcggtggctacggcgggtgaagggcagcggttcaagcggatttcgcggcaggcgtggtcggggaacctggaactggatcctttgcttaatgaaagcttagatcagtggccacatctaaatgatctggtacagtgctacaaggctgattttgtgaaggatgactgcaaatatggacgctatgagagtgttgcaccaccatctttccaaaatcaaattttcgagggacctgatacagacatagaaacagaattgcagctttgcaacgcaagacatttcaagcctgaagatcctaccgaagatgatatgccaagcacctcagggaggcaaatgtatgaaaccgaatcatctgcttcatcttcaaaagtgcactgtagtctgtcaccactgccagcatatgagcctgcatttgattgggagaatgagaggtctttgatatttggccaaagggtgccagaaagtataccagcaataagcaacagtggcttgaagataactgtcaagagatagaagagaaaaactgtcagaagacttctactttcacatacttccaacagatatgcaggatgctcagggttctttggatcgtcgaggcgttttttcattggacacaccttcaccatcagtctgccttttgattcaattggaaaaggctgctactgaagaagggggagtaacaccttctgtttattctcgtaaagagcctgtgcacttagctgagaaagagaagcaaaagctgcaagtatggtctcgaattatgccttgtaaagagtcatttgcatgggccatgattcctctgtttgaaggtaaccatgcgggtggtcttagtgatgctgcttctcctagcagtcctttagcaacaagtttaccaggatcaacttctcaagatagtattgtggaccctattttaaagcttactttagatggaaaagtaaaccattactcgagtggaagctcagttattgtagagatatcaaacctaaacaaagtgaaggaaagctatatagtggactccctccaagatccaaaacggaaagtacataaaccagtgaaaggtgtattgagattagaagtggaaaaacttcatggtggccacaatgatgtggataacacttctgaaggcggaagcatggccaatgatttgaatgatgctggtgacatcaataatggcagaagcaacagaagtagctttgatgggattcacagttttgtgaattctattgccattgcccagaaagatgctcatcacaatggaatcatttctaatgctgagaatggtgacaattttgaagcttttgactttcggatgctgacccgaagtgagccgttttcacaactttttcattgcctctatgtgtacccattgactgttagcttgagccgcaaaagaaacctgtttgttagagtggaactgagaaaggacgattctgacatccgaaagcctccattagaggctgttcatcctagggagcggaatatgatgctacagaagtggggccatacacagattgctgttggaacaagaatggcttcctaccatgatgaagttaaaatcagcctacctgctcttttgacaccccagcatcatcttgtgttcacatttttccatgtagatcttcaaatgaaacttgaagcaccaaaaccagtgatcgttgggcattctgtacttccactgtcgacacatattcagttactttcagatgtatccttgccaattttgagagagctcgttccacattacctgcagggaagtggaaaggagagaatggactatctggaagatggaaaaactgttttcaagttgcgtttaaggctctgttcttcattgttcccggttaatgaaaggataagagacttttttgttgaatatgaccgccatactctacatacaagtcccccatggggttctgagcttcttgaggccataaatagtttgaaaaacgttgaatctactgcattattacaatttctgcaaccaatacttaacatgctgcttcatcttattggcgatggcggtgagacccttcaggttgctgcgtttcgagccatggttaacattttaacccgtgtgcagcaggagtcatcagatggggctgagagaaatagattccttattaattatgttgattttgcttttgatgacttcggcggtcggcaagcacctgtgtatcctggtctgtctactgtttggggaagtcttgctaggagtaaggcgaaaggttatagagttggtcctgtgtatgatgatgtgttggcaatggcttggttttttctggagcttattgtaaaatcaatgggattggaacaaagtcgtctcttctaccacaaccttccattaggtgaagatgtcccaccgctacaattgaaagaaggtgtcttcaggtgcatcatgcagctctttgattgccttctaactgaggttcatgaacgctgtaaaaagggtttaagcttggcaaaacgcttgaacagcacgcttgctttcttttgctatgatcttttatcaataattgagcctcgccaagtttttgagctggtttcgttgtacatggacaagtttgcaggagtttgtcaagcagtccttcatgactgcaaattgacattcctgcagataatatgcgaccatgatctattcgttgagatgcctgggcgggatccctctgatagaaactatctctcgtcagttcttattcaagagatctttctgaccttagaccatgatgatttgtctcaacgagcgaaggctgctcggattctggttgtccttatatgcaaacatgaatttgatgcacgctatcaaaaaagtgaagacaagctgtacattgctcagctgtacttctctcttatagggcagatccttgatgagatgcctgttttctataatctgaatgccatcgaaaagcgtgaagtgctagttgtcattttgcaaattgtaaggaacttggatgatgcaactcttatcaaagcatggcaacaaagcattgctagaaccagattgttcttcaagcttcttgaagaatgtataacccattttgagcacaacaaaacaggaggcagcatgctacttggtgctagttctcggagcccagatgttgagcgccctgcacccccaaagtactctgagcgattatccccatcagtcaatgcatatttgtcggaggcttcaaggcatgaaataaggcctcagggaacaccagaaaatgggtacatgtggaacagggttagccctcaattaagttcccctaatcaaccctattcattgagggaagcacttgctcaagcacaatcttcaagaattgggtcaaccgccagggcattgagagagtctctgcatccagtactgagacaaaaattggaactttgggaagaaaatctcagtactgctgtgagcctcgaagtgttgagaataaccgagaagttttcagctgctgcaggcactagaagcatcactactgattatgcgaagctagattgtgtaacatctatcgtaatgggtcttttatctaggagccaacccttggcattttggaaggctttccttcctgtggtctacaacatatttaatcttcatggtgcaacactaatggcaagggagaatgaccgcttcttgaagcaaattgcttttcatcttttgcggcttgctgtttttcgaaatgattctattaggaaaagagctgttgttgggttgcagattctcgttaggaacgcattcaactatttcaagaacactacaaggttgagagtcatgttgacaattactttgtcagagttgttgtctgatgtgcaagtgactcaaatgaaatccgatggttctcttgaagaaagtggtgaagctcggcgccttagaaaatcactggaggaaatggctgatgtaagaagcaaggatctgttgaaagattgtggcctccctgttactgcattggaggcggcccctgatggttcctctgataatatgtggtcttgggcagaggtgaaacatctctctaaatgtctagtccaggcccttgatgctggtctggaacacgccctcttggattctgtagtgactgtagacaggtatgcagctgctgagggtttctataaactagctatggcctatgcgcccgttccagatcttcacattatgtggttgcagcatttgtgtgatgcacaccaggagatgcaatcatgggctgaagcagcacaatgtgcagttgctgcagctggcgtgatcatgcaggcacttgttggaaggaatgatgctgtgtggagcaaggagcatgttacttcgctacacaagatttgccctatcgtcaacactgatgtgagtgcagaagcatctgcagctgaagttgagggatatggtgcatccaaattaacagtggactcagcggttaaatatcttcaacttgccaataaactcttcacacaagctgaactttatcatttttgtgcaagcattcaggaactcataattcctgtgtataaaagcagaagggcttatggacagctggccaaatgtcatacatcactcacaaacatctatgagtcaattcttgaacaggaggcaagtcctataccattcattgatgccacatactaccgagttggtttctatggtgagcgtttcggcaagctcaataaaaaggagtatgtatttagagaaccacgagatgtacgtcttggtgatattatggagaagcttagtcatatatatgaggttaaaatggatgggagtcacactttacatataattccagattctagacaagtcaatgctgatgagttgcagcctggcgtctgctatttacagatcactgctgttgatcctgtaatggaggatgaggacttgggtagcaggagggaaaggattttttctttatctactggtactgtacgtgcacgtgtttttgaccgttttcttttcgatacaccattcacaaaaaatggaaaaacacaaggtggtctagaagaccagtggaagaggcgtactgtgctccagacagagggttcctttcctgctttggtgaaccgtctgccagtcaccaaatctgaatctctggagttctctcctgtcgagaatgcgattggaatgatcgaaacaagaacagctgcattgagaaatgaactagaagaaccacggagttctgaaggtgatcaactcccaaggcttcaaagcttgcaaaggatactccaaggaagtgtggctgtgcaggtcaacagtggggtattaagtgtgtgcactgcattcttatctggcgagccagcaactaggctcagatcccaagaactgcagcagctcatcgccgcattgcttgaattcatggctgtctgcaagcgtgcaatccgtgtgcatttcagattgataggggaagaagaccaggaattccacacccaacttgtcaatgggttccagtcactcaccgctgagctatctcattatatccctgctatactctccgagctatgatagaactgtaacaagccagaaattaggtagcatgtgaatgattcattctttcagttgcaggttcccaccaaatgtccatatttccattagttttggttgtatagttgcaccgattcctgattttggagtgtaaagtttgtataacctagtgttatctgttatgcaccagttatatgctgagtgccatgttttttgcggtttgctactgtatcacagcgagccgacattttacaacagttatatgtaatgttctgtagtgatacaatagtgcctattctgggtgatatgtatttttttccctgtaggaaatttgctgctgtcgagggcatcctcgcaatttgtttatgcacgatttgaagccttgtgttattgaagtcgttcccataactgtagtttgtttattgttcctagtgtataatgacgccttaaattgctcatgttccatggttgaacaagatttggaacatttcaa

SEQ ID NO: 9694 - DNA, 537 bp, Zea Mays
accgtctctcacacgctctcatcccttccacgctgccgccgccaaactcagactcgcaagcgggagctccgtctctgccagaaactcgccaccaccgcggcggccacggctccactcgcttcctcgcccaccacctccgcggacaccgagcggaggaagcacgaactgctgcgcgcggttcaggaaatgcggcacggattcgcagcgcgtggggcccgaccaacgcgctgccatcgaggaggccgtcgtggcggtggaggagcgtggtgcggggaagggaacgacgatagatctcgcggcgctcgatggcacctggaggctgtgttacacatcggcatcagacgtgcttgtgctgttcgaggcggctgagaggcttccactcctgcaggtgggccaaatataccagaaatttgagtgcaaagatcgatcagatggtggaattgtgaggaatgttgtaaggtggagcatcgagaacttgctggagcacaactgctggtacttaaatgcatggaccttggaatatataaagagtatgac

SEQ ID NO: 9695 - DNA, 886 bp, Zea Mays
gtcagaaaacgaaggaagagagggtcggcgagaaggaagatgaaatcggagggcagaaggaagatgacagggtaggttccctagcattgacaaaccatgatagagaaggaaataatcaagatcaagatcaaaaagcaccaattgatgaccattcaagcagaggaactcatacgggcaaagctattatagaagaatccagacctaactgcgttgatgatcataagacccatagacctatgtctcctggaacactagcactgatgtgtgatgaagaagcatttgagaaaatgtgtgacgaacaagatacaatgtttacgacttctcaaaatgctgctcctcagcagacagtaattgtcaaccataaccaatctgcactgtatgcagaacaagaaaacgttgtgctgacagaattccgggattgcctccgcaagtttgtgagatacggaagaatgaaagaggaaaggtactccatggcaatcaaatctgaaacatctggtcatcctggacagatttttacttggggtgttgcaaggatcaagggaatagtattttcaccctattaacatgttgatcagatacatgtatcagtcttgatagataatttagatgttagagaattccaattttttctcattggtcagaataagtgtaatgctggaatctggatagttagtttagtaataaatgccaaccttgtaatattttcttcattgtattttctctcttttcttttcccattttccacccacctggttcgagccaagatgtagcttggtgggtgcttatttgaaaataaagaagtcaaaaggaagaaaagggcaatactgcagagatgagcccagctgtcattgttgcactggtgttatttttaactcgcagatcgttg

SEQ ID NO: 9696 - DNA, 1822 bp, Zea Mays
agctcgtttccccctatgttttcccttacccaccccccaatggctgaagccggcggcccgaattcatgttcaccaatggctatggcagcgctcgaactacagaagatactggagacagaggacactcacgatcacggctcacctaggcggttcggcggacggcgattggcggggcggctcggtctggagctgaagccttggatggaggggtcacaccggtggccgcctcttgtgggccttatgggtggtgttgggccttctaagtatacaagtgtatacaggctcggtgagaagctgcgaagcctgcgagcccgaccgcgaccgagcagatcgttccgtcgtgcattcgtgcttcggttcttcccgtgctcgtcttcttggccgggacgaaagaaaagggggactttggctgtcgatggcagcggcgttggagttcctggaggcgcagggcgcgacccagccggagctcgcggaatggtacgcggcgctcgccgacctgtaccagcgaaagctatggcaccagctcaccctcaagctggagcagttcctcgccctcgccgtcgtccaggcgatgctctgattcatctttataatcatttcatctctgattttgagacaaagatcagtcttcttaaatttgctcacttcacagtcgtagtttcacaccagtatttggacaagaatgctggtataaattatcttgaaggcgtaatttcaaaactacgtgatacccgtgaatcgcgggttgaagagcccattctgtatgtaaagatgcagattgcaacatttcttcttgagaaagggaatcaaaaggattgtaagaatctgctagaagaaggcaaaaccactttggacagcatggttgatgttgatccttctgtacatggtacctattactgggtgtgttcacagtatcataaggcccgtcaagaatactcagaattctacaaaagctgtcttctttaccttgcgtacacgacagtgagcttgttgttacagtttttgataaacctggcacttgacctctcacttgctgctttattgggtgaaaacatttacaactttggggaactacttgcccatccgattatccatagccttttgggaactcaggctgagtggatatttcatatgttgcaagctttcaactctgggaatctatccttgtatcaagaaatctgcaaagctcatagcaacgctttgagtgcacagcttgcattggtacaaaatgagaggaatctacttgaaaagatcaacatgctttgcttgatggaaatcattttcagtcgatcatctgaaaaccgcacgatcccaatgcgggatatagcagaacagaccaagctccctgttgaagatgtggagtatctattaatgaagagcctctctgctcgtctaatagaaggcataattgatcaggttgatggagttgtccatgtttcacgggttaaaccaagggtgttgggcatagaccaagtgaaatgcttgcatgaccggttggatacatggattgggaaggtcgatacgatcttgctttctgttgaagcggagacgccagacttggtgtcttcgtgatgttctgctcctctcgaaggatcactgtgacataatctgatgtgaacgaagtcgttagatatttatcgtgttgtcagcctgtaatcattggtgtaaacccctgtaacgattgtggtaacactgtaacctcgttgctgcagttttagtagtgtacattcttgaggaatcgttgtttcaaacaattgttcagctgactctcagctcaagatgtgtatcctcaaatatgccctcagctcccaagagatcggct

SEQ ID NO: 9697 - DNA, 2324 bp, Zea Mays
atggctgaagccggcggcccgaattcatgttcaccaatggctatggcagcgctcgaactacagaagatactggagacagaggacactcacgatcacggctcacctaggcggttcggcggacggcgattggcggggcggctcggtctggagctgaagccttggatggaggggtcacaccggtggccgcctcttgtgggccttatgggtggtgttgggccttctaagtatacaagtgtatacaggctcggtgagaagctgcgaagcctgcgagcccgaccgcgaccgagcagatcgttccgtcgtgcattcgtgcttcggttcttcccgtgctcgtcttcttggccgggacgaaagaaaagggggactttggctgtcgatggcagcggcgttggagttcctggaggcgcagggcgcgacccagccggagctcgcggaatggtacgcggcgctcgccgacctgtaccagcgaaagctatggcaccagctcaccctgggctgatttggtgattagggatccctaggggatccatgggggaggaattcccttgcaattcaattttgaatagcaaaaggatttcttccgcttgggatccccggtcaccaaaccagccctcaagctggagcagttcctcgccctcgccgtcgtccaggcaggcgatgctctgattcatctttataatcatttcatctctgattttgagacaaagatcagtcttcttaaatttgctcacttcacagtcgtagtttcacaccagtatttggacaagaatgctggtataaattatcttgaaggcgtaatttcaaaactacgtgatacccgtgaatcgcgggttgaagagcccattctgtatgtaaagatgcagattgcaacatttcttcttgagaaagggaatcaaaaggattgtaagaatctgctagaagaaggcaaaaccactttggacagcatggttgatgttgatccttctgtacatggtacctattactgggtgtgttcacagtatcataaggcccgtcaagaatactcagaattctacaaaagctgtcttctttaccttgcgtacacgacagtgagcttgttgttacagtttttgataggatttgtatgagtttcagaacctggcacttgacctctcacttgctgctttattgggtgaaaacatttacaactttggggaactacttgcccatccgattgtaagtacaagttttgcactcttttgtgctgtcttctttagaactgagttgtacacaagtccttgattctgaattgttttgacatggacttcagttttgtccatacagaagattttagaatgcgattgctgtaatcaaatgcaaacttgctaagctgaatcgatgggtttttcttacatatggcatacgaatcattaatttcactcaacatgaaaatacagcctaataaacaaactttgctgtattcatgaaccaaactcgtggccatacctaacagcttgcatagtctaatttatcttccctatataatgcaagcaaagctggaaccgatgtcatgaatactggtgttgccttgagaaaaaatcatcaactgaattccgttgttgataccatgtagatccatagccttttgggaactcaggctgagtggatatttcatatgttgcaagctttcaactctgggaatctatccttgtatcaagaaatctgcaaagctcatagcaacgctttgagtgcacagcttgcattggtacaaaatgagaggaatctacttgaaaagatcaacatgctttgcttgatggaaatcattttcagtcgatcatctgaaaaccgcacgatcccaatgcgggatatagcagaacagaccaagctccctgttgaagatgtggagtatctattaatgaagagcctctctgctcgtctaatagaaggcataattgatcaggttgatggagttgtccatgtttcacgggttaaaccaagggtgttgggcatagaccaagtgaaatgcttgcatgaccggttggatacatggattgggaaggtcgatacgatcttgctttctgttgaagcggagacgccagacttggtgtcttcgtgatgttctgctcctctcgaaggatcactgtgacataatctgatgtgaacgaagtcgttagatatttatcgtgttgtcagcctgtaatcattggtgtaaacccctgtaacgattgtggtaacactgtaacctcgttgctgcagttttagtagtgtacattcttgaggaatcgttgtttcaaacaattgttcagctgactctcagctcaagatgtgtatcctcaaatatgccctcagctcccaagagatcggct

SEQ ID NO: 9698 - DNA, 1889 bp, Zea Mays
aacccatgcacatgtcttaacatgtttggcttccgagcaaactttctccagaccccccaagaaaatgtaagatccgatcagatatgtgtcgatgctcatcccagcgtactcccattgcaacgcacgagcacacaactagttaactataaactctataaatgtaagctactttcgcagtagctttacggatcctgtaattacattattttatggactgagggagggaggagaggatcaataagccacgcgggccccaccatatcttcatccacaaagccaccaccaagctttttcatggtcgtcgctttccgctttcctttgctgctgaccatatatctacggtagcaagacaagacaaggaagtcggctgatccatggcggccttcacggtgcacacgagcgccgccacctcgccctactcgccggcgggcacggccatccttctccgaagccggagtcgagcctaccccaccgccaccatccgcgtgtcgtgctcgaagacggtggtgatcggggtggcggcggactcagggtgcgggaagaccacgttcacgcggcgcctggcgagcgtgttgggcggcggggcggagccaccgagggccggccggaacccgggctccaacacgctcgtcagcgacaccaccacggtgatctgcctggacgactaccactcgctggacagggtcgggcggaaggcgaagggcgtcacggcgctggatccgaggttcgtcgacttcgacctcatgtacgagcaggtgagggccatcaaggagggccgcgccgtcgagaaacccgtctacaaccacgtcaccggcctcctcgacccgcccgagctcatcaccccgccgaacatcctcgtcatcaaggggctgcacccaatgttcgacgagcgcgtgagggacctgctagatttcagcatctacctggacatcagcaacgagagagacatgggagagcgtggtgggcacagccttgagagcatcaaggcctccatcgaggcaaggaagcccgacttcgaagcttacattgagccgcagaagcagtacgcggacgccgtgatcgaggtcctgccgacgcagctgatcccgggcgacgacgagtgcaaggtggtgcgcgtgaagctgatcatgaaggaaggcgtggagcacttcgcccccgtgcacctcttcgacgaaggatccaccgtctactggatcccctgcggccggaagctctcctgctcctaccctggcatcaggttcgcctacggcttcgacacctacttcggacacgaggtgtcggtggtggagatggacgggcagttcgacaagctggacgagctcatctacgtggagacccacctgagcaacctgtcaaccaagttctacggggaggtgacgcagcagatgctcaggcacgccgacgtccccggcagcaacaacggcacggggctcttccagaccatcgtcgggctcaagatcagggacctctacgagcagatcgtcgcacgtcgctgaccatgacggccaaccctagcaaggtctcgtttttttgtcccatacaaacaatcaaacgcagaccgatacttgatcaatacatgtgcagagcctatttctgctcccacgggcaaccaaacacatcgattgtgttcgtgcgcatcagcacgggtgtagaatggataggcgtgtgtgtagttgtgtacaggctacacgcgtgtccggtccgatctttttgacagattcgtgcaatgtcgcgtgagttggtgtggatgtcggtacgtgggcattcttcttgcaaatgtccaggtcacactagatggagctgtctgtgttcaggaattctctgagagccgatctcttgggagctgagggcatatttgaggatacacatcttgagctgagagtcagctg

SEQ ID NO: 9699 - DNA, 1970 bp, Zea Mays
aacccatgcacatgtcttaacatgtttggcttccgagcaaactttctccagaccccccaagaaaatgtaagatccgatcagatatgtgtcgatgctcatcccagcgtactcccattgcaacgcacgagcacacaactagttaactataaactctataaatgtaagctactttcgcagtagctttacggatcctgtaattacattattttatggactgagggagggaggagaggatcaataagccacgcgggccccaccatatcttcatccacaaagccaccaccaagctttttcatggtcgtcgctttccgctttcctttgctgctgaccatatatctacggtagcaagacaagacaaggaagtcggctgatccatggcggccttcacggtgcacacgagcgccgccacctcgccctactcgccggcgggcacggccatccttctccgaagccggagtcgagcctaccccaccgccaccatccgcgtgtcgtgctcgaagacggtggtgatcggggtggcggcggactcagggtgcgggaagaccacgttcacgcggcgcctggcgagcgtgttgggcggcggggcggagccaccgagggccggccggaacccgggctccaacacgctcgtcagcgacaccaccacggtgatctgcctggacgactaccactcgctggacagggtcgggcggaaggcgaagggcgtcacggcgctggatccgaggttcgtcgacttcgacctcatgtacgagcaggtgagggccatcaaggagggccgcgccgtcgagaaacccgtctacaaccacgtcaccggcctcctcgacccgcccgagctcatcaccccgccgaacatcctcgtcatcaaggggctgcacccaatgttcgacgagcgcgtgagggacctgctagatttcagcatctacctggacatcagcaacgaggtgaagcttgcatggaaaatccagagagacatgggagagcgtggtgggcacagccttgagagcatcaaggcctccatcgaggcaaggaagcccgacttcgaagcttacattggtgaaagcctgccggcaaccttgcatttgcacgccgaaaattcgcaagtcaaagtgcagagctgagtgctcctcttcttcctgctgctgtgcagagccgcagaagcagtacgcggacgccgtgatcgaggtcctgccgacgcagctgatcccgggcgacgacgagtgcaaggtggtgcgcgtgaagctgatcatgaaggaaggcgtggagcacttcgcccccgtgcacctcttcgacgaaggatccaccgtctactggatcccctgcggccggaagctctcctgctcctaccctggcatcaggtgtcggtggtggagatggacgggcagttcgacaagctggacgagctcatctacgtggagacccacctgagcaacctgtcaaccaagttctacggggaggtgacgcagcagatgctcaggcacgccgacgtccccggcagcaacaacggcacggggctcttccagaccatcgtcgggctcaagatcagggacctctacgagcagatcgtcgcacgtcgctgaccatgacggccaaccctagcaaggtctcgtttttttgtcccatacaaacaatcaaacgcagaccgatacttgatcaatacatgtgcagagcctatttctgctcccacgggcaaccaaacacatcgattgtgttcgtgcgcatcagcacgggtgtagaatggataggcgtgtgtgtagttgtgtacaggctacacgcgtgtccggtccgatctttttgacagattcgtgcaatgtcgcgtgagttggtgtggatgtcggtacgtgggcattcttcttgcaaatgtccaggtcacactagatggagctgtctgtgttcaggaattctctgagagccgatctcttgggagctgagggcatatttgaggatacacatcttgagctgagagtcagctg

SEQ ID NO: 9700 - DNA, 1869 bp, Zea Mays
tccaatttcggtggcatgattggtggtcatgatgatgataggaatttactagacctctccggaatataaagtaatcagccatatagtatgtggtcctggagttcatagttttgctacttttctggcgtgacgatgtggcggaggcgatgacagggcctaaaacggattggtcgtcctgctctgtgtcggaagttatgtgaattttctgcctcctagcgctagacagatgaactccttgccattgctttctactgttgtttgtttattttaatgcagcaacagagcctatgaagaagccctattttctgctgctgtttgccaactccaagtagatcgcccactgaagaagctcaccctcctcgctatagaagaaccgtgaaattttgtttcgttgccatagtggaaattgcagctgcaatgcgtgagggatggttgtcgggtgtgttttcctgactatatatgccttgagatatttccctgaggaggcaatagatccagatgtgttattgtcacttgccttctcatttaaggtgattcatgcaagtgctcacctcccgaagatatgaagaaagtaagaaaacaaatcgtcgatcacatttacccgtggatattagaatgccaagagaaaggacatgccaaagtgccatcattgggaagcaaatggatgtttaggactgcataccagttaggttcagactctgtaaacaaaggccaataccctatcagcacaactcacactgctccaggtatatgcacaatgttaccagtgaagtataatttcagacaggcattgccagaaatagctcaaaagattacacggttggagaatgagataccttgcttgattcttctggcgagacttgcacattttcttttacatactgatcttgctgaacatcacaaattggggcttgatatatctgaactggagaagaaaatcatttatgagatgatgagaccagagaggactttgttgtatttggttcctggaaggctggttagggtgagggatggttcaacagactggggatggggtgtggtgtggttgtaaatctatactactccttaacaagctaaggagggcgtccacaactccgtgcccccgcccccgtctctcgctcgcgacctcccgcacgacgcgccagggcaatctggactttgctacatactggtttttacatgcacaataaagctagctggtatcacatttactggtgatcctgctaagaataagaaagatctatttggtgctattgcaatggtattgagagttgtaggaggcaagaattcacaattatctttgcctacacgctattctctgaacacaatatttacgagcttgataggtctattttggaatacgaattatgagtttggcaagaagaggaagcatgctagaatcattgacaagaagattgccaagaagaagtctgaggctgtcgagtaccaaaagcttcttcctataggctgaaggaatagagatcaccacaatgagagcttggccaagagaagatccaagctttctacctctgccaaggcttcctctggcacctccgcttaagaatgtcttaagaatgttcagtgcttttgagatgttttcaagacctatcttgttacagcttaagtaccttatgctgctctagctgtgttgcaactgtccctatacttgacagatttgcattagatgcttaggctatagagggtaggatcctaattgtgaccatgtactaaattatatatctgttgctaagttacagtacagacaaaataaatttagcctggccaacttgtagaaaacgactaacttgtagaaaaacgtgttattgtaactaagaatatctaaattgctcctatgttactttctatatt

SEQ ID NO: 9701 - DNA, 2421 bp, Zea Mays
atggggaaaaaagaggcagactcgagttgccgtcgtcttcgctggcccttgcctatcgtccgttcgcattcatctcattcaactggtaaaattaggagcactccctcacacgctacacagcgacctggccaacatgctagccggtggctcatcgtatctggcgactctgggccactggagcttctccaaccacagtctcaactctcaagaagctcccagccgccgctccctctcccccatcctcctaccacgacgatggatcctgctaccgtcgtcgtcatcgaggagtcataccggtcctactattgcatgcgcaacagagcctatgaagaagccctattttctgctgctgtttgccaactccaagtagatcgcccactgaagaagctcaccctcctcgctatagaaggtgattcatgcaagtgctcacctcccgaagatatgaagaaagtaagaaaacaaatcgtcgatcacatttacccgtggatattagaatgccaagagaaaggacatgccaaagtgccatcattgggaagcaaatggatgtttaggactgcataccagttaggttcagactctgtaaacaaaggccaataccctatcagcacaactcacactgctccaggtatatgcacaatgttaccagtgaagtataatttcagacaggcattgccagaaatagctcaaaagattacacggttggagaatgagataccttgcttgattcttctggcgagaaaatcatttatgagatgatgagaccagagaggactttgttgtatttggttcctggaaggctggttagggtgagggatggttcaacagactggggatggggtgtggtgtggttgtaaatctatactactccttaacaagctaaggagggcgtccacaactccgtgcccccgcccccgtctctcgctcgcgacctcccgcacgacgcgccagggcaatctggactttgctacatactggtttttacatgcacaataaagctagctggtatcacatttactggtgatcctgctaagaataagaaagatctatttggtgctattgcaatggtattgagagttgtaggaggcaagaattcacaattatctttgcctacacgctattctctgaacacaatatttacgagcttgataggtctattttggaatacgaattatgagtttggtaggtaaataatttatacaatgattcttggacctttgaccctttctgcttcaaggattaatgtgtgactgtgtttagccttcaatccaagcgacatgccactaatctcaaaaatgcttctatgcaatatttacttgacaatttatatctctgctgttccttagagatattttcatgtaatatgttacaaggttgttcatgtgagatttttggtcataaattatattatatatgaagataatgggagtcagccctaaattcatattatctgcaatctgcagtttcttgaaaaaaatgtttgatctacatcagaattttcccaaaatatctaacagacttgttttcttcaggccaggaacccagggtctacacatcttataactgaaaaacacataagcagtatgcggttcacacttttttcttgtttgcattttataaaccattagacccttgtaacaaaaagcagattgtttagatgttatgctctcttatatggagattctcaagtatcttagaatcagttatgtgttggataaatgtcttggttatttactcttctattagtgctctaggcttgttctgtgttggataaatgtcttggttatttactcttctatcctcaagtatcttaggaataggattcatgacaatgagccattgatttctgaagttttccaagctaacctatttgctttgtaggcaagaaggtgagcaaggcatctaagatccagtggcttgtgaacccttgacccttcagaggaagcatgctagaatcattgacaagaagattgccaagaagaagtctgaggctgtcgagtaccaaaagcttcttcctataggctgaaggaatagagatcaccacaatgagagcttggccaagagaagatccaagctttctacctctgccaaggcttcctctggcacctccgcttaagaatgtcttaagaatgttcagtgcttttgagatgttttcaagacctatcttgttacagcttaagtaccttatgctgctctagctgtgttgcaactgtccctatacttgacagatttgcattagatgcttaggctatagagggtaggatcctaattgtgaccatgtactaaattatatatctgttgctaagttacagtacagacaaaataaatttagcctggccaacttgtagaaaacgactaacttgtagaaaaacgtgttattgtaactaagaatatctaaattgctcctatgttactttctatatt

SEQ ID NO: 9702 - DNA, 3447 bp, Zea Mays
atggggaaaaaagaggcagactcgagttgccgtcgtcttcgctggcccttgcctatcgtccgttcgcattcatctcattcaactggtaaaattaggagcactccctcacacgctacacagcgacctggccaacatgctagccggtggctcatcgtatctggcgactctgggccactggagcttctccaaccacagtctcaactctcaagaagctcccagccgccgctccctctcccccatcctcctaccacgacgatggatcctgctaccgtcgtcgtcatcgaggagtcataccggtcctactattgcatgcgcggtgtaaggaactccaagcagtgtacggaagacaacagggcgaaagctaaattgcagaaaagaaaaggaggacatttgactgttgaacgatggtcgaaggttccaatttcggtggcatgattggtggtcatgatgatgataggaatttactagacctctccggaatataaagtaatcagccatatagtatgtggtcctggagttcatagttttgctacttttctggcgtgacgatgtggcggaggcgatgacagggcctaaaacggattggtcgtcctgctctgtgtcggaagttatgtgaattttctgcctcctagcgctagacagatgaactccttgccattgctttctactgttgtttgtttattttaatgcagcaacagagcctatgaagaagccctattttctgctgctgtttgccaactccaagtagatcgcccactgaagaagctcaccctcctcgctatagaaggtgattcatgcaagtgctcacctcccgaagatatgaagaaagtaagaaaacaaatcgtcgatcacatttacccgtggatattagaatgccaagagaaaggacatgccaaagtgccatcattgggaagcaaatggatgtttaggacggacactggggctttgaagtagttggtggctgcgactgcgaggccgagacgggttagattgagagaggtgggcagatggcgacactgtcgtcgtcgctttgctccagctttgcctccctgcggaccgcctccatcggccaccctcgcgtcatcatgtcatctacgcccaggaactcaagtgacattcagagatgagagattgcctggatttctagcaagattcatgcaacgtcgggaggtgggaaaatatttttttgtcaacctaaaagtatgcttcttattaccaactaggactgcataccagttaggttcagactctgtaaacaaaggccaataccctatcagcacaactcacactgctccaggtatatgcacaatgttaccagtgaagtataatttcagacaggtatatgcacaacgtggcacctgatagttcaaagaccatcacggaaaaaatcatcttgcgggaaatcagttcatttgcaattcatcaattatacatggttgttcggatctgatagcaatgattaatgataattgatttcccagatggcacatatctattctttagaaactggaagttaattgtacattaatggcagagacaatgtcagtacaggtccaaaggtccaagaacaccatgagttagctctaccaatttctttcagtgtcacatgtttcgcaatatttgttttgttgtttgtgtattggctaagttactacttaatacagatggtgctttcttttacttcagctggtaattatctaagcctatgtagtattaacaccttacacgttaaatatacatgatttgactttttattgtataccaagatctataatttgaattgggtcatgtgaagcattttgcatttcatgatctgcaaagtgcaacatacaattataattccaataatatattaggtcaagtaggttttagcattgtgtataaaggttgtttgaaaaatggagctttagtgatagtaaagagattaaaagatcttgatgttaccagtgaagtataatttcagacagaaattgagttgattggccttgtcgtgcacagggtgtttataaggattttgcatgacctctaaagaacggttgcttgtatatccatatatgccaaatggtagtgttgctgaccgcttgagatgtaactcaattgtctacaacattgtttgttagttaagtctataattggcattctgcacaagtttgcattccttgtcaatattttgtgatctacaaagtgcaacaaacaattttaattccaagaatatattaagtaaaggaggttttggcattgtgtataaaggttgtttgagaaatggcttgtgtttcatatccttgatattatgaatttacataatacaatctaatctgaaagatagttttttcaggctcaagcgatagcgtgcgtgcatgagacttagatggcggcttcggaggcggcaacgacaatgttaaaaatagtttttctcacaaaattaaaataactatcttgcttttcaggcattgccagaaatagctcaaaagattacacggttggagaatgagataccttgcttgattcttctggcgaggtgtggtaatcttaattattgtattcagtattgttcttatgtgaatttatcatcctcctccctaatattagacttgcacattttcttttacatactgatcttgctgaacatcacaaattggggcttgatatatctgaactggagaagaaaatcatttatgagatgatgagaccagagaggactttgttgtatttggttcctggaaggctggttagggtgagggatggttcaacagactggggatggggtgtgctagctggtatcacatttactggtgatcctgctaagaataagaaagatctatttggtgctattgcaatggtattgagagttgtaggaggcaagaattcacaattatctttgcctacacgctattctctgaacacaatatttacgagcttgataggtctattttggaatacgaattatgagtttggcaagaagaggaagcatgctagaatcattgacaagaagattgccaagaagaagtctgaggctgtcgagtaccaaaagcttcttcctataggctgaaggaatagagatcaccacaatgagagcttggccaagagaagatccaagctttctacctctgccaaggcttcctctggcacctccgcttaagaatgtcttaagaatgttcagtgcttttgagatgttttcaagacctatcttgttacagcttaagtaccttatgctgctctagctgtgttgcaactgtccctatacttgacagatttgcattagatgcttaggctatagagggtaggatcctaattgtgaccatgtactaaattatatatctgttgctaagttacagtacagacaaaataaatttagcctggccaacttgtagaaaacgactaacttgtagaaaaacgtgttattgtaactaagaatatctaaattgctcctatgttactttctatatt

SEQ ID NO: 9703 - DNA, 2112 bp, Zea Mays
ggcccgatcgcggtactcgggtcgggccgtcctccgagagtcccagtctcccacggtcccacactcccacccccggagcgctccactgactccgccgtgcctttctcttctctccttccctcggcctccgcctccgcctccggccccgcctcgtctctcctcccccattttaaatttcaaacccctcccacctgcttcatcctcttcccctaaaacctcctcctcagtcctctctcctgctgccacgaggtacggcccagctcttcctcaaagcgggcgaaatccacgccgcgcggcggcggcggcagaggaggaggggggatgatggggtgcctcttcgcctgcttccgcgcgtccggcggcgatggcgaggtgaagggcaccggcggccagctcgcgcatccgtcccagccccccgcgacgacgacgacgaccagccaccaggatggcgcgggcaggagggccaggccgccgtcgaggaacgcgctctccgccgtgttccagcgagaagatgagggatcaaggacggcgcaagtggcgagctcgtgggcggacgagagtggcgagaggaaggagatggatcaggagcttgtgcatcaggccattatccaaagaagctgtggtgcgttgctgcaaactacaaataacattcaaggagcgctcatcaaatatgctgattcagttcatcagaaggaaacacattcaggatgtcttcctgttgtgtctgatgatctacatttcatggaagcgccgaaggttgagaaatgtgaaactccttcaaggtctcatcagagtttcactgttccagatgcaacgagttcttcaaaaacaaacgatgagttgcagacttccgctacttcccttgcaaataatgtgaaagattcgatgaatgagaacaacatggaggcacttgtgcaggatgaagagcaacaccaagctctggatcttgaagaatgtggggtctcaaaagaagaatcctttcaccctgaaaaaacagaggaaccaaagtgcgcaaagaatcaccatgtggtctccatggaaatttcaatatctgatgaatgctcccttttccagagctctgagggttctgtaccatcttcttacaagataagagagagcatgaacacaacatctgtggagaagtccccgaaaactgaggcaactatccatgccaccagaaagaagttaccgaagagcgataattcagaactggagctcccaagcttagcccaatggttgaagcccccaaatcctaagaagacattcagagatgaggccatggcaggagacaggtctcattcgggtaagagttcagatgaggataggcctattattggaatggttgcagcacattggaaagataaggtgccactgccagcaaattttacctctaaattgcgggatggaaatggcattcccaattcaacaaataagtacaaagaagaccaaaaggtgagttggcatgcaacgccatttgaggagaggctcgagaaggctttatccgaagagaagttgctgtctgaaaggagctgttcgagtggaaagacgtctcagtttttaggagtggaaggcgaggagagtgacatggccgaatctaaccgtctgtacaccactgcttatgcatgccaattcagttctgctagccatgagccacagaagctttcagtataatggttctctggccatcaccttcctgattgatggcatttgcacagccctgtttcccctctgtccttttagtaggtagtatctggatgtgatgtttcagcttgtgcttaactcaatcagttaagatataatattactgctgccactagtccacagatattgttgttagcttctattgttctgttttgcttgcgctgctacctacctacctgactgataggcatgcttcattctgcaattctacttgtcctgcgcagcacattaatcccttaccctggtatctgttattttattggattcctgactgacaggcacgtttccagtttacctcgacaagtcgcaaacaaactaaaacaacctacgcctggcggaaaatactatgacttgggagtcgcccttgaaaataataccctttcgcccttgtcttgggatcgattcccgtag

SEQ ID NO: 9704 - DNA, 4294 bp, Zea Mays
gtcggatccccacggggcaagcccctctgccggccctcctccgcatcccactctcgccggccgccgcagccaaggcaagaggacgcctccccacacccgatctcccctcccacctccgatcgctacgaaaagcccacgcccgcctcgtccctccggccctcccctccgcacgcctcgcttgccgcgctatttcaaatcccgctcgaaccctagtaactacctaccccgcatggtcgatcgtgccgccgcgcgggcacaggcggtgagctccgacccgccgccgcctgcactgctggagcccgacccgcggctcagccagcccggggccgctgatgggcaagaggtcgcttcggcgggtgcgaccgcgggtccgccttccctgccccaggccagcgacgctgaggaagacgctcttgcctcgccagcggggcagccgggcgagcggtgcagagcgatgatggaggtggtggccaaagacggggcgtggaaggtgaccaagctggtggtggagcactgccacgagctgcaggtcgcccccggacatgtcgcggtgaccgtgccagcgttggggatggaattcgactccgtagacgacgccaaggggttctactatggctacggcgagcaggtgggcttcaaggcgcgcatgggctccaaccgccgctcagtgggcgacggcgagaagatcctgcagcggttcctctgctggaaaggcaattacgcgaataggagtagatgtaaggattcggatgcagggaaggaaaccgatgaggtgctggagggtttgtctgctgctgcggggaagaggaagagggaaccttataagacaaggagccgcaatcctggtaggagtacagaggtgattgaagtggagaaaggtgttgggttgggtggtgctgggaatgggctagagctggataatgggaggcgttccaggaggggtaggagtaaaaaggctgaggtagagcatggtgaggattctgttgttgggttcgaggcggaggaggtggctaaagctgtttctgatgctgacgaggaagaggatgaaggggacgaggatcaggaagcagcggaacaggaggtcgaggtggaagtgaaggaacagagagcgagagggaggccgaggaaggctgttatggaagacaatgcccttcaggcacgcgtcttgagggagcttggtgtgagggcattgcagtacaataacgaggagagaaagaagatactcaataagtaccgctctaaacggcagagcagatcagtgtcgagcaggcctaccaagatatcttcaagacaagctttggctgaaaggcgtaagcgtggcaatggaggtagatttctgtcaagtgaagaacagccgctgccttcagaaaggcgttccaaacgtcttaagaagcaaaatctcaaaatgcagaaggctgagagcaaagaagacgaaacaatggaagcagaaccagatccagaaattgatgtagtccctggacctgggggagaaccaaagggttcagtgtccgaaaaggctggttggacaaaacagcaaagaatgttacaaaatctcgagcatatgtttgttccaaggagggatttcgtccaagaagtgcttctatcgaatcaaagaaaccaagcctagaagcaagaactggttgccaggcacacatgactattaagattacagcaagcacaaaatatgtagtgactgagtttgtggccgatcataatcatgatcttgaaactcccttggttgacattcagattttgaagtcagaaaagttattagcaaaggtacaacagcctcctgatccaccaaaagttgttctgataccaaatgagtataaaaattacacaaggacaaaacgtacaaaaaatatgcaattaggtgatacccaggccatctgtgaatatttgcaaaggatgaaaggcgagaatccttctttcttttatgccattcaagtagatgaagatgatatgtttacaaatgtgttttgggctgatgctaaatcaataatggattataactactttggtgatgtagtgtgtgttgacacaagatattgcacaagtgactatgggagacctctactattatttactggtgttaaccatcacaatcagctgataatatttggttcagcgttgatttatgatgactcagcacaatcctttagatggttgtttgagaccttcaaatctgctatgagtggaaaacaaccaaaaacagttttgactgaccagtctgctgcacttagcgatgcagtttcttcttggcctggaaccatccaccgcttctcactactgcatttgtatctgaatgctactaagataagcagggataccttacaaggcttggagacttttgcatcagattttagtaggtggctgtatgaatatgaggaggacaacttctattcaagctgggaaatcctttcagagaaatacaatataaaggataatgagtggttctgtaaattgtatgaggatagagaaagatgggctttgccttatgggcgtgacacattctgtgctgatattgcaaccacactaagaagggataacacaaatacaatcctcacagatctaattaaaccagaaatagatcttcagaacttcttcaacaattatgataagtttttggaggagaaacgcctagctgagcaacaagctgactaccttggggctcaaataacgcaaagggtagcaccactgcatctgctttggcaagctgccaatttatatactccaacactttttgagatgttcagaatggaatatgaacagatctcaaagtgtgtggtctatagttgtggtgagattggaccaatatctgagtaccaggtcactgtcaaagacaggcctcagggtcaatttgttagatttgattcaacagaatgtatggttgtttgtagttgtaagaagtttgaattcatgggtcttctttgttgccatgtattgaaaattcttgatctcagaaatattaaagaacttccacgacactatatcctgaaaagatggagaaaagacgctcagagtgaatctccagagaactatggttttgctgccatagatgaagatcctaagttttcattgtcaaaacggtacaacgcattataccggaatttgtataaaattgcagcaaaagcttcagaaagcgttgaagcttatgcattcctggagaaccaatatgaacagcttgttgaacaagtggaagtacttttgcaagcaaagttgcatgataaatcttccttaagtaccgtcctgaaaggcaatcagccaaatatgcttaatagtgaggtcaacagcagtgaacatcgcagagcaactggtaagaaaattaaaaatgtagaggtgcgccgtcagcaacaaagtcttgatccaaacaaaaagaagaagggtagacaagttctgctggaacctgagattgaaattccactcagggttgaacctcccacggtatcaaatgatatccaaaatcatttaagaacaacaaatcagtttcttgcaccaagccatatgatgcaggcaccttatgttgcacagcagtttggtcttggttctttacaaggattcccaggcatgtcaccatttgggcagattcaagaaccaacacctcttcagcagccccatttacaaccaccatcgtttcatagtggtcctcaaattacacagcaatcctcagcttggccaccagaccacggatcaaggccagtacaccattccagtctgggatttcctgtgacatacagtatcctcctgtttggttgctagcagcttggtgcctgactcgcccagcatcagttgaaactaacgattcttacttcctcacgcatctccacgcatgcaagtcaacgagggtaaaaaagcctagcttgcacctgcgcgcacatgcgtccactatatttttacttccccaagcacgtgcctgggcgcggtcaacgcatgcacggggccaggcgcgggagcagagccaaccaatcatgcagtatgtgatgtatggcgaagtagcaatgtagttgtaaattatgtaatgacactgcccctccccgaagggttaatgtcaatgaaatcctttagcatggtgcattggattagattttggaactgaatgcaattctaatgcacacgttaaagccaaccgggaatggggactgtttgttccaggcaaggtggcatggttgggcacagttatcatacaatacaatatgggcctgtttgtttccttttattttgaggaattagaatcttactattggaatagactattttttagaatgtgatattccaccactttccaaagttatca

SEQ ID NO: 9705 - DNA, 4314 bp, Zea Mays
caagacctcagtcggatccccacggggcaagcccctctgccggccctcctccgcatcccactctcgccggccgccgcagccaaggcaagaggacgcctccccacacccgatctcccctcccacctccgatcgctacgaaaagcccacgcccgcctcgtccctccggccctcccctccgcacgcctcgcttgccgcgctatttcaaatcccgctcgaaccctagtaactacctaccccgcatggtcgatcgtgccgccgcgcgggcacaggcggtgagctccgacccgccgccgcctgcactgctggagcccgacccgcggctcagccagcccggggccgctgatgggcaagaggtcgcttcggcgggtgcgaccgcgggtccgccttccctgccccaggccagcgacgctgaggaagacgctcttgcctcgccagcggggcagccgggcgagcggtgcagagcgatgatggaggtggtggccaaagacggggcgtggaaggtgaccaagctggtggtggagcactgccacgagctgcaggtcgcccccggacatgtcgcggtgaccgtgccagcgttggggatggaattcgactccgtagacgacgccaaggggttctactatggctacggcgagcaggtgggcttcaaggcgcgcatgggctccaaccgccgctcagtgggcgacggcgagaagatcctgcagcggttcctctgctggaaaggcaattacgcgaataggagtagatgtaaggattcggatgcagggaaggaaaccgatgaggtgctggagggtttgtctgctgctgcggggaagaggaagagggaaccttataagacaaggagccgcaatcctggtaggagtacagaggtgattgaagtggagaaaggtgttgggttgggtggtgctgggaatgggctagagctggataatgggaggcgttccaggaggggtaggagtaaaaaggctgaggtagagcatggtgaggattctgttgttgggttcgaggcggaggaggtggctaaagctgtttctgatgctgacgaggaagaggatgaaggggacgaggatcaggaagcagcggaacaggaggtcgaggtggaagtgaaggaacagagagcgagagggaggccgaggaaggctgttatggaagacaatgcccttcaggcacgcgtcttgagggagcttggtgtgagggcattgcagtacaataacgaggagagaaagaagatactcaataagtaccgctctaaacggcagagcagatcagtgtcgagcaggcctaccaagatatcttcaagacaagctttggctgaaaggcgtaagcgtggcaatggaggtagatttctgtcaagtgaagaacagccggctgagagcaaagaagacgaaacaatggaagcagaaccagatccagaaattgatgtagtccctggacctgggggagaaccaaaggttgggatggtttttctgaatgaggataaggcatatgaattctatgccaactatgctgaaactgcagggttcagtgtccgaaaaggctggttggacaaaacagcaaagaatgttacaaaatctcgagcatatgtttgttccaaggagggatttcgtccaagaagtgcttctatcgaatcaaagaaaccaagcctagaagcaagaactggttgccaggcacacatgactattaagattacagcaagcacaaaatatgtagtgactgagtttgtggccgatcataatcatgatcttgaaactcccttggttgacattcagattttgaagtcagaaaagttattagcaaaggtacaacagcctcctgatccaccaaaagttgttctgataccaaatgagtataaaaattacacaaggacaaaacgtacaaaaaatatgcaattaggtgatacccaggccatctgtgaatatttgcaaaggatgaaaggcgagaatccttctttcttttatgccattcaagtagatgaagatgatatgtttacaaatgtgttttgggctgatgctaaatcaataatggattataactactttggtgatgtagtgtgtgttgacacaagatattgcacaagtgactatgggagacctctactattatttactggtgttaaccatcacaatcagctgataatatttggttcagcgttgatttatgatgactcagcacaatcctttagatggttgtttgagaccttcaaatctgctatgagtggaaaacaaccaaaaacagttttgactgaccagtctgctgcacttagcgatgcagtttcttcttggcctggaaccatccaccgcttctcactactgcatttgtatctgaatgctactaagataagcagggataccttacaaggcttggagacttttgcatcagattttagtaggtggctgtatgaatatgaggaggacaacttctattcaagctgggaaatcctttcagagaaatacaatataaaggataatgagtggttctgtaaattgtatgaggatagagaaagatgggctttgccttatgggcgtgacacattctgtgctgatattgcaaccacactaagaagggataacacaaatacaatcctcacagatctaattaaaccagaaatagatcttcagaacttcttcaacaattatgataagtttttggaggagaaacgcctagctgagcaacaagctgactaccttggggctcaaataacgcaaagggtagcaccactgcatctgctttggcaagctgccaatttatatactccaacactttttgagatgttcagaatggaatatgaacagatctcaaagtgtgtggtctatagttgtggtgagattggaccaatatctgagtaccaggtcactgtcaaagacaggcctcagggtcaatttgttagatttgattcaacagaatgtatggttgtttgtagttgtaagaagtttgaattcatgggtcttctttgttgccatgtattgaaaattcttgatctcagaaatattaaagaacttccacgacactatatcctgaaaagatggagaaaagacgctcagagtgaatctccagagaactatggttttgctgccatagatgaagatcctaagttttcattgtcaaaacggtacaacgcattataccggaatttgtataaaattgcagcaaaagcttcagaaagcgttgaagcttatgcattcctggagaaccaatatgaacagcttgttgaacaagtggaagtacttttgcaagcaaagttgcatgataaatcttccttaagtaccgtcctgaaaggcaatcagccaaatatgcttaatagtgaggtcaacagcagtgaacatcgcagagcaactggtaagaaaattaaaaatgtagaggtgcgccgtcagcaacaaagtcttgatccaaacaaaaagaagaagggtagacaagttctgctggaacctgagattgaaattccactcagggttgaacctcccacggtatcaaatgatatccaaaatcatttaagaacaacaaatcagtttcttgcaccaagccatatgatgcaggcaccttatgttgcacagcagtttggtcttggttctttacaaggattcccaggcatgtcaccatttgggcagattcaagaaccaacacctcttcagcagccccatttacaaccaccatcgtttcatagtggtcctcaaattacacagcaatcctcagcttggccaccagaccacggatcaaggccagtacaccattccagtctgggatttcctgtgacatacagtatcctcctgtttggttgctagcagcttggtgcctgactcgcccagcatcagttgaaactaacgattcttacttcctcacgcatctccacgcatgcaagtcaacgagggtaaaaaagcctagcttgcacctgcgcgcacatgcgtccactatatttttacttccccaagcacgtgcctgggcgcggtcaacgcatgcacggggccaggcgcgggagcagagccaaccaatcatgcagtatgtgatgtatggcgaagtagcaatgtagttgtaaattatgtaatgacactgcccctccccgaagggttaatgtcaatgaaatcctttagcatggtgcattggattagattttggaactgaatgcaattctaatgcacacgttaaagccaaccgggaatggggactgtttgttccaggcaaggtggcatggttgggcacagttatcatacaatacaatatgggcctgtttgtttccttttattttgaggaattagaatcttactattggaatagactattttttagaatgtgatattccaccactttccaaagttatca

SEQ ID NO: 9706 - DNA, 2716 bp, Zea Mays
tctcatctcgtcggccggcccggctccctcgcgctcctaccccggcccccaattccaatctcgccgccgccgggttgccgtcctgtgctccgcttcgcaccgccgcaccgctaggaacagcccgtgctggagctgggggaacgaacatctcaacctccgtcacccccataccgtacaagtattcctatggagacgatctcatcttgtcccatctgcaacatacaagttcttacggctgagctggaatggcatgccaatagccactttgatgatgatcaactccaaatggacatggaattagcacatcagatgtcagttgctgaatcaagtacagatgccatgaacgacccaaaacattatagtggatcattcactagtgactctaacgctctaggggctctatcgagtcatagtggatactcgcaccattacagtgagctactggatgaacaaatctcttgcttggtccgagcacaaattcgaagcaaagttcaagaggtggaaggcggtattttgagcttgttgaggagctgcttggagtcagaagcgggttcctcgacaagtatgatatcgtgctatattgaccatcatcagagcctttcatcagaagataagggatggggatgtggatggaggaacattcagatgctgagctctcatctattgaagcaaagaccagaagctagagaagtattatttggtggttctggatttgttcctgacatcccttcactccagaggtggcttgagattgcttgggacaaaaaatttgatacaattggctccagccactttcataacaaaatttatggtgccaagaagtggatagggaccacagagtgcgctgccctcttccgctcctttggtctccgtgcaaggattgtagattttgatagcacagaatcatctgacctccatagtaacaacggaagccgtgcagcgagccaagtacgaggacctatggacaagttcttgataaagaataagcctccaaaatcatcatctgaactttgtcgagaggatgctgaaagtacgagaggccaacaggcccttgttgactgggtttggaactactttgcaagtgagcgctctgacagattagccacacagcgtgtcactgttagcaataaaacaccattgtatttccaacatcaaggtcattcaaggacaatagttgggattcaaaagaaaccggatcgtcgtggatctcaagaacaatacagccttttgattttagatccgggccatatctagaaaggtgtctaagaagcaaaaaaggatggcagcgtctggtgaagagaggcgtccacacgctcaggaagccacagtatcagctgtgttatgtggatcctggaattgctagttcagaagaggtggagcgactgaagactattgatggcacactagtcaggttttaggttcctggttgtagtctgcgggatcttgatggtggttgtggcagtcggcaattttgccaacactatgtatacactggtggtactgaagctgaggtttaaagcaaagatgaagagagcaaagggcagacaggatcccccacatcaaaactgacaggcatgatcgttcctggaacacaaggatgcagcagctgctggcaccatctcttctgtaaatcctttgacctgtgtcaacattttttggtgctgccgtgctagtagtaggagtatcttgcaagcttttgttttggatggtgtggtggtccagaaaacactctgtctgctaaattaccagaaacatccgcagttgtatattgcggcaaaatcccaagtgtatattaaagtcctccaaaaactgccgctgctttcgaccacaaccaaccacctgaatgtatcttttctttacatggtcaatatcaagtcctctttcctctgcaatgcacgatccatttttcacaatcctaaattctcgatggaggaaataaaaatcatgtgagctctagcagcttgctgagctggatatggtggccgcaacccgccttggcgatggacctcgccgccttctccgcgatggcggcgcgcacctgcgccatcgacggccgcagcccgggctgcgccgccacgcactccacggcgagcctggccacgccggcggcctcctcctcgtcgtgcccgccgtccccgagcctgccgtcgacgagccccgccaccccgcgcgccctgacgcgtggcaggatccgcgccgtcaggttctcggcctcggacgccgccggcaggcccgtgacggcctccagcagcagcacgccgaagccgtacacgtcggacctgctggacacgatgcccgtgcgcaggaagaaagggtcggcgtagcccggcgacgccacggcggcgcgcgccggcgccacggccgccgagaagccctcgcaggcggagcccaggtcgcagagccgcacgccgccgtcggagaggagcacgttggacgccgacacgtcgccgtgcaccacggaggccccgccgccgccgccgccgtgcaggtgctccagcgcgcacgccacgtcgtggaggacgcgcatgcgctgcgcccacggcagcggggccgccgccgtgccgtggagcgcgtccgccagcgtgccgccgccgagtaagttagtatatacacgagcggcagcgcacgcaccgtggtcgtcggagtaggcgaggagcgcgacgatgtgcgggtgtcggagtcggcggagcaggtcgagctcctggcggaaggcgcg

SEQ ID NO: 9707 - DNA, 2886 bp, Zea Mays
caacaaccccgttgctctcatctcgtcggccggcccggctccctcgcgctcctaccccggcccccaattccaatctcgccgccgccgggttgccgtcctgtgctccgcttcgcaccgccgcaccgctaggaacagcccgtgctggagctgggggaacgaacatctcaacctccgtcacccccataccgtacaagtattcctatggagacgatctcatcttgtcccatctgcaacatacaagttcttacggctgagctggaatggcatgccaatagccactttgatgatgatcaactccaaatggacatggaattagcacatcagatgtcagttgctgaatcaagtacagatgccatgaacgacccaaaacattatagtggatcattcactagtgactctaacgctctaggggctctatcgagtcatagtggatactcgcaccattacagtgagctactggatgaacaaatctcttgcttggtccgagcacaaattcgaagcaaagttcaagaggtggaaggcggtattttgagcttgttgaggagctgcttggagtcagaagcgggttcctcgacaagtatgatatcgtgctatattgaccatcatcagagcctttcatcagaagataagggatggggatgtggatggaggaacattcagatgctgagctctcatctattgaagcaaagaccagaagctagagaagtattatttggtggttctggatttgttcctgacatcccttcactccagaggtggcttgagattgcttgggacaaaaaatttgatacaattggctccagccactttcataacaaaatttatggtgccaagaagtggatagggaccacagagtgcgctgccctcttccgctcctttggtctccgtgcaaggattgtagattttgatagcacagaatcatctgacctccatagtaacaacggaagccgtgcagcgagccaagtacgaggacctatggacaagttcttgataaagaataagcctccaaaatcatcatctgaactttgtcgagaggatgctgaaagtacgagaggccaacaggcccttgttgactgggtttggaactactttgcaagtgagcgctctgacagattagccacacagcgtgtcactgttagcaataaaacaccattgtatttccaacatcaaggtcattcaaggacaatagttgggattcaaaagaaaccggatcgtcgtggatctcaagaacaatacagccttttgattttagatccgggccattacggccatccaaatgtttccccttaatgccgcagagaactgcagatctagaaaggtgtctaagaagcaaaaaaggatggcagcgtctggtgaagagaggcgtccacacgctcaggaagccacagtatcagctgtgttatgtggatcctggaattgctagttcagaagaggtggagcgactgaagactattgatggcacactagtcaggttttaggttcctgttactttgacctaacaagacatgcttggttgactcgtcgagatgctaagtgaagcttgctgcttttcaacaatatttgaaaatctgcgtggtggtattctggagggataggttgtagtctgcgggatcttgatggtggttgtggcagtcggcaattttgccaacactatgtatacactggtggtactgaagctgaggtttaaagcaaagatgaagagagcaaagggcagacaggatcccccacatcaaaactgacaggcatgatcgttcctggaacacaaggatgcagcagctgctggcaccatctcttctgtaaatcctttgacctgtgtcaacattttttggtgctgccgtgctagtagtaggagtatcttgcaagcttttgttttggatggtgtggtggtccagaaaacactctgtctgctaaattaccagaaacatccgcagttgtatattgcggcaaaatcccaagtgtatattaaagtcctccaaaaactgccgctgctttcgaccacaaccaaccacctgaatgtatcttttctttacatggtcaatatcaagtcctctttcctctgcaatgcacgatccatttttcacaatcctaaattctcgatggaggaaataaaaatcatgtgagctctagcagcttgctgagctggatatggtggccgcaacccgccttggcgatggacctcgccgccttctccgcgatggcggcgcgcacctgcgccatcgacggccgcagcccgggctgcgccgccacgcactccacggcgagcctggccacgccggcggcctcctcctcgtcgtgcccgccgtccccgagcctgccgtcgacgagccccgccaccccgcgcgccctgacgcgtggcaggatccgcgccgtcaggttctcggcctcggacgccgccggcaggcccgtgacggcctccagcagcagcacgccgaagccgtacacgtcggacctgctggacacgatgcccgtgcgcaggaagaaagggtcggcgtagcccggcgacgccacggcggcgcgcgccggcgccacggccgccgagaagccctcgcaggcggagcccaggtcgcagagccgcacgccgccgtcggagaggagcacgttggacgccgacacgtcgccgtgcaccacggaggccccgccgccgccgccgccgtgcaggtgctccagcgcgcacgccacgtcgtggaggacgcgcatgcgctgcgcccacggcagcggggccgccgccgtgccgtggagcgcgtccgccagcgtgccgccgccgagtaagttagtatatacacgagcggcagcgcacgcaccgtggtcgtcggagtaggcgaggagcgcgacgatgtgcgggtgtcggagtcggcggagcaggtcgagctcctggcggaaggcgcg

SEQ ID NO: 9708 - DNA, 3603 bp, Zea Mays
catctggtgttcatgcgctttgcattgtgtaaaaatgcgtttttactgccatttcgtgtgcttggacgctcttctctttctgttctggccgtaaaacctggtgtttgttttctttgtatgttaatttgttattccgcttacattcattttttccttgcgtaacgaactccgttattttttccgtaactttcttatcgattcttcttcttctgtggtgctgccactgcttttactaatccaggagaaacactgctggagatcaagaaatccttccgcgacggcggcaacgcgctgtacgattggtccggcgacggcgcgtcgccgggctactgctcgtggcgcggcgtgctatgcgacaacgtcaccttcgctgtcgcggcgctcaacctctctgggctcaatctcgagggtgaaatctcagcggccatcgggagtctgcaacgtcttgtctcaatcgatttgaagtcgaatggactctctggacagatccccgatgagattggtgattgttctttgctcgaaactttggatttgtcatctaacaatctagaaggagacataccattctccatgtccaagctgaagcaccttgagaacttgattttgaagaacaacaaactggtgggagtgatcccatcgacactctctcaacttccaaatttgaagatattggacttggctcaaaacaagttaagtggtgaaattccgaatctaatatattggaatgaggttcttcaatacttgggattgcgaagcaatagtttagaaggaagcctctctcccgatatgtgccagttaactggtctgtggtactttgatgtgaagaacaatagcttgacgggtgcaataccagaaaccatagggaactgtacgagctttcaggtcttagatttgtcaaacaatcatcttactggagaaatcccgttcaatattggtttcctgcaagtggctacgttatctttgcaagggaacaagttctctggtcctataccatcagtgattggccttatgcaggcgcttgcagtgctagatctgagtttcaatgagctatctggcccaataccctctatactgggcaacttgacatacactgagaaattatacctgcaaggcaataggttaactggattgataccgccagagcttggtaatatgtcgacactgcattacctggaactgaacgacaatctgttgactgggttcattcctcctgatcttggaaaacttacagaattgtttgaattgaaccttgcaaacaacaaccttataggacctatccctgagaatttaagttcatgtgcaaatctcattagtttcaatgcttatggcaataaattgaatggaaccattccacgttcatttcacaagcttgagagtctgacttatctgaatctgtcatcaaatcatctcagtggagcacttccaattgaggttgcaagaatgagaaatttggacactctggacttatcctgtaacatgatcactggttcaattccctcggctattgggaaactagagcatcttttgaggctcaacttaagcaaaaataatgtggctggacacattcctgctgaatttgggaacttaaggagcatcatggagattgatttgtcttacaaccacctcagtggcctgattcctcaagaggttgggatgctacaaaatttgatactgttaaaattagaaagcaataatattactggagatgtctcttcacttatttactgcttgagtctcaatatcttaaatgtatcatacaaccatctttatggtactgtacctacagacaacaacttctcacgattttcacccgacagcttcttgggtaaccctggactttgtggctattggcttcactctgcttcatgcacacaattatccaatgcagagcaaatgaagagatcctctagcgcaaaggcctcaatgtttgcagctattggtgttggtgccgtattgcttgttattatgctcgttatcctagtagttatttgctggccacataactctccagtgctcaaagatgtctctgtaaacaaaccagataaccttgcttcagcatcaaacaacattcatcccaagcttgtgatcctccacatgaacatggccctctatgtatatgatgatataatgaggatgactgaaaacttgagcgaaaaatacattattggttatggagcctcaagtacagtctacagatgcgacctgaagaactgcaagccaattgcgattaaaaagctgtatgctcactaccctcagagcttgaaggaattcgagactgaacttgagactgttggaagcatcaaacaccggaatcttgtaagccttcaggggtactccctgtcaccatctgggaatctcctcttctatgattacatggaaaatggcagcctctgggacattttacatgcttcatcgaagaaaaagaaactcgattgggaggctcgcctcaagattgctctcggagctgctcaaggcctggcttatcttcaccatgaatgcagtccacgaataatccacagggatgtgaagtcaaagaatatcctcctagacaaagactacgaggctcatcttgctgacttcggtattgccaagagcttgtgtgtgtcgaagacgcacacatcaacgtacgtgatgggcaccattggctacattgaccctgagtatgcacggacatcccggatcaacgagaaatcggatgtgtacagctacggcattgtcttgctggagctgcttaccggcaaaaagcctgtcgacgacgagtgcaaccttcaccacttgatcctatccaaagccgcagagaacacggtcatggagacggtagaccaggacatcaccgacacgtgcaaggacctcggcgaggtcaagaaggtgttccagctggcgctcctttgcagcaagaggcagccgtcggatcgaccgaccatgcacgaggtcgcgcgcgtcctggacagcctcgtctgcccagcaggcccgcccccgaagcaggcgcaggcgcaggcacaggcacaggcgtcggagaagccgtccaccacggcgccgagctatgtcagcgagtacgtcggcctacgaggcggcggcggcggcagcgccctctcctgcaccaactcgtcgagcgcgtccgacgccgagctcttcatgaagtttggcgaggtgatctcgcggagcacggaatagtccaatagatcgacgatcattttgtgttacagtttacaataggtgtctggccggcgccctgtgatgtgactcgctgtaaatatgctgctgccttctcgttgggactccactaggcactagtagctatttttctccgttatgcacgtctctctctttttttttgctgggaaactcgaactgtaactaaaggaatggatttatgtgcaggctgcgtttactgacatgttttgtgattcagctgggacggttatgctattgctctgctcgatcggagcacactgttcaaggctggctggagatcatctgggcactgttactgttacgttatccttcctgggcttcctactcctggatcatgccactgctgcgctgcactgtcgcatgtattaccgtaccgacaaccgctgctgtaaaaaaacaaaaaaaaaa

SEQ ID NO: 9709 - DNA, 2328 bp, Zea Mays
attgatcagaatcaaacatcaaactaagagcacatcggatgaaatgaaagaggccatacctggtaagctgaagaagcagtgccaaagacgaaaccttgagggaagtctgctctccttagagcttcagcacaagcagcgaagctgataaggatattaaccagtgtcagaacagccatggcgtatccttcagttggtagcactaactcatagtgtttttagtctaagaataagtactagataggatcatatgacatatatataaaccttgttcagttggtgaagcgtgggaagcaactgaacgctgagctagtgagcttcacttgtcttggaagcccttccaacgtgcgtctctactaagtaactcttgtggaggccacaaggtgcaaaatctctatcacagtgggcaaattaatcaacaaccgaaggaaactacttgacatgtctagctccgaaacctgtgaaaaaaaatggtccacatctggagtgtcgcaagcaagtagagctttgcccagacagattgagttttgcccagcactccagcatccatgccttaaaaggttatagttagaaagggggaggattgctaagcccttgccagttagccacatagagagaaggccttattattagatcatgccatttcttttcttacaaaattaacaaagtgcaaagcattactatggccacgaggaacagatagctacgaaatgaaactgtcgcaattatcatggaaaaaagccacacatttccttatccattttgtttggtagcgccacatagaaacaaaacttcatgtcacgatttgcatagttatctcaacacatgtggcgaatagaaaaggagaaagagaaaaataaacacaagattcttaaccataataagatataatttgtgtcgggcatttgcatagtcacatgcttatcccatggggaacgttaaaggtttgcttgcacggcaggaccattcctgattccctagatggtagttagatgacggcgataggagccgaggcccaactgcccagtgatgtattggccgtgttgtttatgtgatctgtcatggatgtcctactatgattcaaggatttaggacatgcgcagaactgccagcaatgaaaagtcgaagaaagagatattgacttcgagggggagaaatgtagtccactatgagaaaagagatacccaatgtctctggagaaaaagatctgaggtaaacacgtctaacttgcaaccatgatttgcaatagagaaatccgattgacatcccaccctttctcggtgcaggatgggacctgcagcagcaaaagcgcaaagcttcgatgtcaccgccatccacctaccctccatcgcccaaactgtctctgtctctgtaacgcgaattttattttacacaacagcaaagtgaaaaactggagtagggggttcgcttgcctcagcaaccgtcgcgtagcttgcgcgcctcggcgctggaacggggaatctggaggcgggcacgcatctcccaagcaatctcgcgtggcctcgcgtagcgtgcgaggagacacgcagagagggagggagagagaaagagagccttgaccccgccgtcctcgtcctgtcgtcctgatagctgatgcagtgatgctgatcagctgatgcgtgcggagctcgctcgtggagccgaggccctagcctgtagcctctcacggcggtagaacgagcacccatgggcctcactggatcacctaagcgtcttccaggcccatctgtgcctcacctgaggcctgtctcatttagtgacgaggcccaacccaccagcgtcagaatacaagagcgcgttatcctctctcttccggttccgggcaactcgaagaagccgcgtgcgttatcctttgagcagtttgggcgctgagcaagtccagtgagagagggagagcggcgagaggatggctgggatggcatcgctgcagggcgccatggcgtcgctctccatctccgcgctaggcgcggcgacggcgagcagcagcagcttctggggcaaccggctcgccacctactccgcgccgcagcctggggtaaggtttatggtcaagatatgcccaattgaaatgagacttaagagatgggagcgaaagaagtgtaaaccaaacagtcttcctgtgctgcacaagatgcatgttaggatcggggacacggtacaggttattgcaggccgtgagaaaggaaaggttggagaagtcacacgccttttcaagcacaacagcacggtgatcgtgaaggacctgaacttgaagtcgaagcacaagaaaggcacagacgatgaacccggtgaaatcgtcatgattgaaga

SEQ ID NO: 9710 - DNA, 1731 bp, Zea Mays
gtacaactagctacaggctacagcgtagccgcacaggtggttgtagaacgtgaatgcgccaaccgcgattgttgcccactagtatgttgtataaaatagaagcaagagtgcaagacggcgacgacaatgcctccaaacagatcaaatcagcctcgccgccatggcgacggcggcggtgccggcctctcggacaggctccggcggcgtcgtgcggcggcggcggcggcgcgtgctgatgttcccgctgccgttccagggccacctgaacccgatgctacagctggccggggcgctgcacgcgcgtggtggcctggacatcaccgtcttccacgccaccttcaacgcacccgaccccgcgcgccaccctccggggtaccgcttcgtccccgtcggcgatggcgtgccgtcggccgacctcgtcccgtccggcgtcgacgccgacatccctggcgcgctgctgcggatcaaccgccgcctgcgggagccgttccgggactgcctgcgtcaggctctcgccctccccgaggacgacggcgacgagggcggcgcgccgccggcatgcctggtggtggactccaacctgcgcggaatgcagctggtggccgaggagctcggcgtgcccacgctcgtgctgcgcaccggcgccgccgcatgcctcgtcgcctacttggcgttcccggcgctctgcgacaagggcctcctcccaccgacatccaaagacaagtcccagctggacataccgctagacgggctcacaccactacgcctaagagacatggtgttctcgcccactactacacatgcgaacatgacagagtgcctaaaatgcctggtcgacgcaacgaggagttgttccggcgtcatattcaacaccttccgagacctggaggactccgacctccagaggatcgccaatggcgtcgtcggagtgccgatctatcctgtcggccccctccacaagatctctccatgcaccgaggacagcttactggcgccggaccgggcgtgtctagagtggctggacaagcaagaggcggactccgttctgtacgtgagctttgggagcctggcacgcgtggacggaaaggagctgctggagatagcatggggcctggccgacagcaagatgccattcctgtgggttcttcgccacggcttgttggacaaagtgaggaggcttcttcttcccggcggcttcgaggaggcgacgcgcggaaggggggtggtggtgccctgggtcccgcagcaggaggttctacggcaccgtgcagttggcgggttctggactcatagcggatggaactccactctggagagcgtctgcgaaggtgtcccgatgatgtgccgaccccagttcgccgaccagatgataaatacgaggtacgtgcaagaagtgtggagggtagggtttgagctagatggcgaccagctggagaggcgcaagatcgcgggggctgttacaaagctgctttgtacggaggaaggaaggcgtatgagacagagggccagagatttaagagacaaagccatcgagtgcgtccaggaagaaggcgcctccaagtctgcaattcagctattgatagatcgcatagcgtcattttagttgtgttccatgacaagacagttaaattgtatgacgccaatgctacagggctcaatataatgtatgtgatgcgctgaactaatatttataaataatgtagtttataatggtattgcacaactcttagc

SEQ ID NO: 9711 - DNA, 5918 bp, Zea Mays
ccagtaactcccgtcggctatggtcgaaccgacggagattaacaattaatccccgtcggcccagtaactcctgtcggctaggaggtccgacaaccattaattggtaatttgtttgaggaataatcttatccccgacatctgacgcctgtcggcttacggccaacgagaataagccctaaaccaacggaaattactaattcctgtcggtttaaggcttttcccgtcggttccttgccgacgggaattaagtggattactgtagtaaatacaaataggcacaaatctttatattattccgcatcggtcatgtggattattgtatattatatttcttagggcatgtacaatctagataatatattacggttctccaagcactagatacacgtatgaaacttgttcatacaatccaatgtatagccttatatcttaattcactagaatctctcaagatacaactcatttatgtggagccgtatcttaggcttgaagaaccgtgctagagacgtttcatcaccgatatacgtctcttatgtttttttacacttacatcattaaatatcctttaaaatacggattattcatgtgggctgtagacgaccttagtatatttctcggtggcgccggtcccgtgaaggctggtttggagtcgatcgagtgcacaccttgcaccacctttgctctatcactatcatctcaagctgaatcagctttgtcattccataaaaaatcattttcaaaattatccaaggttaaatacctttataaattgtagtagctttatatacataaataccgacagctatgaattaaataaaaaacatttgataggaatattataagttaatttgtttgaggaccaggatattcgtacaatgtttgattcatggaatcgttctatggtcgtctcaatgaggacaacacccagaagcaggctaggaactggaatgcacagcttatggggcagatcatatacaggttactactactatattattagtttagtgtagtagcagccagtacagtactttacgatgattaacatcagctaaatgtcttttgcaatggcaagcaagcatgcacgcatgcatgtgcgacaactgacaaataattgtttcctttggattcaaatcgtgatgtacggataagcaacgggtagcattttagctgctgcctgttggtagtgaagtgggtggaacaccacatgcatgcatgatccatgggtgtcatgctggggtatgggctcgggtcggatcatgcacgcatgcaagttggcgcagcagtgacagactcgagtgagagcgagtgcgctggcgacatggggtacctatgatatgcatggtgatataggcgacatggtggtgataggagtaatcaggaccgagaacgagtgcagctacgcgcgtttggcgccgagtgcacgcatgaggccaagaatattgaacgcttgaatctggacatttggatttgattgaacaaaagatacaatgttggatcttgcagctcgctgatgagtattccggcccgttgaggtgctgtttggaattaagcgcatgtttgaaaccactcagtttttaagaaactagtttatgaaaattgagataagatggttctaaacataccaatttatatatcagtttatagaaactgatttcatagtttcttaaaaacaaagaagctagtctctcctatctaaaaaaaactggattactttcaaacatgatttaaaaaaaggaatacaaaatacagatgtagaaaaaacagtctttgctacggtatttctacaagactaaattgaaaagacacatttatgtaacgttgtgtatttgacaaacttttttttctattgcctaattattacatgtaatctctaatacttattaagtattaaggctgcaatagtagtctgtcattccctattctgctcatttcgtgttctgtcatcattccttgttctgcctttccgattccctccttcccgcacatagttcattcccatgttctgtcattccccctccccgcaaagctcattccattcccccgtacacatggcccccgaaggggattcgaactcaacctctcaagcaaattcttgaattatatttttggatggagggagtagtatttaaagaagagccttgcatgcaattttttttttgaataatgtttttaacttaaattcctttttttgcatgtgtgatatttattctttgtaatattttttccatggatatgacttgtgagtcatttttataaaccaacgccaaacatgaatcaatgtttcttatttgaaaactccgaacaaacaacattagcaggaggcactcgcgttggggtcgctcatcaacgacgagaagaaactttgcgactgccagttcgacctctagaaacagtcttacgtggccgcatgtgccgttatgtacgacaagcttcagcgcagccgtcgcttggacgcggtgcagagcggttgctccacgctgttcattgtcaagcaggggaccccatggtcgtcgccaacgtcggcgactctcgggttattctgggcatcacattcgacgactacgccatcatgtcgtccagctcgtcatccacctaaagcccaacctgccacgtaagtcgcaactgaccgacaataaattcttgtgcattgggacgatggtcgttgctgacgttgtgtgagtgtcgttgaacatgatgtatgtagaggagtaacgcatctggtggtgcaacggccaggggtactaccttgctgatgagcctacggtgcacttcgttttacagcccaaccaagagtcatcagtactcgatatgttgtgcgcgttcgacgactattatatcgaggatcgtggcgtcatcttgacgcatgaggtgacacagaggaggaccgacaacaatgaccagttcgtcatcctcgccaccgttggggtagcttttgtgccgacttgcctttaattctcttcacaaacacacacacttgcctttttttaagcaaaagtgtatggtggtacgtgtctgatgactaacgatgtacgggggaatttcttcctacatgtgtggaacatgctctccaatgatgagaccattcaaatcgtgacatatatcgaagtttgcatgatattgatggttgcaatgtagtggtgaaacatatagattaaaataacaaaatttatgtatggccagaatcacaaattgattataaaacattttctcataatgatataacacatattttgtatataagttatcgtagtatacttgtattatatattctcattgcaacccatgggcactcagctagtttaactattatatacctaatgcaaaatggcactggtatgatgttgttttgcaactaaatataaaacgtgcccgacatggttttgcaaataaatataactcagctaataaaataaacctcggagtccactagagccttctttgccaagtgtaaggccagcaaacactcggtaaaggctccatcaccgtcgcttggtacgtgatgatgactttttttgtcgagtgcccgacaaaaaaatactcggcaaaaaagccgttgccgatgtacagttcactgagacctttttgtcgagagacactcgacaaaagactttgtcgagagttttctaggctttgccaagtgcctgaagaactcggtaaaacagatgtgtccggtagtgattgtttatacaagcgaggactacagtcgctgaatgacatcacctcgtcgctgcgaagaggatgtagcccttggagtcctttttttatttgtgcagtgcagcctagaacactctagaggcaaaagagcgatggcttatgttgagaccagaccaatgccgttggatgagaatctcgcatgagaatctcgcggttgatgtgaggtagggtgacatggatgaaccggagggaggatttgcccccactgtgaatataacacatgattggttgtaggtagggatggcagtgggtacggttatgggtaacccgtcgggtacagatatggtggattttcgtatccgcgggtacggatatggatactatatagtatccagggttattaatttcgcgggtatggatatatgctatccatatccgtcacccattgggtatgacatgtggacccactcctagtcccatgcgcatgcgccagccgccagccccgtgggccgtgagtccttgagaccttgacccaatcacccaacgtcccagtgacccagtccaggctcccaagtcccagcgccctcttcaatccggcgacatctagcgagcagcaagtcgccaagtcctaaccctagccaccaggctgcagacctgcagtgctccacgtcgaccacgcacgcgctctagcaaatcgcccgacctgagcacgacctgagcgccccgcctctccctcggcctcgggcacctttgcgtccggccatccgcctagggcgcagccgcgcaggcagttgctggcttgcagtcgtccaggttagtgcttttgcacttcatcatttgtttgcccttgcacacagtgagtcagtgacacagcacactagtagaggcgttgctttttttgtttgctgcccacactaggccttctctgtttatacagattgtgaatttgtgatgtcaactcccaacgaaaatagcaacactcaatttcaacctccctcatctcaagcatctgttgagggtggaagtgggcttccagagaatgtgattaatgttgaacaagatggtgatgaggatgatgatgaagtagaagaaaatgggagaaaaagaaaattgaaatctgtagtgtggagtgaattcaagagggtaaatgttggagatatttggaaggcaaagtgtaattattgttcaaagaagctttcgggtgtaacaaagaatggtacatctcatttgaaagcccatctagagacatacatctatcgaaagaggaatcctacagataaggtacaaagctctttgtggttcacatctagtagcgaacaaggacaagtgtcggtgaaggagtatgttttcgaccaagatgtggcgagaaaggcccgtcctgaaatggttgttttgcatgaatatccattgtccattgtggatcatgttggttttagaagtagagcaatgctagagatagaaaatgtgaggaaattatttgatgaactgattaaagagtacaacaacaaatgcattaaacctgttactagtggtggacaaaatgcatcatcatcttgtgtttctaatgcttccacatatacggatgagttgttctctgccatggaggaagagctcgatgacatgtgcagtgatgaagaaaaggctaagtctgagcttgatctttatgtggatgaaggtcgtattcccaagtcaaaggaatttgatatattaggctattggaaaatttatgggatacggtaccctactataaggatgatagcccgtgacatatttgatattcctgttacaactgtcgcttcagagtctgcttttagtactagtggcagagtgctaagtgatcatcgaagtcgacttactcccaaaactttagaggttttgatgtgtgcacaaaattggcttcgtgttggtcaagcaaaaggaaaagaagattatatgggtttgtggacttgtcttgaagatatacaagaagaacttgtggaactctcctttggattctccacaatgccaaatgaagaaatttgaaggaaaattcacaggatgtcaaatgaagttgaatgccattcagccatgctcattacaataatttgttgttgcattttgaaaactatgtatgactataatttcattccaagaacatgttttatgatgtattgtattgtctttgctacttctactacttgctatggactatgtcactatggtgaaatgttgttgtaagcctggaatgttatctatttatgttgttagaatgttgaaattattgt

SEQ ID NO: 9712 - DNA, 1780 bp, Zea Mays
actctataaggagctagcgagggcgtccacagcttcaccacgccctcgcccggacgtcgcgcaagccccgctgtccgcctgcccccggaaatttcgcccacacgatgcccccaatctcgcgatgcccccgaccgcctcccccgccgtgacagccgcctcgacgtcctcaccacggctcacgatgcccccatcgacccatcgtctgtgtcccccttcctccctgcgtctccctctcaccctctatcgcccaaaagctccaacctgtcgccagagacttggcgcagacccgtcgactaacacgtcgtcgtcctcacgccgtgggggatgactggacacgatgctccccacccgcacccaacaccacgccagcctcgccctcgatccaggctgccgcaggtgtcctcgacgccacccttccggctcgccggtggttgattcctcttctccttcctctggtcgcaggggatggcgtcgtagctcgggtacgccacccttccgcatgcgccatccacgccaggaacaacatgggcggcggcggccacgatgccagcagcaacacacagccagcgccacgggtcagcggccagaagcccccgccagccctagaggcgacgccgacgccgacgcgcggacgagctggatctggtgcacgtgtccaatctcccccgcccgctcagcctcagcgacctgtccccggcgcccatgcacgggtcgcagctccgcgtggcgtaccagggcgtcccgggctgcgacgccattccctgcggccaccctgtttggggtgccttccaggccgtcgagctctggatcgctgaccgcatcgtgctccccgtggagaactccctcggcggcagcatccaccgcaactacgacctcctcctccggcaccgcctccacatcgtcggggaggtccagctccccatccaccactgcctcctcgcgtctgcggggaatgtggcggccatggtgtggcggcctgaggcccctgcccagggctgcaggctgttgcaacgggagggttgaaatctcatgcatatacgcatagccttgaagcaggccatccaaacagcaccatggatcgatgtatggtcctagatcctacaagggacgccagcaaggtagcaaatttggtggcagtactacaagttggagttctgctggccgcagatttggtactatcgacttgagtggcaatcaacaaaggggcagcatgccatttggtagtcacaatggctctctggagttcatgaatgagcaaaaccatgggccacgtgctacaaaaccgaagatacaaggcacagagaacacctcaggagatgagagaagcgagaaaattgttcctctgattgatagcgaactgtacaatcgctctgattttataactgagtacaaagatgtcaaattctttgtaataaagtcctacactgaggaccatgtacataggagcattaagtataaagtttgggccagcacagccaacgggaacaggaagctggattctgcttaccatgcagccaaagagaaagaagagcattaccctattttcttgtttttctcggttaatggaagtggccaattctgtggcgtggctgagatgattggacctgtcgattttgatagaagtgttgattactggcagcaggataagtggagtggccagttccctttgaagtggcacataattaaggatgtatcgaacaatcttctgcggcacatcattcttgagaacaatgacaataaacctgtcacaaatagcaaggacacacaggaggtaaaccat

SEQ ID NO: 9713 - DNA, 7593 bp, Zea Mays
cagagatcgaccgtggtattggcaaccggtgtccggtgagggggatccacgcaactcctgctaccaccaccatcgccgctacagcggcgcatgcagcagccggcacgacgatgggggagcgagacgcgctcccgccgctgccgctcgccctcggtccgccgcatctaatcccgccggcgcccacccgcgacccgcgcgccatcgccttcctccctgacctcgtgggcttccactgggtcgcctacgctgccggctccttccttgtcgtatcccacctcccctccccttgccgggacgacaacaacaacgacagttgctccccgttcttccgccaggtcatcgacctccgcgcccccgtgtccgcagttgcttggtgccgccgcgggagcggagaggtcgccgccgctacagacaattctatacacatattccagcctgcgcccgcctcttctccaggttcgtttggatggctcctgagatggtctatcaccgagacgttcgccatcgttgctgtatcctggaccggctgcggcaatggcattgtggcagttggcgcaggtgtttccatgtgggcaagattggagtcctcctggcagctcgcttggaggtctacaccgcaggtgccgcaagcccttgtctccactacctgttccatgcaaggtcctgtcgcgacagtggcagctcttgctccagccgagggcagtgtgcctgttcttgtgtttctgaacgatgccaggagggggctggagcaagctgagcttgtgcatcctcagcctgtttgtatgatccagtggagatcctgttcgttatacccccatgatctgtctgagatcaggagagagatcctcatgacttgctgctttgatgggactgtccggctatggagtaaggatgaggtgtctaggtcgaagaagcagcgtggtttgctaatatcattcagtgtcattgcagtaatagaggtgaacaacactctgaatggagtcctcggagttgatattattgtgagatggtccatggaatctggcagcgttgtgtcaagggacgaacaaggtagattcaagttgttttcaggtgatttgagggagagccaggttggtaaatgtgagtggcttgtaagtcttggccccgggccttgcattagcttttgggctatccattgtttggatgatgtatttccgccaaggtacccacggattactttatggaaacagagcaaacttcagggctggggggattcctatgttaaatcaggtcctctaaaatctatggaacagtcaatttttgttgaggctgtcatctcaagaaggctatgctctggtccacctgcaacatgttttttgcttcatttgctggtggatgattcgtttgcttggtcaaccgtatccaccaaactgttagctgattctgggaaccatgctttaagtgattctgctaaaaatatcttgtgttgtttgactaaacctgtcaaacaagatggacataagggtagcatcagacaagtgtctgtccatccatatagctgcgaaatagagttagctgtctccatggattcaaacagaatgatatttttctggtctctgtcaactttctcaactctcataccgacaatgcatgcacctatgtatcctctatggaagctgttgtgcaaatttgatttgcgtaacatttctgaagatttcgagtactcatgtttgtgttgggcaccttctgttactcgtgataatagatttcttgttcttggatgggaaagtggagtcgattgtttcgtagttagaattcagaaagaagaggttctttcatgccagaagattttcacaatccccttccttgcagaaagcaatacagaagggccacctgacagcattcatacgataccattagcttctaaatgcagcagctctctttccaccacaaaccaaggggcacatgcatgcttcagcaatgaaatgttttcagcagtggtttatgaaggttcttcagtctttccttctggcctggagggagaatataccacgtgcatttctgtaatgccgctgaataatactgtactgcctatacaacaacatgacccttacagaactgttccaggctatcatattgctactggttgctctgatggcactgtaaaactttggaagatgacttgtgcagaggactctttgcagactaagaaagaaagacacatctgggagctagtaggcatgtttggtgctcatcaaggaccaattgacatagtttcattgtcaggctgtggtagagttattactgttggcagaaatttgaagaaaaatagcacctccattcatatctgggaagcaacaaaaatcaggggagacgggaattttctgctaggagatacactaatgttgcaagaccatattgttggtttagatggactatccttaggtgatggacgatttctacttgcagtttatctagctaatgagttacgtatatattctcataagcacccgtccttccagaatgtactacacactaagaattcaaaagaagagcatctttggagctgtattgtattatcccattctcatcatgatattgttggctttctttggggaccaaaggcaactgttgtgcttgttcatgagaaccatctttcactcttcagttcatggctagtaactggagataatgagtacatgacccagatacattcttgtcctgtagttcatgagatgttgccatgtactaacaattttaacgaagctacttttggtaaactcaagttaccagaaaatttcaacagtggaaacattgatagcaataatgtcctgctaacagaccaacatagccactattctcatggtttatggagcttgctgcacatagctcatagattgagtggaccgttggcatcatatcacccaagagcacttatccagtatctttattcaggtgaatggaaacgtgcggatgctgctctgcaccatcttgttcggtccatgaaagtgagtgaaacttcaaagggcgtgtcaaattacagtacatgccatagtattccagaacttcctttgtctgaatactttgcggcaacagtgtccaacaacatttctaccaaggggtttatgtggggtgagaatagaagtaacacaacttttaatttgttgtcaccttcaacttcatttctttacgaggatggcaatttaggtattaatactacaactagtgcatctgaaaaaccagacattgttgagctccttgacaagagtttcagcaaatatggtataagtgactcagagaaaaatcagatacttgcaatttctgatcttatggctggaatcactgatcagagccattcctctccctacaaaaatcttgacgaagcaggaagaaggttctgggttgctgtgcagttcgaacaattccatgctcttagaagatctgcagattcatccagtaatgaagggtgccgtgttgattctgcttccatagcctgggccttccaatctgattgtcaggatgatctacttaattctgtgcttcctgcagagccaacctggccagagatgcgaaagcttggtataggattatggtatacaaatgtgtcccaactaaggacaaggatggagaagttggcaaggttgcaatatcttaaaagcaaggatcccaaggattgtgctttgctctacatagcattgaacagaataaaagtgttggttggtcttttcaagattagtagagatgaaaaggataaacgtctatatgagtttctgtccagaaacttccaggaagaaaggcacaaggctgctgctctaaaaaatgcttatgtactaatgggaaggcaccaatgggagcttgctatagcttttttcctccttggtgatgatacttcatcagcagtgaatgtttgtgcaaagaaccttcaagatgaacagcttgccattgtaatttgtcggcttattgaaggatctggagggcctctggagcgtaatctcatttctaatgtgctacttccagatgcagttgagagaggagataactggctgtcaagcctgcttgagtggatgttaggaaattattgccagtccgtcaatagaatatttggttgccatccaaagttgcttattgatcaaaatgtgcttgcagacccagaattgggtcattattgtgcaattctctcagcaaaaagtagtttcagaaactctgttggtgaagctgtatctgcaaagttatctaagctttcatttgcagtggctgcatgtgccttgaataagtgcggactacctcttgaagcactagaatgcttgtctactaactcgagcatagatggcaaggatagcataatcgcacatggtgatggagaccacaagattttttatggaatactgagccctgtctctgcttctaagaattggctgtcttcatctgtcattagtggcattgagtccaaccttaaactaactatggcttcaaaatatctatctagccttctgagaaagcactcactctgttcacaattgaacgcaccattatctgaagaaaaggtccttaatgagtacaacaatcatcaaattgaaaaactgacgtgtgatattacaacagtaatctcaatatttgataaaaggttctccctcaaatttgctgatatagctgagaagatcctaatcttttgtagccatgatggtttattgtttctagcgttacttcttaaacatgacaaaagtggaaattatattctggatgacaggtcagctatgctggcagttatggatctgtttgagtacattatagagttttctttttcttggttgtattatgacataaaatcattacttatcatgataaatccagtcctagctacttctgttaatggggattcctttcaagtactattagatcaactgatgcatgctatatgccacaaaaatcatgatatatcatcaagtacaggaggaatgccccatgctgcattgagtaaaacacaactgaaaaagagtgtgaattcaaatcttttagcagatgagaagtggcatttgataggcgcttctgtgtgggttcggttgatatctgtgcttgaacatcgtctaagggaattctttgagaaagagggacttgaacatgaagctggtgttagtggttcagaattcaggggtcttatcacttctgttgctgcaaagtttgttatggattccattcattttgtgtcatcttcattagtaccactgcatgcatcgttcttgaggaagaatttaccgatgaattcaagttcaagtttgctcttctggttagagtccaagttgcctcagcaactcccagtcagtgatagctatgatcacctctcgaggatttcacagctttcaaacagtgagaatatggaggcattgtttaatattttgtgggaaatatctgttaatcctgtggatgtttgtaatgcctttgtgagtgaaggagttaattgtttttccttaagcaacacgaatgtcactagatcttggaaggacataagatgtcctgtggttgagtgtgataaaattattactgaaagaagtggagaggaacatgaacacagacttggctccaagagattgggacagggattcgctgaaaaagcctcttataatggtgaagtgttgtatgaaactaaaaggagggagttgatcatacaaaaagagtttcagagcccaagggaaattctaaggagaagcggggagcttcttgaggcggtatgtcttaactctgtcaatgagaaacaagctgctattgctactaatcgaaagggccttgttttcttcaattggagtgacaagcagcataacaagagtttttcagagtacgtctggtcaggatctgattggccattagatggctgggctggctgtcagtctacacctactccaacttctatctctcctggtgttgatcttggtcggaaaaaagggtcacaacttggttcagttggagcaactacaggtttgagttctttagcaaagccaggaagagatctaactggtggtggagcatttggaattccaggctatgctggtattggggcctctgggtttgggtggggcgaacctgaagaatttgaggatttcattgatcctccagcaacacttgagaacatacattcaagagcattatcccgccatccctcattaccattgtttcttgttggttcaagcaatacacatgtgtatctgtgggagtttggtaaagctagtgctatggctacatatggtgttctacctgctgctaatattccaccgccttatgcactggcctccatatcatctgttcaatttgactgttatggacagcgggatgttgcctatgtgtctgcaagtagatcagttattgcttctgctggatatagttcaaatggttcaaatgttgttatatgggacacactgtctccaccagctacatctcaaacatctatcatgtgtcatgaaggaggagctcggtctatttctgtgtttgatagtgatagaggctatgggtctatctcaccgcttgttgtaactggtgggaaaaatggagatatagctttgcatgattgccgcttcctttctactggaaagtccaagcatcatagagttaccactgagcatggtgtcgaggcatcttccatgcatgacatcaaatctagtacttttggtggtactgacagtgggatggtctggcatataccaaaggctcatctaggtagtgtcacaaaggtaacgaccatcccaaataccagcttgttcttaaccggaagcaaagatggagatgtgaaactttgggatgctaaaaactcccagctagtctttcactggacaaagatgcatgaacggcacaccttttttcaaccaacctccaggggctttggcggtgttgttagagctgctgtaacagatctccaggtgttgcctaatggtttcgtttcatgtggaggtgatggttctgtgaagcttgttcagataaaagatgatctcgctgcagcatatcagcgttaaaacaagcaaagagggaagaagacatgctagaaaatgcgatggatgcagttggtcacttgatatcattctattttgctttgctcattatacttttgagatgctttactcctttcaggggtggtatagcaaggaggaagctatgatttaagagcactagagcagacatctaggcaatttgacatcagcatttatacgtcgagtttttatacgagcctggtttgtggctagtcaaactgccctcagtggtttttttgaggcctgaattttcgcactttggacagggcaatgcggaccataattttttgtacatctgtacagtcaaatatcttgttttgttggccaggatgttgatggagggtgtaaagttgtaagctagaagtatggagataccaagctacaatacctttttgttacttaatacaaaagtgctgggtttagggttaatgtacaatggcagagcaaatggaccaaacaaatattgtatttggtacgggagtatgtatgcggtttgtcaaggggaccgcagtagttcatcattcaaaacaatattttgcattattttgtactgtagatttcactgtttctatagtgaagtttgaatatgagaatgtagatgagtaaattgctagagata

SEQ ID NO: 9714 - DNA, 7756 bp, Zea Mays
atgggggagcgagacgcgctcccgccgctgccgctcgccctcggtccgccgcatctaatcccgccggcgcccacccgcgacccgcgcgccatcgccttcctccctgacctcgtgggcttccactgggtcgcctacgctgccggctccttccttgtcgtatcccacctcccctccccttgccgggacgacaacaacaacgacagttgctccccgttcttccgccaggtcatcgacctccgcgcccccgtgtccgcagttgcttggtgccgccgcgggagcggagaggtcgccgccgctacagacaattctatacacatattccagcctgcgcccgcctcttctccaggttcgtttggatggctcctgagatggtctatcaccgagacgttcgccatcgttgctgtatcctggaccggctgcggcaatggcattgtggcagttggcgcaggtgtttccatgtgggcaagattggagtcctcctggcagctcgcttggaggtctacaccgcaggtgccgcaagcccttgtctccactacctgttccatgcaaggtcctgtcgcgacagtggcagctcttgctccagccgagggcagtgtgcctgttcttgtgtttctgaacgatgccaggagggggctggagcaagctgagcttgtgcatcctcagcctgtttgtatgatccagtggagatcctgttcgttatacccccatgatctgtctgagatcaggagagagatcctcatgacttgctgctttgatgggactgtccggctatggagtaaggatgaggtgtctaggtcgaagaagcagcgtggtttgctaatatcattcagtgtcattgcagtaatagaggtgaacaacactctgaatggagtcctcggagttgatattattgtgagatggtccatggaatctggcagcgttgtgtcaagggacgaacaaggtagattcaagttgttttcaggtgatttgagggagagccaggttggtaaatgtgagtggcttgtaagtcttggccccgggccttgcattagcttttgggctatccattgtttggatgatgtatttccgccaaggtacccacggattactttatggaaacagagcaaacttcagggctggggggattcctatgttaaatcaggtcctctaaaatctatggaacagtcaatttttgttgaggctgtcatctcaagaaggctatgctctggtccacctgcaacatgttttttgcttcatttgctggtggatgattcgtttgcttggtcaaccgtatccaccaaactgttagctgattctgggaaccatgctttaagtgattctgctaaaaatatcttgtgttgtttgactaaacctgtcaaacaagatggacataagggtagcatcagacaagtgtctgtccatccatatagctgcgaaatagagttagctgtctccatggattcaaacagaatgatatttttctggtctctgtcaactttctcaactctcataccgacaatgcatgcacctatgtatcctctatggaagctgttgtgcaaatttgatttgcgtaacatttctgaagatttcgagtactcatgtttgtgttgggcaccttctgttactcgtgataatagatttcttgttcttggatgggaaagtggagtcgattgtttcgtagttagaattcagaaagaagaggttctttcatgccagaagattttcacaatccccttccttgcagaaagcaatacagaagggccacctgacagcattcatacgataccattagcttctaaatgcagcagctctctttccaccacaaaccaaggggcacatgcatgcttcagcaatgaaatgttttcagcagtggtttatgaaggttcttcagtctttccttctggcctggagggagaatataccacgtgcatttctgtaatgccgctgaataatactgtactgcctatacaacaacatgacccttacagaactgttccaggctatcatattgctactggttgctctgatggcactgtaaaactttggaagatgacttgtgcagaggactctttgcagactaagaaagaaagacacatctgggagctagtaggcatgtttggtgctcatcaaggaccaattgacatagtttcattgtcaggctgtggtagagttattactgttggcagaaatttgaagaaaaatagcacctccattcatatctgggaagcaacaaaaatcaggggagacgggaattttctgctaggagatacactaatgttgcaagaccatattgttggtttagatggactatccttaggtgatggacgatttctacttgcagtttatctagctaatgagttacgtatatattctcataagcacccgtccttccagaatgtactacacactaagaattcaaaagaagagcatctttggagctgtattgtattatcccattctcatcatgatattgttggctttctttggggaccaaaggcaactgttgtgcttgttcatgagaaccatctttcactcttcagttcatggctagtaactggagataatgagtacatgacccagatacattcttgtcctgtagttcatgagatgttgccatgtactaacaattttaacgaagctacttttggtaaactcaagttaccagaaaatttcaacagtggaaacattgatagcaataatgtcctgctaacagaccaacatagccactattctcatggtttatggagcttgctgcacatagctcatagattgagtggaccgttggcatcatatcacccaagagcacttatccagtatctttattcaggtgaatggaaacgtgcggatgctgctctgcaccatcttgttcggtccatgaaagtgagtgaaacttcaaagggcgtgtcaaattacagtacatgccatagtattccagaacttcctttgtctgaatactttgcggcaacagtgtccaacaacatttctaccaaggggtttatgtggggtgagaatagaagtaacacaacttttaatttgttgtcaccttcaacttcatttctttacgaggatggcaatttaggtattaatactacaactagtgcatctgaaaaaccagacattgttgagctccttgacaagagtttcagcaaatatggtataagtgactcagagaaaaatcagatacttgcaatttctgatcttatggctggaatcactgatcagagccattcctctccctacaaaaatcttgacgaagcaggaagaagttcgaacaattccatgctcttagaagatctgcagattcatccagtaatgaagggtgccgtgttgattctgcttccatagcctgggccttccaatctgattgtcaggatgatctacttaattctgtgcttcctgcagagccaacctggccagagatgcgaaagcttggtataggattatggtatacaaatgtgtcccaactaaggacaaggatggagaagttggcaaggttgcaatatcttaaaagcaaggatcccaaggattgtgctttgctctacatagcattgaacagaataaaagtgttggttggtcttttcaagattagtagagatgaaaaggataaacgtctatatgagtttctgtccagaaacttccaggaagaaaggcacaaggctgctgctctaaaaaatgcttatgtactaatgggaaggcaccaatgggagcttgctatagcttttttcctccttggtgatgatacttcatcagcagtgaatgtttgtgcaaagaaccttcaagatgaacagcttgccattgtaatttgtcggcttattgaaggatctggagggcctctggagcgtaatctcatttctaatgtgctacttccagatgcagttgagagaggagataactggctgtcaagcctgcttgagtggatgttaggaaattattgccagtccgtcaatagaatatttggttgccatccaaagttgcttattgatcaaaatgtgcttgcagacccagaattgggtcattattgtgcaattctctcagcaaaaagtagtttcagaaactctgttggtgaagctgtatctgcaaagttatctaagctttcatttgcagtggctgcatgtgccttgaataagtgcggactacctgtaagtttaccctgtgctggctaacttcttttcacctgtccaccctttgtatctgcatattttgtatctattattttgcattattctaattgttgaattttttcccactcattagcttgaagcactagaatgcttgtctactaactcgagcatagatggcaaggatagcataatcgcacatggtgatggagaccacaagattttttatggaatactgagccctgtctctgcttctaagaattggctgtcttcatctgtcattagtggcattgagtccaaccttaaactaactatggcttcaaaatatctatctagccttctgagaaagcactcactctgttcacaattgaacgcaccattatctgaagaaaaggtccttaatgagtacaacaatcatcaaattgaaaaactgacgtgtgatattacaacagtaatctcaatatttgataaaaggttctccctcaaatttgctgatatagctgagaagatcctaatcttttgtagccatgatggtttattgtttctagcgttacttcttaaacatgacaaaagtggaaattatattctggatgacaggtcagctatgctggcagttatggatctgtttgagtacattatagagttttctttttcttggttgtattatgacataaaatcattacttatcatgataaatccagtcctagctacttctgttaatggggattcctttcaagtactattagatcaactgatgcatgctatatgccacaaaaatcatgatatatcatcaagtacaggaggaatgccccatgctgcattgagtaaaacacaactgaaaaagagtgtgaattcaaatcttttagcagatgagaagtggcatttgataggcgcttctgtgtgggttcggttgatatctgtgcttgaacatcgtctaagggaattctttgagaaagagggacttgaacatgaagctggtgttagtggttcagaattcaggggtcttatcacttctgttgctgcaaagtttgttatggattccattcattttgtgtcatcttcattagtaccactgcatgcatcgttcttgaggaagaatttaccgatgaattcaagttcaagtttgctcttctggttagagtccaagttgcctcagcaactcccagtcagtgatagctatgatcacctctcgaggatttcacagctttcaaacagtgagaatatggaggcattgtttaatattttgtgggaaatatctgttaatcctgtggatgtttgtaatgcctttgtgagtgaaggagttaattgtttttccttaagcaacacgaatgtcactagatcttggaaggacataagatgtcctgtggttgagtgtgataaaattattactgaaagaagtggagaggaacatgaacacagacttggctccaagagattgggacagggattcgctgaaaaagcctcttataatggtgaagtgttgtatgaaactaaaaggagggagttgatcatacaaaaagagtttcagagcccaagggaaattctaaggagaagcggggagcttcttgaggcggtatgtcttaactctgtcaatgagaaacaagctgctattgctactaatcgaaagggccttgttttcttcaattggagtgacaagcagcataacaagagtttttcagagtacgtctggtcaggatctgattggccattagatggctgggctggctgtcagtctacacctactccaacttctatctctcctggtgttgatcttggtcggaaaaaagggtcacaacttggttcagttggagcaactacaggtttgagttctttagcaaagccaggaagagatctaactggtggtggagcatttggaattccaggctatgctggtattggggcctctgggtttgggtggggcgaacctgaagaatttgaggatttcattgatcctccagcaacacttgagaacatacattcaagagcattatcccgccatccctcattaccattgtttcttgttggttcaagcaatacacatgtgtatctgtgggagtttggtaaagctagtgctatggctacatatggtgttctacctgctgctaatattccaccgccttatgcactggcctccatatcatctgttcaatttgactgttatggacagcggtttgccactgctgcattagatggtaccatttgtacatggcaagttgaggtgggtggaagaagcaatgtctatcctacagagtcatctatatgctttgacagccacgcctcggatgttgcctatgtgtctgcaagtagatcagttattgcttctgctggatatagttcaaatggttcaaatgttgttatatgggacacactgtctccaccagctacatctcaaacatctatcatgtgtcatgaaggaggagctcggtctatttctgtgtttgatagtgatagaggctatgggtctatctcaccgcttgttgtaactggtgggaaaaatggagatatagctttgcatgattgccgcttcctttctactggaaagtccaagcatcatagagttaccactgagcatggtgtcgaggcatcttccatgcatgacatcaaatctagtacttttggtggtactgacagtgggatggtctggcatataccaaaggctcatctaggtagtgtcacaaaggtaacgaccatcccaaataccagcttgttcttaaccggaagcaaagatggagatgtgaaactttgggatgctaaaaactcccagctagtctttcactggacaaagatgcatgaacggcacaccttttttcaaccaacctccaggggctttggcggtgttgttagagtatgtagtactgtaaagactataaaatgtttaatgacttcgttcataaattttgttcatgttatggctgctgtaacagatctccaggtgttgcctaatggtttcgtttcatgtggaggtgatggttctgtgaagcttgttcagataaaagatgatctcgctgcagcatatcagcgttaaaacaagcaaagagggaagaagacatgctagaaaatgcgatggatgcagttggtcacttgatatcattctattttgctttgctcattatacttttgagatgctttactcctttcaggggtggtatagcaaggaggaagctatgatttaagagcactagagcagacatctaggcaatttgacatcagcatttatacgtcgagtttttatacgagcctggtttgtggctagtcaaactgccctcagtggtttttttgaggcctgaattttcgcactttggacagggcaatgcggaccataattttttgtacatctgtacagtcaaatatcttgttttgttggccaggatgttgatggagggtgtaaagttgtaagctagaagtatggagataccaagctacaatacctttttgttacttaatacaaaagtgctgggtttagggttaatgtacaatggcagagcaaatggaccaaacaaatattgtatttggtacgggagtatgtatgcggtttgtcaaggggaccgcagtagttcatcattcaaaacaatattttgcattattttgtactgtagatttcactgtttctatagtgaagtttgaatatgagaatgtagatgagtaaattgctagagata

SEQ ID NO: 9715 - DNA, 7966 bp, Zea Mays
ccgtggtattggcaaccggtgtccggtgagggggatccacgcaactcctgctaccaccaccatcgccgctacagcggcgcatgcagcagccggcacgacgatgggggagcgagacgcgctcccgccgctgccgctcgccctcggtccgccgcatctaatcccgccggcgcccacccgcgacccgcgcgccatcgccttcctccctgacctcgtgggcttccactgggtcgcctacgctgccggctccttccttgtcgtatcccacctcccctccccttgccgggacgacaacaacaacgacagttgctccccgttcttccgccaggtcatcgacctccgcgcccccgtgtccgcagttgcttggtgccgccgcgggagcggagaggtcgccgccgctacagacaattctatacacatattccagcctgcgcccgcctcttctccaggttcgtttggatggctcctgagatggtctatcaccgagacgttcgccatcgttgctgtatcctggaccggctgcggcaatggcattgtggcagttggcgcaggtgtttccatgtgggcaagattggagtcctcctggcagctcgcttggaggtctacaccgcaggtgccgcaagcccttgtctccactacctgttccatgcaaggtcctgtcgcgacagtggcagctcttgctccagccgagggcagtgtgcctgttcttgtgtttctgaacgatgccaggagggggctggagcaagctgagcttgtgcatcctcagcctgtttgtatgatccagtggagatcctgttcgttatacccccatgatctgtctgagatcaggagagagatcctcatgacttgctgctttgatgggactgtccggctatggagtaaggatgaggtgtctaggtcgaagaagcagcgtggtttgctaatatcattcagtgtcattgcagtaatagaggtgaacaacactctgaatggagtcctcggagttgatattattgtgagatggtccatggaatctggcagcgttgtgtcaagggacgaacaaggtagattcaagttgttttcaggtgatttgagggagagccaggttggtaaatgtgagtggcttgtaagtcttggccccgggccttgcattagcttttgggctatccattgtttggatgatgtatttccgccaaggtacccacggattactttatggaaacagagcaaacttcagggctggggggattcctatgttaaatcaggtcctctaaaatctatggaacagtcaatttttgttgaggctgtcatctcaagaaggctatgctctggtccacctgcaacatgttttttgcttcatttgctggtggatgattcgtttgcttggtcaaccgtatccaccaaactgttagctgattctgggaaccatgctttaagtgattctgctaaaaatatcttgtgttgtttgactaaacctgtcaaacaagatggacataagggtagcatcagacaagtgtctgtccatccatatagctgcgaaatagagttagctgtctccatggattcaaacagaatgatatttttctggtctctgtcaactttctcaactctcataccgacaatgcatgcacctatgtatcctctatggaagctgttgtgcaaatttgatttgcgtaacatttctgaagatttcgagtactcatgtttgtgttgggcaccttctgttactcgtgataatagatttcttgttcttggatgggaaagtggagtcgattgtttcgtagttagaattcagaaagaagaggttctttcatgccagaagattttcacaatccccttccttgcagaaagcaatacagaagggccacctgacagcattcatacgataccattagcttctaaatgcagcaggtgttttgtgaacaacagtttcctagtagtatgtatatggaagaagaccttcaaaggtttctcatggaaagtagtattgcattcagaaaatcaatatgtcaatgggagatgcttgtgtggttttgctcctagctctctttccaccacaaaccaaggggcacatgcatgcttcagcaatgaaatgttttcagcagtggtttatgaaggttcttcagtctttccttctggcctggagggagaatataccacgtgcatttctgtaatgccgctgaataatactgtactgcctatacaacaacatgacccttacagaactgttccaggctatcatattgctactggttgctctgatggcactgtaaaactttggaagatgacttgtgcagaggactctttgcagactaagaaagaaagacacatctgggagctagtaggcatgtttggtgctcatcaaggaccaattgacatagtttcattgtcaggctgtggtagagttattactgttggcagaaatttgaagaaaaatagcacctccattcatatctgggaagcaacaaaaatcaggggagacgggaattttctgctaggagatacactaatgttgcaagaccatattgttggtttagatggactatccttaggtgatggacgatttctacttgcagtttatctagctaatgagttacgtatatattctcataagcacccgtccttccagaatgtactacacactaagaattcaaaagaagagcatctttggagctgtattgtattatcccattctcatcatgatattgttggctttctttggggaccaaaggcaactgttgtgcttgttcatgagaaccatctttcactcttcagttcatggctagtaactggagataatgagtacatgacccagatacattcttgtcctgtagttcatgagatgttgccatgtactaacaattttaacgaagctacttttggtaaactcaagttaccagaaaatttcaacagtggaaacattgatagcaataatgtcctgctaacagaccaacatagccactattctcatggtttatggagcttgctgcacatagctcatagattgagtggaccgttggcatcatatcacccaagagcacttatccagtatctttattcagctatagtcaaggtggttctaactgcttctaccatttatcatgctattgccctcgagcttcctaaatgggtaatcaaggtcactgataaatggcgcaaaccctttggaaagttcaagagagtgccagtagatggagttggggggtggggtggggggctaggtgaatggaaacgtgcggatgctgctctgcaccatcttgttcggtccatgaaagtgagtgaaacttcaaagggcgtgtcaaattacagtacatgccatagtattccagaacttcctttgtctgaatactttgcggcaacagtgtccaacaacatttctaccaaggggtttatgtggggtgagaatagaagtaacacaacttttaatttgttgtcaccttcaacttcatttctttacgaggatggcaatttaggtattaatactacaactagtgcatctgaaaaaccagacattgttgagctccttgacaagagtttcagcaaatatggtataagtgactcagagaaaaatcagatacttgcaatttctgatcttatggctggaatcactgatcagagccattcctctccctacaaaaatcttgacgaagcaggaagaagttcgaacaattccatgctcttagaagatctgcagattcatccagtaatgaagggtgccgtgttgattctgcttccatagcctgggccttccaatctgattgtcaggatgatctacttaattctgtgcttcctgcagagccaacctggccagagatgcgaaagcttggtataggattatggtatacaaatgtgtcccaactaaggacaaggatggagaagttggcaaggttgcaatatcttaaaagcaaggatcccaaggattgtgctttgctctacatagcattgaacagaataaaagtgttggttggtcttttcaagattagtagagatgaaaaggataaacgtctatatgagtttctgtccagaaacttccaggaagaaaggcacaaggctgctgctctaaaaaatgcttatgtactaatgggaaggcaccaatgggagcttgctatagcttttttcctccttggtgatgatacttcatcagcagtgaatgtttgtgcaaagaaccttcaagatgaacagcttgccattgtaatttgtcggcttattgaaggatctggagggcctctggagcgtaatctcatttctaatgtgctacttccagatgcagttgagagaggagataactggctgtcaagcctgcttgagtggatgttaggaaattattgccagtccgtcaatagaatatttggttgccatccaaagttgcttattgatcaaaatgtgcttgcagacccagaattgggtcattattgtgcaattctctcagcaaaaagtagtttcagaaactctgttggtgaagctgtatctgcaaagttatctaagctttcatttgcagtggctgcatgtgccttgaataagtgcggactacctcttgaagcactagaatgcttgtctactaactcgagcatagatggcaaggatagcataatcgcacatggtgatggagaccacaagattttttatggaatactgagccctgtctctgcttctaagaattggctgtcttcatctgtcattagtggcattgagtccaaccttaaactaactatggcttcaaaatatctatctagccttctgagaaagcactcactctgttcacaattgaacgcaccattatctgaagaaaaggtccttaatgagtacaacaatcatcaaattgaaaaactgacgtgtgatattacaacagtaatctcaatatttgataaaaggttctccctcaaatttgctgatatagctgagaagatcctaatcttttgtagccatgatggtttattgtttctagcgttacttcttaaacatgacaaaagtggaaattatattctggatgacaggtcagctatgctggcagttatggatctgtttgagtacattatagagttttctttttcttggttgtattatgacataaaatcattacttatcatgataaatccagtcctagctacttctgttaatggggattcctttcaagtactattagatcaactgatgcatgctatatgccacaaaaatcatgatatatcatcaagtacaggaggaatgccccatgctgcattgagtaaaacacaactgaaaaagagtgtgaattcaaatcttttagcagatgagaagtggcatttgataggcgcttctgtgtgggttcggttgatatctgtgcttgaacatcgtctaagggaattctttgagaaagagggacttgaacatgaagctggtgttagtggttcagaattcaggggtcttatcacttctgttgctgcaaagtttgttatggattccattcattttgtgtcatcttcattagtaccactgcatgcatcgttcttgaggaagaatttaccgatgaattcaagttcaagtttgctcttctggttagagtccaagttgcctcagcaactcccagtcagtgatagctatgatcacctctcgaggatttcacagctttcaaacagtgagaatatggaggcattgtttaatattttgtgggaaatatctgttaatcctgtggatgtttgtaatgcctttgtgagtgaaggagttaattgtttttccttaagcaacacgaatgtcactagatcttggaaggacataagatgtcctgtggttgagtgtgataaaattattactgaaagaagtggagaggaacatgaacacagacttggctccaagagattgggacagggattcgctgaaaaagcctcttataatggtgaagtgttgtatgaaactaaaaggagggagttgatcatacaaaaagagtttcagagcccaagggaaattctaaggagaagcggggagcttcttgaggcggtatgtcttaactctgtcaatgagaaacaagctgctattgctactaatcgaaagggccttgttttcttcaattggagtgacaagcagcataacaagagtttttcagagtacgtctggtcaggatctgattggccattagatggctgggctggctgtcagtctacacctactccaacttctatctctcctggtgttgatcttggtcggaaaaaagggtcacaacttggttcagttggagcaactacaggtttgagttctttagcaaagccaggaagagatctaactggtggtggagcatttggaattccaggctatgctggtattggggcctctgggtttgggtggggcgaacctgaagaatttgaggatttcattgatcctccagcaacacttgagaacatacattcaagagcattatcccgccatccctcattaccattgtttcttgttggttcaagcaatacacatgtgtatctgtgggagtttggtaaagctagtgctatggctacatatggtgttctacctgctgctaatattccaccgccttatgcactggcctccatatcatctgttcaatttgactgttatggacagcggtttgccactgctgcattagatggtaccatttgtacatggcaagttgaggtgggtggaagaagcaatgtctatcctacagagtcatctatatgctttgacagccacgcctcggatgttgcctatgtgtctgcaagtagatcagttattgcttctgctggatatagttcaaatggttcaaatgttgttatatgggacacactgtctccaccagctacatctcaaacatctatcatgtgtcatgaaggaggagctcggtctatttctgtgtttgatagtgatagaggctatgggtctatctcaccgcttgttgtaactggtgggaaaaatggagatatagctttgcatgattgccgcttcctttctactggaaagtccaagcatcatagagttaccactgagcatggtgtcgaggcatcttccatgcatgacatcaaatctagtacttttggtggtactgacagtgggatggtctggcatataccaaaggctcatctaggtagtgtcacaaaggtaacgaccatcccaaataccagcttgttcttaaccggaagcaaagatggagatgtgaaactttgggatgctaaaaactcccagctagtctttcactggacaaagatgcatgaacggcacaccttttttcaaccaacctccaggggctttggcggtgttgttagagctgctgtaacagatctccaggtgttgcctaatggtttcgtttcatgtggaggtgatggttctgtgaagcttgttcagataaaagatgatctcgctgcagcatatcagcgttaaaacaagcaaagagggaagaagacatgctagaaaatgcgatggatgcagttggtcacttgatatcattctattttgctttgctcattatacttttgagatgctttactcctttcaggggtggtatagcaaggaggaagctatgatttaagagcactagagcagacatctaggcaatttgacatcagcatttatacgtcgagtttttatacgagcctggtttgtggctagtcaaactgccctcagtggtttttttgaggcctgaattttcgcactttggacagggcaatgcggaccataattttttgtacatctgtacagtcaaatatcttgttttgttggccaggatgttgatggagggtgtaaagttgtaagctagaagtatggagataccaagctacaatacctttttgttacttaatacaaaagtgctgggtttagggttaatgtacaatggcagagcaaatggaccaaacaaatattgtatttggtacgggagtatgtatgcggtttgtcaaggggaccgcagtagttcatcattcaaaacaatattttgcattattttgtactgtagatttcactgtttctatagtgaagtttgaatatgagaatgtagatgagtaaattgctagagata

SEQ ID NO: 9716 - DNA, 8063 bp, Zea Mays
cgcaactcctgctaccaccaccatcgccgctacagcggcgcatgcagcagccggcacgacgatgggggagcgagacgcgctcccgccgctgccgctcgccctcggtccgccgcatctaatcccgccggcgcccacccgcgacccgcgcgccatcgccttcctccctgacctcgtgggcttccactgggtcgcctacgctgccggctccttccttgtcgtatcccacctcccctccccttgccgggacgacaacaacaacgacagttgctccccgttcttccgccaggtcatcgacctccgcgcccccgtgtccgcagttgcttggtgccgccgcgggagcggagaggtcgccgccgctacagacaattctatacacatattccagcctgcgcccgcctcttctccaggttcgtttggatggctcctgagatggtctatcaccgagacgttcgccatcgttgctgtatcctggaccggctgcggcaatggcattgtggcagttggcgcaggtgtttccatgtgggcaagattggagtcctcctggcagctcgcttggaggtctacaccgcaggtgccgcaagcccttgtctccactacctgttccatgcaaggtcctgtcgcgacagtggcagctcttgctccagccgagggcagtgtgcctgttcttgtgtttctgaacgatgccaggagggggctggagcaagctgagcttgtgcatcctcagcctgtttgtatgatccagtggagatcctgttcgttatacccccatgatctgtctgagatcaggagagagatcctcatgacttgctgctttgatgggactgtccggctatggagtaaggatgaggtgtctaggtcgaagaagcagcgtggtttgctaatatcattcagtgtcattgcagtaatagaggtgaacaacactctgaatggagtcctcggagttgatattattgtgagatggtccatggaatctggcagcgttgtgtcaagggacgaacaaggtagattcaagttgttttcaggtgatttgagggagagccaggttggtaaatgtgagtggcttgtaagtcttggccccgggccttgcattagcttttgggctatccattgtttggatgatgtatttccgccaaggtacccacggattactttatggaaacagagcaaacttcagggctggggggattcctatgttaaatcaggtcctctaaaatctatggaacagtcaatttttgttgaggctgtcatctcaagaaggctatgctctggtccacctgcaacatgttttttgcttcatttgctggtggatgattcgtttgcttggtcaaccgtatccaccaaactgttagctgattctgggaaccatgctttaagtgattctgctaaaaatatcttgtgttgtttgactaaacctgtcaaacaagatggacataagggtagcatcagacaagtgtctgtccatccatatagctgcgaaatagagttagctgtctccatggattcaaacagaatgatatttttctggtctctgtcaactttctcaactctcataccgacaatgcatgcacctatgtatcctctatggaagctgttgtgcaaatttgatttgcgtaacatttctgaagatttcgagtactcatgtttgtgttgggcaccttctgttactcgtgataatagatttcttgttcttggatgggaaagtggagtcgattgtttcgtagttagaattcagaaagaagaggttctttcatgccagaagattttcacaatccccttccttgcagaaagcaatacagaagggccacctgacagcattcatacgataccattagcttctaaatgcagcagctctctttccaccacaaaccaaggggcacatgcatgcttcagcaatgaaatgttttcagcagtggtttatgaaggttcttcagtctttccttctggcctggagggagaatataccacgtgcatttctgtaatgccgctgaataatactgtactgcctatacaacaacatgacccttacagaactgttccaggctatcatattgctactggttgctctgatggcactgtaaaactttggaagatgacttgtgcagaggactctttgcagactaagaaagaaagacacatctgggagctagtaggcatgtttggtgctcatcaaggaccaattgacatagtttcattgtcaggctgtggtagagttattactgttggcagaaatttgaagaaaaatagcacctccattcatatctgggaagcaacaaaaatcaggggagacgggaattttctgctaggagatacactaatgttgcaagaccatattgttggtttagatggactatccttaggtgatggacgatttctacttgcagtttatctagctaatgagttacgtatatattctcataagcacccgtccttccagaatgtactacacactaagaattcaaaagaagagcatctttggagctgtattgtattatcccattctcatcatgatattgttggctttctttggggaccaaaggcaactgttgtgcttgttcatgagaaccatctttcactcttcagttcatggctagtaactggagataatgagtacatgacccagatacattcttgtcctgtagttcatgagatgttgccatgtactaacaattttaacgaagctacttttggtaaactcaagttaccagaaaatttcaacagtggaaacattgatagcaataatgtcctgctaacagaccaacatagccactattctcatggtttatggagcttgctgcacatagctcatagattgagtggaccgttggcatcatatcacccaagagcacttatccagtatctttattcaggtgaatggaaacgtgcggatgctgctctgcaccatcttgttcggtccatgaaagtgagtgaaacttcaaagggcgtgtcaaattacagtacatgccatagtattccagaacttcctttgtctgaatactttgcggcaacagtgtccaacaacatttctaccaaggggtttatgtggggtgagaatagaagtaacacaacttttaatttgttgtcaccttcaacttcatttctttacgaggatggcaatttaggtattaatactacaactagtgcatctgaaaaaccagacattgttgagctccttgacaagagtttcagcaaatatggtataagtgactcagagaaaaatcagatacttgcaatttctgatcttatggctggaatcactgatcagagccattcctctccctacaaaaatcttgacgaagcaggaagaaggttctgggttgctgtgcagttcgaacaattccatgctcttagaagatctgcagattcatccagtaatgaagggtgccgtgttgattctgcttccatagcctgggccttccaatctgattgtcaggatgatctacttaattctgtgcttcctgcagagccaacctggccagagatgcgaaagcttggtataggattatggtatacaaatgtgtcccaactaaggacaaggatggagaagttggcaaggttgcaatatcttaaaagcaaggatcccaaggattgtgctttgctctacatagcattgaacagaataaaagtgttggttggtcttttcaagattagtagagatgaaaaggataaacgtctatatgagtttctgtccagaaacttccaggaagaaaggcacaaggctgctgctctaaaaaatgcttatgtactaatgggaaggcaccaatgggagcttgctatagcttttttcctccttggtgatgatacttcatcagcagtgaatgtttgtgcaaagaaccttcaagatgaacagcttgccattgtaatttgtcggcttattgaaggatctggagggcctctggagcgtaatctcatttctaatgtgctacttccagatgcagttgagagaggagataactggctgtcaagcctgcttgagtggatgttaggaaattattgccagtccgtcaatagaatatttggttgccatccaaagttgcttattgatcaaaatgtgcttgcagacccagaattgggtcattattgtgcaattctctcagcaaaaagtagtttcagaaactctgttggtgaagctgtatctgcaaagttatctaagctttcatttgcagtggctgcatgtgccttgaataagtgcggactacctcttgaagcactagaatgcttgtctactaactcgagcatagatggcaaggatagcataatcgcacatggtgatggagaccacaagattttttatggaatactgagccctgtctctgcttctaagaattggctgtcttcatctgtcattagtggcattgagtccaaccttaaactaactatggcttcaaaatatctatctagccttctgagaaagcactcactctgttcacaattgaacgcaccattatctgaagaaaaggtccttaatgagtacaacaatcatcaaattgaaaaactgacgtgtgatattacaacagtaatctcaatatttgataaaaggttctccctcaaatttgctgatatagctgagaagatcctaatcttttgtagccatgatggtttattgtttctagcgtatgttttgttatggggtactaggtcaccagatgttgcaactgataattatattcttgaatgtcaccctctctgcccaattgattatctgttattgttttcattcaaagagagctgcaagttttttagtcgatatgttgtcctctcctccatgtgttctgttctgaatatggaggacaccaattctactgcatgggcacttaaagagagacataagtacattgtaataagtttgtcaaattacctgaatgtcagcaggttacttcttaaacatgacaaaagtggaaattatattctggatgacaggtcagctatgctggcagttatggatctgtttgagtacattatagagttttctttttcttggttgtattatgacataaaatcattacttatcatgataaatccagtcctagctacttctgttaatggggattcctttcaagtactattagatcaactgatgcatgctatatgccacaaaaatcatgatatatcatcaagtacaggaggaatgccccatgctgcattgagtaaaacacaactgaaaaagagtgtgaattcaaatcttttagcagatgagaagtggcatttgataggcgcttctgtgtgggttcggttgatatctgtgcttgaacatcgtctaagggaattctttgagaaagagggacttgaacatgaagctggtgttagtggttcagaattcaggggtcttatcacttctgttgctgcaaagtttgttatggattccattcattttgtgtcatcttcattagtaccactgcatgcatcgttcttgaggaagaatttaccgatgaattcaagttcaagtttgctcttctggttagagtccaagttgcctcagcaactcccagtcagtgatagctatgatcacctctcgaggatttcacagctttcaaacagtgagaatatggaggcattgtttaatattttgtgggaaatatctgttaatcctgtggatgtttgtaatgcctttgtgagtgaaggagttaattgtttttccttaagcaacacgaatgtcactagatcttggaaggacataagatgtcctgtggttgagtgtgataaaattattactgaaagaagtggagaggaacatgaacacagacttggctccaagagattgggacagggattcgctgaaaaagcctcttataatggtgaagtgttgtatgaaactaaaaggagggagttgatcatacaaaaagagtttcagagcccaagggaaattctaaggagaagcggggagcttcttgaggcggtatgtcttaactctgtcaatgagaaacaagctgctattgctactaatcgaaagggccttgttttcttcaattggagtgacaagcagcataacaagagtttttcagagtacgtctggtcaggatctgattggccattagatggctgggctggctgtcagtctacacctactccaacttctatctctcctggtgttgatcttggtcggaaaaaagggtcacaacttggttcagttggagcaactacaggtttgagttctttagcaaagccaggaagagatctaactggtggtggagcatttggaattccaggctatgctggtattggggcctctgggtttgggtggggcgaacctgaagaatttgaggatttcattgatcctccagcaacacttgagaacatacattcaagagcattatcccgccatccctcattaccattgtttcttgttggttcaagcaatacacatgtgtatctgtgggagtttggtaaagctagtgctatggctacatatggtgttctacctgctgctaatattccaccgccttatgcactggcctccatatcatctgttcaatttgactgttatggacagcggtttgccactgctgcattagatggtaccatttgtacatggcaagttgaggtgggtggaagaagcaatgtctatcctacagagtcatctatatgctttgacagccacgcctcggatgttgcctatgtgtctgcaagtagatcagttattgcttctgctggatatagttcaaatggttcaaatgttgttatatgggacacactgtctccaccagctacatctcaaacatctatcatgtgtcatgaagttgtcatggagttcaacagtgagttactaaaccgcaaggggccagtgcttgcatacagcagcctgactagggttgtggccgagaggtttttgggaggtgaatttgagtcctacccaggtggtttttgccatattagcaccatatcatcaggaggagctcggtctatttctgtgtttgatagtgatagaggctatgggtctatctcaccgcttgttgtaactggtgggaaaaatggagatatagctttgcatgattgccgcttcctttctactggaaagtccaagcatcatagagttaccactgagcatggtgtcgaggcatcttccatgcatgacatcaaatctagtacttttggtggtactgacagtgggatggtctggcatataccaaaggctcatctaggtagtgtcacaaaggtaacgaccatcccaaataccagcttgttcttaaccggaagcaaagatggagatgtgaaactttgggatgctaaaaactcccagctagtctttcactggacaaagatgcatgaacggcacaccttttttcaaccaacctccaggggctttggcggtgttgttagagctgctgtaacagatctccaggtgttgcctaatggtttcgtttcatgtggaggtgatggttctgtgaagcttgttcagataaaagatgatctcgctgcagcatatcagcgttaaaacaagcaaagagggaagaagacatgctagaaaatgcgatggatgcagttggtcacttgatatcattctattttgctttgctcattatacttttgagatgctttactcctttcaggggtggtatagcaaggaggaagctatgatttaagagcactagagcagacatctaggcaatttgacatcagcatttatacgtcgagtttttatacgagcctggtttgtggctagtcaaactgccctcagtggtttttttgaggcctgaattttcgcactttggacagggcaatgcggaccataattttttgtacatctgtacagtcaaatatcttgttttgttggccaggatgttgatggagggtgtaaagttgtaagctagaagtatggagataccaagctacaatacctttttgttacttaatacaaaagtgctgggtttagggttaatgtacaatggcagagcaaatggaccaaacaaatattgtatttggtacgggagtatgtatgcggtttgtcaaggggaccgcagtagttcatcattcaaaacaatattttgcattattttgtactgtagatttcactgtttctatagtgaagtttgaatatgagaatgtagatgagtaaattgctagagata

SEQ ID NO: 9717 - DNA, 1669 bp, Zea Mays
atagcccctcacgccagccgccaatgccccaatcccgtaatcgcagcctcgccccgctcgcatcttcctctccctctcagcactggtgctcaatctacaggttgtcccgctccctacacacccgccctccggtgtgaacctccatgacgtccacaaccactctccggtatgaatcccgcgtgcgcttacacgaagattggtaatagtggcgacccagtcgcagccgtggaccttctcctcctcatcgcttgctcgttgtcgtcttttgcctacgtctgcacccgacgctgctacccttcgctcacctgttcatcatcctttcagatctgctgtcgtgacctcatccagccgtgctgtggcagtggatcgaagttcgctccagctctgattgggggaaaatgactagggtatcaagtggaaaaacataatggtccaggttctactgcggcacctctttcaggctaagcatctaaacaacaatatgaattccactactatatgtgccacttgaagttgttatgtcaaaataatatggtgaaaacgagcgtctattgggatctattttttatcttgcaaatgatcttcctgaaggagactgccttcgtccccttcatcactgctaatgaccgtgacttggagacccgacagcggccctcgacgttgtcgccgccgagcccatgctggttccaccagtggtccaccacccggatgtggtccgccaagacgagcagtaacggtggcagcgaggcgaggtggtagatccagcaccgcttctgcacgaccatccattcctccacccagagcatgtacccaggcttgcctctcctcggggaacatgccgaggtcgtccgactggagcagaaggcgacatcgctcaacaagctggtcgaggagcagtgcgagagcataaacgatctcaagtccaagagggaagctgaaccttgttcttctgccatcatctagcatgcggcttacctttgtttgtgatgatggttatccagagcaactagctctcttgagcaacgactttgaattttcggaagttatgattgaagaaatatcagctgataattctggacgctctttcctaatcagaatttcagaatctaaagtgttttactactggtgtgctgagaagtcgaaggaagattgaatggaacttcttgcaaaggtcttcaagggagaagcggcttaaaatgtgtgagcaggtattttcggactcgtaccagaaagggaaaagctacaaaggttgacacagcgccgaagctgtgaagcaggaaagcttcggcatgttcgcagaaaagggaaccgacttaaagatgaaaaggccatttagacctcgatagagtgctatagaattatcaccaaatgtaaagggcatgtatgtaattttgtatgggttgtaccccgtgcctataaataggtgaacagtacccccgtactgttcacgttgacttggcatttgcttttgcgtcacacttgtattttcatctccttccaaaccgaaggtacatttataatttgatattgtctctatttctctataatgatataataaagttaaatgaatgatgttatatgattattcgtgctatcttttatgtttcatatgcttcgtctttcattaatgtatactgtgatgatgaaggttcgtccttcatgaccttcg

SEQ ID NO: 9718 - DNA, 1031 bp, Zea Mays
gctcctccctctatccacttgcaacggtcgagaggaagcggaggtccatatcgctcattcccgcccgtcccgcaaccaccaccgcggccgcggtgccatggcatccgccgccggcgccgccttgtgcccatgctctttctccaccgtactctcctcctccccctcaactcccttccgtcccgcaaggacgacgcctcgcccttctctccgcccgctgccgcgccgcgccaggctaccgctgcggccgggccactcggtactgaggtgcctcccgaaatgcgactcggggaagccggacggaggaggagatgctgggttatcgggtcggaaggcggcccggccagcgggtcagggaggacccaggcggcccgcacagttcggcgcgtcgtcgtgcggactcgcattcacgacggtggcgggggtgataatgctccaggcatcgcagcaggcgcttgccgccacgcagttcgctggcctgcagcctgcggacgtgctgggggatctcggggacgtcagtacaggttttgcttcagctttcctgttgatcttcttttctgagctaggggacagaacgttcttcattgcggcactgttagcagctagaagttctggagctgtcatttttctaggcacatttggagctcttgcggtaatgaccattatatctgtagttcttggtcgagcattccactatgttgatggcatcattccgttcagctttggtggtactgatttcccagttgatgacattgctgcggcatgtctcttggtttattatggggttactacattacttgatgcagcctcaggtgatgatgaaaagatcaatgaggagcaagaggagggagatcatggtcatgtgaaactagtgctgaacttaagctacgtgatggcacggttggttagaaaaaactcgaccgatttcatgggtcaatataatgtctgtaagtgttctcgttttgtgtaatatagatcaaggggtcagaaaagcggtttaaaaccgcaccaaacttctctgtgttccactgtcg

SEQ ID NO: 9719 - DNA, 1681 bp, Zea Mays
ccgaagattgcgaccagacttgcgttcgagctcggagctcctccctctatccacttgcaacggtcgagaggaagcggaggtccatatcgctcattcccgcccgtcccgcaaccaccaccgcggccgcggtgccatggcatccgccgccggcgccgccttgtgcccatgctctttctccaccgtactctcctcctccccctcaactcccttccgtcccgcaaggacgacgcctcgcccttctctccgcccgctgccgcgccgcgccaggctaccgctgcggccgggccactcggtactgaggtgcctcccgaaatgcgactcggggaagccggacggaggaggagatgctgggttatcgggtcggaaggcggcccggccagcgggtcagggaggacccaggcggcccgcacagttcggcgcgtcgtcgtgcggactcgcattcacgacggtggcgggggtgataatgctccaggcatcgcagcaggcgcttgccgccacgcagttcgctggcctgcagcctgcggacgtgctgggggatctcggggacgtcagtacaggctttcctgttgatcttcttttctgagctaggggacagaacgttcttcattgcggcactgttagcagctagaagttctggagctgtcatttttctaggcacatttggagctcttgcggtaatgaccattatatctgtagttcttggtcgagcattccactatgttgatggcatcattccgttcagctttggtggtactgatttcccagttgatgacattgctgcggcatgtctcttggtttattatggggttactacattacttgatgcagcctcaggtgatgatgaaaagatcaatgaggagcaagaggaggctgagttagcagtatcgaaattttctggaaatggtgcgggggtcatgtctgctgctggtactattgctagcacattcgtattggtttttgttgctgaatggggtgataaatcatttttctccacaattgcactagcagcagcttcatcccctctgggtgtcattgcgggatcactagctggtcatgccattgcaacattgattgcagttcttggtggctctttgctgggaacattcctgtctgaaaagattatagcatacattggagggagcctattcttggcctttgctgcgattaccatagttgagatagtgacttgaaaagggagttccagcttccacaattcataaaaagtactgatcttttgtcagggcaatgaaaaatcagcttgatcgtaatggtagtacattgatgtgttaccgaacatgattgtccacaggaacttcattgttcgtatgggacgtcctaggcttgcgtagagtgttttgtttctggtgatgagaatttctgcttctttatccaagaacaatgtttttgtcatcatcatgatttgtagtggaaacactgatagtcaggttggtcggaagatgggactgggagcaaaactatgaattccatgtagcttttgaacttcctcttacattatttacaagtatatgaatcagccttttcgtatttatggggaagacttccctggtttatgtcttccctagactttattcacactagttcaaccctttttatatgaatctaagtgttagattggaagccctaaccctaactagagttgggatgttgtattaataagtag

SEQ ID NO: 9720 - DNA, 4337 bp, Zea Mays
cgatcccggttgggaatggcctaaacgaacgaacaaggccactcggccccatccggcatccccgacccccgagcgtcttctttcgtctgctcgctctgcgctcgcatctaccatggagactagggtctagggtttagtgcgccgctgcctacatcgccgccatcctcaacttcctacgggatcctgacgaggcgccgtatcatcctcaacgccgcgaacctccgctcccacgttatcctcacgcccaccagtagctctcggcctctacctcgttaaggcttgatatttgactgggacactgggcaaattttaacaagtttcagcaatggggtttgataatgaatgcatcttgagtattcaatcccttcctggtgaatatttctgccctgtttgccggacacttgtatatccgaatgaggccctacaaactcaatgcacacatctctactgcaaatcctgcttggcatatgtagtggcaaccacacaagcttgtccttatgatggataccttgtaacagaagctgattccaagcctcttgtggaatcaaataaaacccttgctgagactattggcaaagtcgcggtctattgcctgtataataagagtggatgccaatggcatggagagctatctgcctgtgtcacacatggtactgcttgtgcatatgggaactctcctgttgtttgcaatcgttgtgggacacaaattgtgcatcgtcaagtgcaagaacatgctcaagtctgccatggcttacaatctcaaacacaacaagctgatggtagtcaggtgcagctggcaacggcaacaactcagccagtcatccaagattcatcacttgcctcagctggatctgctgcagctgcagctacaaccctaacaaagccatcttcaactacagccacagctgtaacagattctgcagcagcaacaggaggggcagctggtgcaaccacagcagctgtgccttcttcagcttcatctatttctgcttcccaaactccaacagctgagcagtggtaccagcagcagcagcagctccaatactcgcaatactaccagcagcagcaccctggatccaacccttacatgcagcaacatcaacaatatgaccaataccagcaggcatatcagcaatacatgcaacctccaatgcaagtaccatcccaaaatgtggtgcaaggatctgcacaacctgcttcttatgttcagcctcaagttcagtcctcccaggtgatgatgcaagcccaaagtcagccccaggtccatccattgacgagtcagccacagcttcaacagcatccagttcaaccccgaccccaaagtcaccctcatatttcccatgttcaagcaccttcaggtcagtcgcagcttcatcaaccaattcagtcagcccaagttccacaggtccaaccaagtcaagttcctctccaaccatctggtctccaagtacaatctgcagcacatccatctgctcctactcaagttggtaatcagcaatttgcgactcaagcaatggcgtatcaggtccagccacatgtacaagctcaacctccgcagcagcaacatattgttgcacatcaacaacatccacatatgcaagctttacccctacagcaaaatattcaacctaagatgcagctaaactctcaagttcagctacagcctccacatgtccagcagcaagcttacccacaatctcaggtctatcctcaacagacacatcatatgcactcccagaatactacatatgcacagcagcaaacccaaggtgctttgatgcaacctgtacatgtgtcccaccaacaaacacatgtttctcatcatcctgcaccgatgcgtcctccatcgtcaggccatcagccagctttgcagcatcctcaggcccagggaattcaacatacatcacaacatgaaaaacatattgggtttcatgctcagtggccaacaatgtattccaacattccttcccaagcaccaccacagggattgtctgtgcactcatctgtttcctcacaatcagttcaatcataccagcaaggaatgtcttcatcacaacagatgcattcccaacctggtcagccatatacacaacagcatgttactggcaatactggacaacatgttcaaacttctgctggcagacctatggcccatcttgcaccaacacagcaatttcagcagcaacatccagcaatgcttagaactgagtcacctgctgctgggcactctattgggcagggtcctttagatcttgaaaaacatacttcaaaatcagggaagttggataatgcaactattgctgctgtcggtgaaaataaaaatagtggtcctgagtcagttgtcatgagacctacaaagtcacaattgggtgatgaaaacatgaacagcgaacacaatggttttgttggtgttagaaaagatgcagtgcaaactggcattgtatcacacaatttagatggttcaattaggagggatgggaatactgaccaggcaggcaattcacatggcccacttgtgcagggaggcaaagatcacaaggcttcagatgcatctactgatcatgagaaaggacgactgtttcaacaggcatcactgcaaaatgcaggggcaccgggctcttatgtgcccccaggtgtggtaccacatccatctggaccagataaaatgcttcctcagcatatgacgaatcatggtcatatgcatggtttctctgaaaatatccgtcctccgctgcaacaaccatatggtgtgtttcattctggaacgataacaaggccatttggagagaaccagattcagatgccaatgccacagcctgggggtatcagacctggtgatggtatgattcgtccttgtttggttggcccattacctggacatcatggtgcagtgttgccttcttttgatcttgaacgtttgggtcagccacgtcctcttggaatgttgaacagcaatgactttggtggtgaggggttcaacgcttcagggggtgcagcgtatcctgaaagacatgataataccgaagacagtcggaaacattttccagcaccagcccctctagatgatcagggcttgcgaagggaccctagacattttgagagagctttaggtagacctgatggtttccttgattcagtacctggaaggcctccatttgcaaaccacagaagtgcaggtttgcatgaggattttccaagaaagcaaaatgcaactgccagtcaccctgacttcctgtcacatggagcagaatttgatcatcacagggctattggaatgcctaatttcagaaatccaggcccatttgctcaagggacaagtggcggtcctggtggccctcctaaacaccagcttggctctggtaaccttcctgggaatttacattcttttgagggtgacatgcatccaggtgaccctcatcttgtcgctgaatatgctcagcatggatttcctaaaactgcagcacactttggtttgggtggattcttgagaaacgggaattctggttggtgccgaatatgcatgtttaactgtgggagtgcagagaatctggatttgcatgtacaaacaagggaacatcagcaatgtgcaatggacattgtcctgaaaatgaagcaagatgttgcaaaaaggcaaaaactgaattatggagggcccaagtcattcaacaacaaaaaggtttctgggaagggccattttcgtgggaacaggcgctagtgttaactgattaaaattgatgtggttttgaaggttgctactggtgcttatggatgtgtcaatggcaatcgagaattgagatcttttcagacattctgttcatgcggttcagcgtatttgaagggaaacttaaactgcaaagtgtaggataatttccagcagagggctcctgtcatacttgcatgtttccctaacgatgataaaccaatcaaaagtaaaaaggagaggcgcgtgaagcctaacctacgaaggctacgagtatgaagtcgattatccaatgaagcctcacttacgaaagctatgggtgcaaagttacacatcctgtgaagccttgacgagaagaagaattgctccaagcccttaagaagtcaaagaaccttcactaggtgcatgtatgtgctcgtgaaggccagtcgatcatgaggacccgttaataccatggaatttggatgaaccattgtattttaagccaaaaggtgtttggtagcctttaaaaactctgtatataatactgtggtattatcgatactatggttattttggggtatagaaaactttggtccagaccaaagtttctttgctgtgcgcaatatctgttgagtatgcaagccatggaactggt

SEQ ID NO: 9721 - DNA, 4365 bp, Zea Mays
cgatcccggttgggaatggcctaaacgaacgaacaaggccactcggccccatccggcatccccgacccccgagcgtcttctttcgtctgctcgctctgcgctcgcatctaccatggagactagggtctagggtttagtgcgccgctgcctacatcgccgccatcctcaacttcctacgggatcctgacgaggcgccgtatcatcctcaacgccgcgaacctccgctcccacgttatcctcacgcccaccagtagctctcggcctctacctcgttaaggcttgatatttgactgggacactgggcaaattttaacaagtttcagcaatggggtttgataatgaatgcatcttgagtattcaatcccttcctggtgaatatttctgccctgtttgccggacacttgtatatccgaatgaggccctacaaactcaatgcacacatctctactgcaaatcctgcttggcatatgtagtggcaaccacacaagcttgtccttatgatggataccttgtaacagaagctgattccaagcctcttgtggaatcaaataaaacccttgctgagactattggcaaagtcgcggtctattgcctgtataataagagtggatgccaatggcatggagagctatctgcctgtgtcacacatggtactgcttgtgcatatgggaactctcctgttgtttgcaatcgttgtgggacacaaattgtgcatcgtcaagtgcaagaacatgctcaagtctgccatggcttacaatctcaaacacaacaagctgatggtagtcaggtgcagctggcaacggcaacaactcagccagtcatccaagattcatcacttgcctcagctggatctgctgcagctgcagctacaaccctaacaaagccatcttcaactacagccacagctgtaacagattctgcagcagcaacaggaggggcagctggtgcaaccacagcagctgtgccttcttcagcttcatctatttctgcttcccaaactccaacagctgagcagtggtaccagcagcagcagcagctccaatactcgcaatactaccagcagcagcaccctggatccaacccttacatgcagcaacatcaacaatatgaccaataccagcaggcatatcagcaatacatgcaacctccaatgcaagtaccatcccaaaatgtggtgcaaggatctgcacaacctgcttcttatgttcagcctcaagttcagtcctcccaggtgatgatgcaagcccaaagtcagccccaggtccatccattgacgagtcagccacagcttcaacagcatccagttcaaccccgaccccaaagtcaccctcatatttcccatgttcaagcaccttcaggtcagtcgcagcttcatcaaccaattcagtcagcccaagttccacaggtccaaccaagtcaagttcctctccaaccatctggtctccaagtacaatctgcagcacatccatctgctcctactcaagttggtaatcagcaatttgcgactcaagcaatggcgtatcaggtccagccacatgtacaagctcaacctccgcagcagcaacatattgttgcacatcaacaacatccacatatgcaagctttacccctacagcaaaatattcaacctaagatgcagctaaactctcaagttcagctacagcctccacatgtccagcagcaagcttacccacaatctcaggtctatcctcaacagacacatcatatgcactcccagaatactacatatgcacagcagcaaacccaaggtgctttgatgcaacctgtacatgtgtcccaccaacaaacacatgtttctcatcatcctgcaccgatgcgtcctccatcgtcaggccatcagccagctttgcagcatcctcaggcccagggaattcaacatacatcacaacatgaaaaacatattgggtttcatgctcagtggccaacaatgtattccaacattccttcccaagcaccaccacagggattgtctgtgcactcatctgtttcctcacaatcagttcaatcataccagcaaggaatgtcttcatcacaacagatgcattcccaacctggtcagccatatacacaacagcatgttactggcaatactggacaacatgttcaaacttctgctggcagacctatggcccatcttgcaccaacacagcaatttcagcagcaacatccagcaatgcttagaactgagtcacctgctgctgggcactctattgggcagggtcctttagatcttgaaaaacatacttcaaaatcagggaagttggataatgcaactattgctgctgtcggtgaaaataaaaatagtggtcctgagtcagttgtcatgagacctacaaagtcacaattgggtgatgaaaacatgaacagcgaacacaatggttttgttggtgttagaaaagatgcagtgcaaactggcattgtatcacacaatttagatggttcaattaggagggatgggaatactgaccaggcaggcaattcacatggcccacttgtgcagggaggcaaagatcacaaggcttcagatgcatctactgatcatgagaaaggacgactgtttcaacaggcatcactgcaaaatgcaggggcaccgggctcttatgtgcccccaggtgtggtaccacatccatctggaccagataaaatgcttcctcagcatatgacgaatcatggtcatatgcatggtttctctgaaaatatccgtcctccgctgcaacaaccatatggtgtgtttcattctggaacgataacaaggccatttggagagaaccagattcagatgccaatgccacagcctgggggtatcagacctggtgatggtatgattcgtccttgtttggttggcccattacctggacatcatggtgcagtgttgccttcttttgatcttgaacgtttgggtcagccacgtcctcttggaatgttgaacagcaatgactttggtggtgaggggttcaacgcttcagggggtgcagcgtatcctgaaagacatgataataccgaagacagtcggaaacattttccagcaccagcccctctagatgatcagggcttgcgaagggaccctagacattttgagagagctttaggtagacctgatggtttccttgattcagtacctggaaggcctccatttgcaaaccacagaagtgcaggtttgcatgaggattttccaagaaagcaaaatgcaactgccagtcaccctgacttcctgtcacatggagcagaatttgatcatcacagggctattggaatgcctaatttcagaaatccaggcccatttgctcaagggacaagtggcggtcctggtggccctcctaaacaccagcttggctctggtaaccttcctgggaatttacattcttttgagggtgacatgcatccaggtgaccctcatcttgtcgctgaatatgctcagcatggatttcctaaaactgcagcacactttggtttgggtggattcttgagaaacgggaattctggttggtgccgaatatgcatgtttaactgtgggagtgcagagaatctggatttgcatgtacaaacaagggaacatcagcaatgtgcaatggacattgtcctgaaaatgaagcaagatgttgcaaaaaggcaaaaactgaattatggagggcccaagtcattcaacaacaaaaaggtttctgggaagggccattttcgtgggaacaggcgctagtgttaactgattaaaattgatgtggttttgaaggttgctactggtgcttatggatgtgtcaatggcaatcgagaattgagatcttttcagacattctgttcatgcggttcagcgtatttgaagggaaacttaaactgcaaagtgtaggataatttccagcagagggctcctgtcatacttgcatgtttccctaacgatggtaaggatgacatgctttcataatgctgataaaccaatcaaaagtaaaaaggagaggcgcgtgaagcctaacctacgaaggctacgagtatgaagtcgattatccaatgaagcctcacttacgaaagctatgggtgcaaagttacacatcctgtgaagccttgacgagaagaagaattgctccaagcccttaagaagtcaaagaaccttcactaggtgcatgtatgtgctcgtgaaggccagtcgatcatgaggacccgttaataccatggaatttggatgaaccattgtattttaagccaaaaggtgtttggtagcctttaaaaactctgtatataatactgtggtattatcgatactatggttattttggggtatagaaaactttggtccagaccaaagtttctttgctgtgcgcaatatctgttgagtatgcaagccatggaactggt

SEQ ID NO: 9722 - DNA, 4425 bp, Zea Mays
cgatcccggttgggaatggcctaaacgaacgaacaaggccactcggccccatccggcatccccgacccccgagcgtcttctttcgtctgctcgctctgcgctcgcatctaccatggagactagggtctagggtttagtgcgccgctgcctacatcgccgccatcctcaacttcctacgggatcctgacgaggcgccgtatcatcctcaacgccgcgaacctccgctcccacgttatcctcacgcccaccagtagctctcggcctctacctcgttaaggcttgatatttgactgggacactgggcaaattttaacaagtttcagcaatggggtttgataatgaatgcatcttgagtattcaatcccttcctggtgaatatttctgccctgtttgccggacacttgtatatccgaatgaggccctacaaactcaatgcacacatctctactgcaaatcctgcttggcatatgtagtggcaaccacacaagcttgtccttatgatggataccttgtaacagaagctgattccaagcctcttgtggaatcaaataaaacccttgctgagactattggcaaagtcgcggtctattgcctgtataataagagtggatgccaatggcatggagagctatctgcctgtgtcacacatggtactgcttgtgcatatgggaactctcctgttgtttgcaatcgttgtgggacacaaattgtgcatcgtcaagtgcaagaacatgctcaagtctgccatggcttacaatctcaaacacaacaagctgatggtagtcaggtgcagctggcaacggcaacaactcagccagtcatccaagattcatcacttgcctcagctggatctgctgcagctgcagctacaaccctaacaaagccatcttcaactacagccacagctgtaacagattctgcagcagcaacaggaggggcagctggtgcaaccacagcagctgtgccttcttcagcttcatctatttctgcttcccaaactccaacagctgagcagtggtaccagcagcagcagcagctccaatactcgcaatactaccagcagcagcaccctggatccaacccttacatgcagcaacatcaacaatatgaccaataccagcaggcatatcagcaatacatgcaacctccaatgcaagtaccatcccaaaatgtggtgcaaggatctgcacaacctgcttcttatgttcagcctcaagttcagtcctcccaggtgatgatgcaagcccaaagtcagccccaggtccatccattgacgagtcagccacagcttcaacagcatccagttcaaccccgaccccaaagtcaccctcatatttcccatgttcaagcaccttcaggtcagtcgcagcttcatcaaccaattcagtcagcccaagttccacaggtccaaccaagtcaagttcctctccaaccatctggtctccaagtacaatctgcagcacatccatctgctcctactcaagttggtaatcagcaatttgcgactcaagcaatggcgtatcaggtccagccacatgtacaagctcaacctccgcagcagcaacatattgttgcacatcaacaacatccacatatgcaagctttacccctacagcaaaatattcaacctaagatgcagctaaactctcaagttcagctacagcctccacatgtccagcagcaagcttacccacaatctcaggtctatcctcaacagacacatcatatgcactcccagaatactacatatgcacagcagcaaacccaaggtgctttgatgcaacctgtacatgtgtcccaccaacaaacacatgtttctcatcatcctgcaccgatgcgtcctccatcgtcaggccatcagccagctttgcagcatcctcaggcccagggaattcaacatacatcacaacatgaaaaacatattgggtttcatgctcagtggccaacaatgtattccaacattccttcccaagcaccaccacagggattgtctgtgcactcatctgtttcctcacaatcagttcaatcataccagcaaggaatgtcttcatcacaacagatgcattcccaacctggtcagccatatacacaacagcatgttactggcaatactggacaacatgttcaaacttctgctggcagacctatggcccatcttgcaccaacacagcaatttcagcagcaacatccagcaatgcttagaactgagtcacctgctgctgggcactctattgggcagggtcctttagatcttgaaaaacatacttcaaaatcagggaagttggataatgcaactattgctgctgtcggtgaaaataaaaatagtggtcctgagtcagttgtcatgagacctacaaagtcacaattgggtgatgaaaacatgaacagcgaacacaatggttttgttggtgttagaaaagatgcagtgcaaactggcattgtatcacacaatttagatggttcaattaggagggatgggaatactgaccaggcaggcaattcacatggcccacttgtgcagggaggcaaagatcacaaggcttcagatgcatctactgatcatgagaaaggacgactgtttcaacaggcatcactgcaaaatgcaggggcaccgggctcttatgtgcccccaggtgtggtaccacatccatctggaccagataaaatgcttcctcagcatatgacgaatcatggtcatatgcatggtttctctgaaaatatccgtcctccgctgcaacaaccatatggtgtgtttcattctggaacgataacaaggccatttggagagaaccagattcagatgccaatgccacagcctgggggtatcagacctggtgatggtatgattcgtccttgtttggttggcccattacctggacatcatggtgcagtgttgccttcttttgatcttgaacgtttgggtcagccacgtcctcttggaatgttgaacagcaatgactttggtggtgaggggttcaacgcttcagggggtgcagcgtatcctgaaagacatgataataccgaagacagtcggaaacattttccagcaccagcccctctagatgatcagggcttgcgaagggaccctagacattttgagagagctttaggtagacctgatggtttccttgattcagtacctggaaggcctccatttgcaaaccacagaagtgcaggtttgcatgaggattttccaagaaagcaaaatgcaactgccagtcaccctgacttcctgtcacatggagcagaatttgatcatcacagggctattggaatgcctaatttcagaaatccaggcccatttgctcaagggacaagtggcggtcctggtggccctcctaaacaccagcttggctctggtgacatgcatccaggtgaccctcatcttgtcgctgaatatgctcagcatggatttcctaaaactgcagcacactttggtttgggtggattcttgagaaacgggaattctggttggtgccgaatatgcatgtttaactgtgggagtgcagagaatctggatttgcatgtacaaacaagggaacatcagcaatgtgcaatggacattgtcctgaaaatgaagcaagatgttgcaaaaaggcaaaaactgaattatggagggcccaagtcattcaacaacaaaaaggtttctgggaagggccattttcgtgggaacaggcgctagtgttaactgattaaaattgatgtggttttgaaggttgctactggtgcttatggatgtgtcaatggcaatcgagaattgagatcttttcagacattctgttcatgcggttcagcgtatttgaagggaaacttgctcatgctttttctaatggcgacctaataatagaccatgctggaacttttacaaagagacttgtaattgtgtcatcagacatccataacatgaaactgcaaagtgtaggataatttccagcagagggctcctgtcatacttgcatgtttccctaacgatggtaaggatgacatgctttcataatgctgataaaccaatcaaaagtaaaaaggagaggcgcgtgaagcctaacctacgaaggctacgagtatgaagtcgattatccaatgaagcctcacttacgaaagctatgggtgcaaagttacacatcctgtgaagccttgacgagaagaagaattgctccaagcccttaagaagtcaaagaaccttcactaggtgcatgtatgtgctcgtgaaggccagtcgatcatgaggacccgttaataccatggaatttggatgaaccattgtattttaagccaaaaggtgtttggtagcctttaaaaactctgtatataatactgtggtattatcgatactatggttattttggggtatagaaaactttggtccagaccaaagtttctttgctgtgcgcaatatctgttgagtatgcaagccatggaactggt

SEQ ID NO: 9723 - DNA, 4430 bp, Zea Mays
cgatcccggttgggaatggcctaaacgaacgaacaaggccactcggccccatccggcatccccgacccccgagcgtcttctttcgtctgctcgctctgcgctcgcatctaccatggagactagggtctagggtttagtgcgccgctgcctacatcgccgccatcctcaacttcctacgggatcctgacgaggcgccgtatcatcctcaacgccgcgaacctccgctcccacgttatcctcacgcccaccagtagctctcggcctctacctcgttaaggcttgatatttgactgggacactgggcaaattttaacaagtttcagcaatggggtttgataatgaatgcatcttgagtattcaatcccttcctggtgaatatttctgccctgtttgccggacacttgtatatccgaatgaggccctacaaactcaatgcacacatctctactgcaaatcctgcttggcatatgtagtggcaaccacacaagcttgtccttatgatggataccttgtaacagaagctgattccaagcctcttgtggaatcaaataaaacccttgctgagactattggcaaagtcgcggtctattgcctgtataataagagtggatgccaatggcatggagagctatctgcctgtgtcacacatggtactgcttgtgcatatgggaactctcctgttgtttgcaatcgttgtgggacacaaattgtgcatcgtcaagtgcaagaacatgctcaagtctgccatggcttacaatctcaaacacaacaagctgatggtagtcaggtgcagctggcaacggcaacaactcagccagtcatccaagattcatcacttgcctcagctggatctgctgcagctgcagctacaaccctaacaaagccatcttcaactacagccacagctgtaacagattctgcagcagcaacaggaggggcagctggtgcaaccacagcagctgtgccttcttcagcttcatctatttctgcttcccaaactccaacagctgagcagtggtaccagcagcagcagcagctccaatactcgcaatactaccagcagcagcaccctggatccaacccttacatgcagcaacatcaacaatatgaccaataccagcaggcatatcagcaatacatgcaacctccaatgcaagtaccatcccaaaatgtggtgcaaggatctgcacaacctgcttcttatgttcagcctcaagttcagtcctcccaggtgatgatgcaagcccaaagtcagccccaggtccatccattgacgagtcagccacagcttcaacagcatccagttcaaccccgaccccaaagtcaccctcatatttcccatgttcaagcaccttcaggtcagtcgcagcttcatcaaccaattcagtcagcccaagttccacaggtccaaccaagtcaagttcctctccaaccatctggtctccaagtacaatctgcagcacatccatctgctcctactcaagttggtaatcagcaatttgcgactcaagcaatggcgtatcaggtccagccacatgtacaagctcaacctccgcagcagcaacatattgttgcacatcaacaacatccacatatgcaagctttacccctacagcaaaatattcaacctaagatgcagctaaactctcaagttcagctacagcctccacatgtccagcagcaagcttacccacaatctcaggtctatcctcaacagacacatcatatgcactcccagaatactacatatgcacagcagcaaacccaaggtgctttgatgcaacctgtacatgtgtcccaccaacaaacacatgtttctcatcatcctgcaccgatgcgtcctccatcgtcaggccatcagccagctttgcagcatcctcaggcccagggaattcaacatacatcacaacatgaaaaacatattgggtttcatgctcagtggccaacaatgtattccaacattccttcccaagcaccaccacagggattgtctgtgcactcatctgtttcctcacaatcagttcaatcataccagcaaggaatgtcttcatcacaacagatgcattcccaacctggtcagccatatacacaacagcatgttactggcaatactggacaacatgttcaaacttctgctggcagacctatggcccatcttgcaccaacacagcaatttcagcagcaacatccagcaatgcttagaactgagtcacctgctgctgggcactctattgggcagggtcctttagatcttgaaaaacatacttcaaaatcagggaagttggataatgcaactattgctgctgtcggtgaaaataaaaatagtggtcctgagtcagttgtcatgagacctacaaagtcacaattgggtgatgaaaacatgaacagcgaacacaatggttttgttggtgttagaaaagatgcagtgcaaactggcattgtatcacacaatttagatggttcaattaggagggatgggaatactgaccaggcaggcaattcacatggcccacttgtgcagggaggcaaagatcacaaggcttcagatgcatctactgatcatgagaaaggacgactgtttcaacaggcatcactgcaaaatgcaggggcaccgggctcttatgtgcccccaggtgtggtaccacatccatctggaccagataaaatgcttcctcagcatatgacgaatcatggtcatatgcatggtttctctgaaaatatccgtcctccgctgcaacaaccatatggtgtgtttcattctggaacgataacaaggccatttggagagaaccagattcagatgccaatgccacagcctgggggtatcagacctggtgatggtatgattcgtccttgtttggttggcccattacctggacatcatggtgcagtgttgccttcttttgatcttgaacgtttgggtcagccacgtcctcttggaatgttgaacagcaatgactttggtggtgaggggttcaacgcttcagggggtgcagcgtatcctgaaagacatgataataccgaagacagtcggaaacattttccagcaccagcccctctagatgatcagggcttgcgaagggaccctagacattttgagagagctttaggtagacctgatggtttccttgattcagtacctggaaggcctccatttgcaaaccacagaagtgcaggtttgcatgaggattttccaagaaagcaaaatgcaactgccagtcaccctgacttcctgtcacatggagcagaatttgatcatcacagggctattggaatgcctaatttcagaaatccaggcccatttgctcaagggacaagtggcggtcctggtggccctcctaaacaccagcttggctctggtaaccttcctgggaatttacattcttttgagggtgacatgcatccaggtgaccctcatcttgtcgctgaatatgctcagcatggatttcctaaaactgcagcacactttggtttgggtggattcttgagaaacgggaattctggttggtgccgaatatgcatgtttaactgtgggagtgcagagaatctggatttgcatgtacaaacaagggaacatcagcaatgtgcaatggacattgtcctgaaaatgaagcaagatgttgcaaaaaggcaaaaactgaattatggagggcccaagtcattcaacaacaaaaaggtttctgggaagggccattttcgtgggaacaggcgctagtgttaactgattaaaattgatgtggttttgaaggttgctactggtgcttatggatgtgtcaatggcaatcgagaattgagatcttttcagacattctgttcatgcggttcagcgtatttgaagggaaacttgctcatgctttttctaatggcgacctaataatagaccatgctggaacttttacaaagagacttgtaattgtgtcatcagacatccataacatgaaactgcaaagtgtaggataatttccagcagagggctcctgtcatacttgcatgtttccctaacgatgataaaccaatcaaaagtaaaaaggagaggcgcgtgaagcctaacctacgaaggctacgagtatgaagtcgattatccaatgaagcctcacttacgaaagctatgggtgcaaagttacacatcctgtgaagccttgacgagaagaagaattgctccaagcccttaagaagtcaaagaaccttcactaggtgcatgtatgtgctcgtgaaggccagtcgatcatgaggacccgttaataccatggaatttggatgaaccattgtattttaagccaaaaggtgtttggtagcctttaaaaactctgtatataatactgtggtattatcgatactatggttattttggggtatagaaaactttggtccagaccaaagtttctttgctgtgcgcaatatctgttgagtatgcaagccatggaactggt

SEQ ID NO: 9724 - DNA, 4591 bp, Zea Mays
cgatcccggttgggaatggcctaaacgaacgaacaaggccactcggccccatccggcatccccgacccccgagcgtcttctttcgtctgctcgctctgcgctcgcatctaccatggagactagggtctagggtttagtgcgccgctgcctacatcgccgccatcctcaacttcctacgggatcctgacgaggcgccgtatcatcctcaacgccgcgaacctccgctcccacgttatcctcacgcccaccagtagctctcggcctctacctcgttaaggcttgatatttgactgggacactgggcaaattttaacaagtttcagcaatggggtttgataatgaatgcatcttgagtattcaatcccttcctggtgaatatttctgccctgtttgccggacacttgtatatccgaatgaggccctacaaactcaatgcacacatctctactgcaaatcctgcttggcatatgtagtggcaaccacacaagcttgtccttatgatggataccttgtaacagaagctgattccaagcctcttgtggaatcaaataaaacccttgctgagactattggcaaagtcgcggtctattgcctgtataataagagtggatgccaatggcatggagagctatctgcctgtgtcacacatggtactgcttgtgcatatgggaactctcctgttgtttgcaatcgttgtgggacacaaattgtgcatcgtcaagtgcaagaacatgctcaagtctgccatggcttacaatctcaaacacaacaagctgatggtagtcaggtgcagctggcaacggcaacaactcagccagtcatccaagattcatcacttgcctcagctggatctgctgcagctgcagctacaaccctaacaaagccatcttcaactacagccacagctgtaacagattctgcagcagcaacaggaggggcagctggtgcaaccacagcagctgtgccttcttcagcttcatctatttctgcttcccaaactccaacagctgagcagtggtaccagcagcagcagcagctccaatactcgcaatactaccagcagcagcaccctggatccaacccttacatgcagcaacatcaacaatatgaccaataccagcaggcatatcagcaatacatgcaacctccaatgcaagtaccatcccaaaatgtggtgcaaggatctgcacaacctgcttcttatgttcagcctcaagttcagtcctcccaggtgatgatgcaagcccaaagtcagccccaggtccatccattgacgagtcagccacagcttcaacagcatccagttcaaccccgaccccaaagtcaccctcatatttcccatgttcaagcaccttcaggtcagtcgcagcttcatcaaccaattcagtcagcccaagttccacaggtccaaccaagtcaagttcctctccaaccatctggtctccaagtacaatctgcagcacatccatctgctcctactcaagttggtaatcagcaatttgcgactcaagcaatggcgtatcaggtccagccacatgtacaagctcaacctccgcagcagcaacatattgttgcacatcaacaacatccacatatgcaagctttacccctacagcaaaatattcaacctaagatgcagctaaactctcaagttcagctacagcctccacatgtccagcagcaagcttacccacaatctcaggtctatcctcaacagacacatcatatgcactcccagaatactacatatgcacagcagcaaacccaaggtgctttgatgcaacctgtacatgtgtcccaccaacaaacacatgtttctcatcatcctgcaccgatgcgtcctccatcgtcaggccatcagccagctttgcagcatcctcaggcccagggaattcaacatacatcacaacatgaaaaacatattgggtttcatgctcagtggccaacaatgtattccaacattccttcccaagcaccaccacagggattgtctgtgcactcatctgtttcctcacaatcagttcaatcataccagcaaggaatgtcttcatcacaacagatgcattcccaacctggtcagccatatacacaacagcatgttactggcaatactggacaacatgttcaaacttctgctggcagacctatggcccatcttgcaccaacacagcaatttcagcagcaacatccagcaatgcttagaactgagtcacctgctgctgggcactctattgggcagggtcctttagatcttgaaaaacatacttcaaaatcagggaagttggataatgcaactattgctgctgtcggtgaaaataaaaatagtggtcctgagtcagttgtcatgagacctacaaagtcacaattgggtgatgaaaacatgaacagcgaacacaatggttttgttggtgttagaaaagatgcagtgcaaactggcattgtatcacacaatttagatggttcaattaggagggatgggaatactgaccaggcaggcaattcacatggcccacttgtgcagggaggcaaagatcacaaggcttcagatgcatctactgatcatgagaaaggacgactgtttcaacaggcatcactgcaaaatgcaggggcaccgggctcttatgtgcccccaggtgtggtaccacatccatctggaccagataaaatgcttcctcagcatatgacgaatcatggtcatatgcatggtttctctgaaaatatccgtcctccgctgcaacaaccatatggtgtgtttcattctggaacgataacaaggccatttggagagaaccagattcagatgccaatgccacagcctgggggtatcagacctggtgatggtatgattcgtccttgtttggttggcccattacctggacatcatggtgcagtgttgccttcttttgatcttgaacgtttgggtcagccacgtcctcttggtaatactctaggtcataggccaatacttcttctgttgttgcaagtatgctgatctaacttccatttattcaggaatgttgaacagcaatgactttggtggtgaggggttcaacgcttcagggggtgcagcgtatcctgaaagacatgataataccgaagacagtcggaaacattttccagcaccagcccctctagatgatcagggcttgcgaagggaccctagacattttgagagagctttaggtagacctgatggtttccttgattcagtacctggaaggcctccatttgcaaaccacagaagtgcaggtttgcatgaggattttccaagaaagcaaaatgcaactgccagtcaccctgacttcctgtcacatggagcagaatttgatcatcacagggctattggaatgcctaatttcagaaatccaggcccatttgctcaagggacaagtggcggtcctggtggccctcctaaacaccagcttggctctggtaaccttcctgggaatttacattcttttgagggtgacatgcatccaggtgaccctcatcttgtcgctgaatatgctcagcatggatttcctaaaactgcagcacactttggtttgggtggattcttgagaaacgggaattctggttggtgccgaatatgcatgtttaactgtgggagtgcagagaatctggatttgcatgtacaaacaagggaacatcagcaatgtgcaatggacattgtcctgaaaatgaagcaagatgttgcaaaaaggcaaaaactgaattatggagggcccaagtcattcaacaacaaaaaggtttctgggaagggccattttcgtgggaacaggcgctagtgttaactgattaaaattgatgtggttttgaaggttgctactggtgcttatggatgtgtcaatggcaatcgagaattgagatcttttcagacattctgttcatgcggttcagcgtatttgaagggaaacttgtaatggtcccaaacttttgttccatgttgatctgcagagttcacatggctatgtttacttcacgtatttttgccgaagttgttctgggattgcttaacatgctaatatccttcttctgtacgtgctgatttataactcctgtttctttcaactaggctcatgctttttctaatggcgacctaataatagaccatgctggaacttttacaaagagacttgtaattgtgtcatcagacatccataacatgataaaccaatcaaaagtaaaaaggagaggcgcgtgaagcctaacctacgaaggctacgagtatgaagtcgattatccaatgaagcctcacttacgaaagctatgggtgcaaagttacacatcctgtgaagccttgacgagaagaagaattgctccaagcccttaagaagtcaaagaaccttcactaggtgcatgtatgtgctcgtgaaggccagtcgatcatgaggacccgttaataccatggaatttggatgaaccattgtattttaagccaaaaggtgtttggtagcctttaaaaactctgtatataatactgtggtattatcgatactatggttattttggggtatagaaaactttggtccagaccaaagtttctttgctgtgcgcaatatctgttgagtatgcaagccatggaactggt

SEQ ID NO: 9725 - DNA, 5493 bp, Zea Mays
cttctatcgtgggccgatattgtcaggtgcatccgcggggatcgccggatcgggccacgatcccggttgggaatggcctaaacgaacgaacaaggccactcggccccatccggcatccccgacccccgagcgtcttctttcgtctgctcgctctgcgctcgcatctaccatggagactagggtctagggtttagtgcgccgctgcctacatcgccgccatcctcaacttcctacgggatcctgacgaggcgccgtatcatcctcaacgccgcgaacctccgctcccacgttatcctcacgcccaccagtagctctcggcctctacctcgttaaggcttgatatttgactgggacactgggcaaattttaacaagtttcagcaatggggtttgataatgaatgcatcttgagtattcaatcccttcctggtgaatatttctgccctgtttgccggacacttgtatatccgaatgaggccctacaaactcaatgcacacatctctactgcaaatcctgcttggcatatgtagtggcaaccacacaagcttgtccttatgatggataccttgtaacagaagctgattccaagcctcttgtggaatcaaataaaacccttgctgagactattggcaaagtcgcggtctattgcctgtataataagagtggatgccaatggcatggagagctatctgcctgtgtcacacatggtactgcttgtgcatatgggaactctcctgttgtttgcaatcgttgtgggacacaaattgtgcatcgtcaagtgcaagaacatgctcaagtctgccatggcttacaatctcaaacacaacaagctgatggtagtcaggtgcagctggcaacggcaacaactcagccagtcatccaagattcatcacttgcctcagctggatctgctgcagctgcagctacaaccctaacaaagccatcttcaactacagccacagctgtaacagattctgcagcagcaacaggaggggcagctggtgcaaccacagcagctgtgccttcttcagcttcatctatttctgcttcccaaactccaacagctgagcagtggtaccagcagcagcagcagctccaatactcgcaatactaccagcagcagcaccctggatccaacccttacatgcagcaacatcaacaatatgaccaataccagcaggcatatcagcaatacatgcaacctccaatgcaagtaccatcccaaaatgtggtgcaaggatctgcacaacctgcttcttatgttcagcctcaagttcagtcctcccaggtgatgatgcaagcccaaagtcagccccaggtccatccattgacgagtcagccacagcttcaacagcatccagttcaaccccgaccccaaagtcaccctcatatttcccatgttcaagcaccttcaggtcagtcgcagcttcatcaaccaattcagtcagcccaagttccacaggtccaaccaagtcaagttcctctccaaccatctggtctccaagtacaatctgcagcacatccatctgctcctactcaagttggtaatcagcaatttgcgactcaagcaatggcgtatcaggtccagccacatgtacaagctcaacctccgcagcagcaacatattgttgcacatcaacaacatccacatatgcaagctttacccctacagcaaaatattcaacctaagatgcagctaaactctcaagttcagctacagcctccacatgtccagcagcaagcttacccacaatctcaggtctatcctcaacagacacatcatatgcactcccagaatactacatatgcacagcagcaaacccaaggtgctttgatgcaacctgtacatgtgtcccaccaacaaacacatgtttctcatcatcctgcaccgatgcgtcctccatcgtcaggccatcagccagctttgcagcatcctcaggcccagggaattcaacatacatcacaacatgaaaaacatattgggtttcatgctcagtggccaacaatgtattccaacattccttcccaagcaccaccacagggattgtctgtgcactcatctgtttcctcacaatcagttcaatcataccagcaaggaatgtcttcatcacaacagatgcattcccaacctggtcagccatatacacaacagcatgttactggcaatactggacaacatgttcaaacttctgctggcagacctatggcccatcttgcaccaacacagcaatttcagcagcaacatccagcaatgcttagaactgagtcacctgctgctgggcactctattgggcagggtcctttagatcttgaaaaacatacttcaaaatcagggaagttggataatgcaactattgctgctgtcggtgaaaataaaaatagtggtcctgagtcagttgtcatgagacctacaaagtcacaattgggtgatgaaaacatgaacagcgaacacaatggttttgttggtgttagaaaagatgcagtgcaaactggcattgtatcacacaatttagatggttcaattaggagggatgggaatactgaccaggcaggcaattcacatggcccacttgtgcagggaggcaaagatcacaaggcttcagatgcatctactgatcatgagaaaggacgactgtttcaacaggcatcactgcaaaatgcaggggcaccgggctcttatgtgcccccaggtgtggtaccacatccatctggaccagataaaatgcttcctcagcatatgacgaatcatggtcatatgcatggtttctctgaaaatatccgtcctccgctgcaacaaccatatggtgtgtttcattctggaacgataacaaggccatttggagagaaccagattcagatgccaatgccacagcctgggggtatcagacctggtgatggtatgattcgtccttgtttggttggcccattacctggacatcatggtgcagtgttgccttcttttgatcttgaacgtttgggtcagccacgtcctcttggaatgttgaacagcaatgactttggtggtgaggggttcaacgcttcagggggtgcagcgtatcctgaaagacatgataataccgaagacagtcggaaacattttccagcaccagcccctctagatgatcagggcttgcgaagggaccctagacattttgagagagctttaggtagacctgatggtttccttgattcagtacctggaaggcctccatttgcaaaccacagaagtgcaggtttgcatgaggattttccaagaaagcaaaatgcaactgccagtcaccctgacttcctgtcacatggagcagaatttgatcatcacagggctattggaatgcctaatttcagaaatccaggcccatttgctcaagggacaagtggcggtcctggtggccctcctaaacaccagcttggctctggtgacatgcatccaggtgaccctcatcttgtcgctgaatatgctcagcatggatttcctaaaactgcagcacactttggtttgggtggattcttgagaaacgggaattctggttggtgccgaatatgcatgtttaactgtgggagtgcagagaatctggatttgcatgtacaaacaagggaacatcagcaatgtgcaatggacattgtcctgaaaatgaagcaagatgttgcaaaaaggcaaaaactgaattatggagggcccaagtcattcaacaacaaaaaggtttctgggaagggccattttcgtgggaacaggcgctagtgttaactgattaaaattgatgtggttttgaaggttgctactggtgcttatggatgtgtcaatggcaatcgagaattgagatcttttcagacattctgttcatgcggttcagcgtatttgaagggaaacttgtaatggtcccaaacttttgttccatgttgatctgcagagttcacatggctatgtttacttcacgtatttttgccgaagttgttctgggattgcttaacatgctaatatccttcttctgtacgtgctgatttataactcctgtttctttcaactaggctcatgctttttctaatggcgacctaataatagaccatgctggaacttttacaaagagacttgtaattgtgtcatcagacatccataacatggtaaattttgttggaatcttttggtagggggctaatggaaacatgttgaagttactttcagtgcctgaaaattgtgctagttttgcatagtttaaatccaaaaaaatctaagggtgcattggacaaatagttttttttatgtcacagcccaatttgcttaatcatttattttaataaaattattgaatactgactctgtgatatgtccccattcaaaacaagaagggcaaaagtgctgcattcctgaataaacacaagggctagagttgttgacatgtcattgcatgacaacaaagcaatccaaatcaacaaaaataatctcattgaagcggttgcctattttgtgccttgagggatgcattagtgataaagggagacttggaagcctgcaaggaaacacaaaagcatgaagaggtttgagttgggatatgtactttgagtgttagcatgagatgggagggaatcgatggtaaacctaatttagaaccaaaacatgagttgtgctcaaatatagaaggaaaagaaagatatactggttttcatatgaatactggtatgtgcatcatatacgcagtaacgcagagcttgttgataccgaactggagttgtattattcacttctagttagttattcgagatagtgatggttttattgtcataggtttgatgttcagaataggacatcataggattctacaggctacaagcactaaatattatgggtaaaatacttaggtttccaattcactgctgctggacagatgtgattgtttgcatgtgacattttgctgatggtggcctttctctagatgtctgttttaaatcatctgtctttgctgtttgtttgctaaacagaaactgcaaagtgtaggataatttccagcagagggctcctgtcatacttgcatgtttccctaacgatggtaaggatgacatgctttcataatgctgataaaccaatcaaaagtaaaaaggagaggcgcgtgaagcctaacctacgaaggctacgagtatgaagtcgattatccaatgaagcctcacttacgaaagctatgggtgcaaagttacacatcctgtgaagccttgacgagaagaagaattgctccaagcccttaagaagtcaaagaaccttcactaggtgcatgtatgtgctcgtgaaggccagtcgatcatgaggacccgttaataccatggaatttggatgaaccattgtattttaagccaaaaggtgtttggtagcctttaaaaactctgtatataatactgtggtattatcgatactatggttattttggggtatagaaaactttggtccagaccaaagtttctttgctgtgcgcaatatctgttgagtatgcaagccatggaactggt

SEQ ID NO: 9726 - DNA, 5961 bp, Zea Mays
ctcccctctcttgcccaccttgcttcctcgccaccaccactttccccaccgctgcggcactagtcagtcagcaccagcaccttcgtcaccctgcgcttgtgcgcggcaacaccaacgcgcgccgtcgggatcggcggcaccgctggaaatggcgagcgccggcgccggcccgtcggggccggtgcggtccatatcccaaacggggcggtcgcggacgatggggcgtatgcccacgcgcgccttcaccatacgtccggacggatcctccggtgaggacggcgtcgatatcgtggaggaggagctcgtgccctcgtcgctcgcgcccattgtacccatcctccgcgccgccaacgagatcgaggaggagaacccgcgcgtcgcctacctatgtcgctttactgctttcgagaaggctcatcatatggaccaaaactcaagtggacgaggtgttcggcaattcaaaacatacctcttgcataggcttgaaaaggatgaacatgagacaaagcgcagtcttgctacaactgatgcaagggagatacagaagttctatgcgcagtactgcagaaaatatctagaacaagatcatgataagaggaaaccggaagagatggctagatactatcagattgcgtccgtcctatatgatgttatgaaaactgttacacctggcaaaaatgagtatgatgattatgctaaagatattgaaaacgaaaaagcatccttttcacagtacaatattctaccccttaatatttctgctcgagaacaaccaataatgaaaattcctgagatcaaagcagcagtgaagctccttgagcagataaatggccttccaatgccaaggattgaattaccacaaagctctgacagaaaaacagtgtccgacaaaatggacagacctgtggttaaggatttgcttgattggcttcggcaaacatttggatttcagaaagacagtgttgcgaatcaaagggagcacttgattttgctccttgcaaacattgacatgagacaacagggtactgccgatcatagtgagagacatgttcacatgatacgtagtagcacagtgatatatttgaggaacaaaattttccataattataactcctggtgtcgatacttacatctggagtcaaacattaggatccaaagggatgcccccacacaacagccagagcttctgtacataggactgtatttactgatatggggtgaagcttccaatgttcgcttcatgcctgaatgtctttgctacatctttcaccatatggcaagagatttacatgacataatatctgatacaagccaaggatcatttgagccaccgttccagggagaggggagtgacgatgcatttctgcagctagtgatccaacccatctatagtgttatgcagaaggtcaaaaaaatgcttcaaaaaacttggatggccgatggatccaacagctgacttttttgcagaacctaccagagccaagaatgaaactgagcaacatggtcacgtgattaggagaagaagggcatcaaaaacaaattttgttgaagttcgtacatttttgcatatgttcagaagttttgatcgtatgtgggccttctttatattggggttccaggccatggtaatcattgcctggagcccttctgggtcactttcttctatatttgaaccaaatgttttcaaaaatgtattgacaatctttataacagcggcatttctgaacttccttcaagccacgctagagttaattctcaactggaaagcttggaagagcctggagtgctcacaaaggataagatatatcctaaaatttgctgtagctgttgcctggttgataattcttcctactacgtactcaagctctattcaaaatcccacaggccttgtgaagtttctcagcaattggattcaaaatttgcagaatgaatcaatttataattatgctgttgccctttacatgttaccaaacatattcagtgccctgtttttcatgtttctaccaattcgacgggccttagagcgctcaaattctcgcattattaggttccttttatggtggacacagccaaagttatatgttgctcgaggcatgtatgaagacacttgctcacttcttaagtatactacgttctggatcctgctgcttatatgcaagctcgccttcagttattatgttgagattgctcctttagttgaacctaccaggataatcatgtcactggaaaggccgccttatgagtggcatgagttcttcccaaacttgcggcataatttaggtgttgtggttactgtatgggctccaattgtcatggtgtacttcatggacacacaaatatggtatgccattttctccacaatatgtggtggagtctatggtgcattcagccgcttgggtgagatacgaacccttgggatgttgagatcaagatttgaggcaattccaagagcatttggcaaaaaacttgtacctgatcatggcagtcacttgaaaggagatgaggaggacaaaaacccacccttcgataagtttgctgacatatggaatgcatttattaattcattgcgagaagaggacttactaaacaatagggagaaagatctattggttgttccttcatctggtggtcaaacaagtgtttttcagtggcctcctttccttcttgccagtaagattccaattgcacttgacatggcaaagagtgtcaagaaaaaagatgatgaacttatgaagaggataaagcaggatccttatactgagtatgctgtaatagaatgctacgatacattattagatatcctttacagcattattgttgtacaaagtgataagaaagttgttgatagaatacgtgaaagcatcaaagatagcatccaccggaaatcactcgtgaaagaattccgattggatgaacttcctcaactaagtgctaagtttgataagttgctaaatctactgaaggaatatgatgagaacgatcctgtaaatagaaacacacatattgccaatctgttgcaggatataatggaaatcatcacacaggatattatgaaaaatggaaaaggtatcttgaaggacgagggccaaaaacaacaactgtttgcaaaattaaatctggattcattgaagcatgttgcttggagggagaagtgcattaggcttcaattgttgttgacaacaaaggaatctgccatatatgtaccaacgaacttggaagctcggcgtaggatcaccttttttgcaaactcactttttatgagaatgccaagggcaccacctgtccgtagcatgatgtccttcagtgttttaactccatacttcaaagaggaggtgctcttttcaccagaagatcttcataggaaaaatgaggatggtatatcaatactgttctacctacggaaaatatatccagatgaatttaggaacttccttcagcggatagattttgaagtgaaggatgaagaagaacttaaagataagatggatgagatctgtaattgggcgtcttataggggtcaaactctcaccagaacagtaagaggaatgatgtactacagaaaggcacttgaaatccaatgccttcaagatatgacagatcctgctaaagttgaccgagacagatcaataggatcctaccaagagttgcaatatgatattgaaatggcacaagctattgctgatatcaaattcacttatgttgtctcatgtcaagtttatggcatgcaaaagaaatcaaaggatttaaatgaaaaaaggcgctatcagaatatcctcaatctcatgataatgaacccatcactacgagttgctttcattgaggagatcgaaggtctaaccagaaatggagcaactgagaagacatattgttccgttcttgtcaaaggtggtgaaaagtatgatgaggaaatttaccgcataaagcttcctggcaatccaacagatattggagagggaaaacctgaaaaccaaaatcatgccataatcttcaccaggggagaagcacttcaggccattgatatgaatcaggataattatattgaggaggcgtttaaaatgagaaatgtgctggaggagtttgagagtagaaagtatgggaagagcaaacccactatattaggcttacgtgagcacatttttactggaagtgtttcgtcgctggcttggtttatgtccaatcaagagaccagttttgttactattgggcaaagagttctggcaaatcctctcaaggttcggttccattatggccacccagatatttttgatagactcttccatatcaccagaggaggcataagtaaagcttcaaagactataaatctgagtgaagatatattttcaggttttaattcaaccatgagaggaggaaatgttacacatcacgaatacatgcaagttggtaaggggcgtgatgtggggatgaatcagatttctagcttcgaagctaaggtggccaacgatttgacttctacagaatgttatctttctattttactacagttgggttctattttagtagcatggttactgtacttactgtctatgtgtttttatatgggaggctttatctggttatgagtggtctggaaaagtctattatgctggatccacgaaatcagcagaatgtcaaggctctcgaaaatgcactggcttcacagtctattttccagctaggtctgctgcttgtcctccctatggtcatggaagttggcttagagaaagggttccgcacagcattaggagagtttgtaatcatgcagcttcagttggcatctgtgttcttcacattccagcttggcaccaaaacccactactatgggagaacaatactccatggtggtgcaaaatacagaccaacaggtcgtggattcgttgtgtaccatgcaaagtttgctgaaaattaccactgttgaggactggacagattggaggaagtggatggataacagagggggaattggcatgtctgtggaacaaagctgggaagcctggtgggtaactgagcaagatcacctcaggaagactagcatccgagcttttgtgttggaaatcatcctttcacttcgatttttgatctaccagtatggcattgtctaccatctgaacatagcagatcaccacaaaagcattatggtatatggagtatcatgggtggttatgctccttgttcttgtagtgctgaagatggtttcaatagggcggcagaaatttggaacagacctacagcttatgttccgcattctcaagggccttctcttccttggttttgtctctgtgatggcagtcctatttgtcgtcttacaccttactatttctgatgtcttcgctagtatccttggatacttgcctactggatggtgtcttcttctgattggacaagcatgctcaccattgattaggaggaccctgctgtgggactccatcatggagctcggaaggtcatacgagaatataatgggtctcgtcctcttcctgccaattggtttcctgtcgtggttccccttcgtctctgaattccagacacggctgctgtttaaccaggcatttagccggggcctccagatctcaaggatccttgctggtcagaaggatgttagcgagttcgagttcaagtgaccaatttcatccctcttgcaagcaaaccaaactcactttcatgtatttgtttacgatgatcgattttgggtgtctgtactctagtatattttcatcacgtttactactataatactgtctgtacttgagaatgttttgcctctgtaaactgacatgtagaatttctgtaatatatttatggaatttgataacttccatccatgcactgaacgctttgaatggaccattattactaaaggggtaacaaatttatcattgtaaggtcaaacatgtttgggctggaagttttgctattcaatactccaaacatgtttgtaagtgttagatactcatttaaggtttg

SEQ ID NO: 9727 - DNA, 3078 bp, Zea Mays
gcacggccaggcagctgaatgttcgttcaatgggcacgccgttcgcacaagcatcctgtcccggtaaaacttgcagtgctgacgggtagaattagactacttcgtcatagttgggtcgagggtcgtgtgcatagcttgtgctggccgagtagtcccgagagccatggcggccgcgggtgcgcgactaccattagctctgctgcttcccctgttcgttactttcttcgcctcccccgcctccgcgactgacaccatcaccgccaactcttccctcagcgatggccagacgctcgtttcagcgggcggggtgttccagctgggcttcttcaccccggccagctcgacggcgaggttcttgggcatctggtacatgggcctcgctccccagaccgttgtctgggtcgccaaccgggaagccccgatcaccggcaccacggcgagcctggccatcaacgccaccggcagcctggtgctcgccgacccctctgggcgggtgttctggtcgtcgccgcagtccaacatgagcagcactggctcccctgtcggggcgcagctgctggacagcggcaacttcgtgcttcaaggagggggtggcgccgtcctgtggcagagcttcgattacccttccgacaccctgctcccgggcatgaagctcgggtgggacctgaccacggggctcgaccggcacctgacgacgtggcggagcaccggcgacccgtcgccgggcgactacacgttcgggttcgacctccgcggcgtccccgaggggttcatacggcgcgacggcacggtgcccgtgtaccggaacgggccgtggaacgggctgcagttcagcggcgagccggagatggagcccaacaacagcaacttccagttcgagttcgtcgacaacgccagcgacgtgtactacacgttcctggtggacggcggcggcggcagcggcaacggcggtgtcgtgtcgcggttcgtgctgaaccagtcgagcgtgcagcgctacgtgtggccgccgggcgggcaggggtggagcctctactggtcgctgccgcgggaccagtgcgacaactacgcgcactgcggcgccttcggcgcctgcgacaccagcggcggctcggcggcgtgcgcctgcgtgcacgggttcacgccggcgtcgccgcgggactgggagctcagggacagctccgctgggtgcaggcgcctcacgcggctcaactgcaccggggacggcttcctgccgctgcgcggcgtgaagctgccggacacgacgaacgcgacggaggatgcgaccatcactgtcgaccagtgcaggcagaggtgcctcgccaactgctcctgcctggcctacgccgcttccagcatcaagggaggcgatagtggctgcatcatctggagctcgccgctcattgacatcaggcatttcccttccggtggccaggatctgttcgttcgcctggcggcatctgacctgctccaactccaagacaggagcaaggaggacgaagccggtcagagcagcgacctgaacgtcacgctctttgacatggacgccatcgctctctccactgacaacttcgcggcgtggaacaagctcggggaaggcggcttcggcgcggtgtacaaggggcaactggaaggagggcaggcggtggcggtgaagcggctgtccaagtactcgacgcagggactgggcgagttcaagaacgaggtgatgctcatcgccaagctgcagcacgtgaacctggtcaggctcctgggctgctgcgtccatggagaggagaggatgctggtgtacgagtacatggagaacaagagcctcgacaacttcatctttgacaagaaccgatccgcgcagctgcactggtccaagaggttcgacatcatcctgggcatcgcacgcgggctcctgtacctgcaccaggactcccggtacaaggtgatccaccgggatctcaaggccggcaacatcctcttggacaaggacatgaaccccaagatctccgacttcggcgtggccaggatcttcggcgacgacaccgactcgcacaccaggaaagtcgtcggaacatacgggtacatgtccccggagtacgccatggacggcgtcttctcggtgaagtccgacgtgttcagcttcggcgtgctggtgctggagatcgtcagcggcaggaagaaccggggcatgtacagcagcggcgagcagacgagcctcctcagccaggcgtggaggctgtggagggaaggcaacgcgctggcgctgctggacgaggcggtggtccgcgccggcacgcaccggagctccgaggtgctgcgctgcgtgcaggtggcgctgctgtgcgtgcaggagcggcccgacgaccggccgcacatggcggcggtgttcctggcgctgggcaacccgagcgcggtgctcccgcagcccaggcacccgggctactgcaccgaccggggctccgcctccaccgacggcgagtggtcgtccacatgcaccgtcaacgacgtcaccgtcaccatcgtggaaggacggtgacgccacgtggcggctctctcagccctgagccgtgctagctgccgggatactgccgcgccttcggtgatttgtgaatagcttgactgatatatgggcaggggttgacaaccccccaaagcgcaaagctgtgtgtgtgtgtgtgtgattgtgatctggatggtattgaaacttcgctcaggtttgatcttgcactcaaacagcagcttcaggaactcggtgtcatcctcagctccggtgaaattagtggtctccagttcctccagcgaggcagtgaatgcagagtgagaccgtctccagacatttacagccatgactgcacagtgatttcttcagaagaaaacaacacacactgtcacactgtaccatgcataatttaagtgcagcacttgagtatgttttagttgtttactgtctcctgtcaattttattttgttttgaagttgttacatttgtgtgtgcgcgcgcgttaagaaggcggcttgagtatcataattagcttgatggtactgtaaattatgagcagataattaaattgctttgtgcttcttgctagt

SEQ ID NO: 9728 - DNA, 1753 bp, Zea Mays
ccacatccagtcgcacaaaaacggcccaagtggagcaggttctgcttctggctgcccgctgtcccgtggtccctctctccctccctgtcctgtccgccgccgccggtccccgacggcggctctgcagccacacgcacaaggactagagcggacataatacggtgcaagcggagggaccaaaccgcaaaagcgcacagttcccgttccccctccgacccgttcattccgcttggttttctcctcctccgtcctcttcgctccccgtcagaccatccctgtgaggctgtgacgcaaccgggcgccggcggtctctcctgcaccacagggcacgccgcctcccgcgcacgtgttctcctcttccggggattcagatctggggattgctattctgtccgtctgactccgtccgtcccgaggcgcggcgaggggagcgagatgggttacattggccaccacggcgtcgccacgctgcggcgctacaagtacagcggcgtcgaccactcgctcgtcgccaagtacatcctccagcccttctggtcccgattcgtcaacatcttcccgctatggttcccaccgaacatgattacactgacaggtttcatgtttctactgacatcagcattccttggctttttatattcaccccatctagatacagcaccccccagatgggttcaccttgctcatggactgcttctctttctttatcagacttttgatgctgtggatggaaaacaagcaaggcgtaccaactcatcaagtcctctaggcgagctttttgaccacggatgtgatgcgcttgcgtgtgcttttgaatccttggcttttggaagcacggcgatgtgtggaaaggctaccttctggttttggttcatttcagctgtcccattttacttcgcaacctgggaacacttttttacaaatacacttattcttcctatagtcaacggaccaactgaaggccttatgctgatctacttgtgccattttttcacctttttcacaggagccgagtggtgggcacaggattttcagaagtcaatgcccctgctgggttgggttcctcttatctctgaaatcccggtgtatgacattgtgctatgtcttatgattgcttttgctgtaatcccaacaattggatctaacatccacaatgtatataaagtcgttgaagcaagaaaaggaagcatgcttctggcactagccatgctctttccttttggtttgctcttggctggagttcttgtctggtcctacctttctccttcagatataatgagaacccaaccacatttgctaattattggaactggttttgcatttggatttcttgtgggaagaatgattctggctcacttgtgtgatgaacccaagggtttgaaaacagggatgtgcatgtcccttgcgtattttccatttgcaattgcaaacgcgttgactgcccggcttgatgatggaaatccactcgttgatgagcagctagtgctcctgatgtactgcctatttacagtgtttctggcatgatttttaaagcggtaaggcgagacaaggcgttggactatcgcctggacgtctaggcggcgcctaggcgaggtaggcgggcaaggcgcctaggcgaggtaggcgggcaaggcgcctaggcgttggacctccgcctggacgcctaggcgacgccttaagaacaatggtttctggttgattgtttgaaaactttagatgagtagctcaaagcctaccattacatcaaattgac

SEQ ID NO: 9729 - DNA, 2103 bp, Zea Mays
cccaccttcttcctcacttgccattcttcgctgacctctaaacctaaccgcccatgggcaaaggggcccctcctgccgttgccacagccacctccgtccctgaggcgccggtcttccaccccacagacgaggagttcgccgaccccctcgcctacgtcgcccgtatccgccccctcgccgagccctacggcatctgccgcatcgtcccgccgtcctcatggtccccgccttacgccctcgacttcaaggctctctccttccccaccaagaggcagcccatccaccgcctcctcgcccgccccgcccccgctgaccccgacaccttcctcctcgactatcgccgtttcctcggggcttcctccgcacatcgccgtggccgcaggaagggccttcccaagtcgccctctctctcggatggtcgcccgctcgacctctgccgcctgttccatgctgtcaagcgcttcggcggttactacggtgcctgtgaggggaagcgctggggcgacgtcgtccgcctcgttgatgataaggcgccaatgcacatatcagagtgcgccaagcacgtgcttgcgcagctatattacgagcatctctatggctatgagaagttcgccaacccacagcatgggaacaagggaaggaagcagccacggcccggatctgatgatcgaccatcggtttctcgttcacaggacgaagagagcaacatatctgttactggggagatggttgaggaggttacaggccggaaaaggagaaatttctcacgcaaggaattaggcagagggacatctcatggtcgttatggccgtgttgttaacatcactggaaataatgtggcatctgctgttgcccagaagcggacgaggaggaactctgatgctgtggttaccacagtcgatgaggtgtctgctggtgtccggaagcggaaaaggagaaagtctgatgccgcgtctaccgtgtttaatgatgaagtggatcaagtttgtgagcagtgtagtagtgggttacatggggatgtcatgctcctatgcgatcgctgtgataaaggctggcatttgtactgtttgtcgccgccgctcgagcgagtgcctccagggaattggtattgctcagattgcctcaactccgatagagattgttttgggtttatccaaaggaggaagtcctgcttgcttgagactttccggcggtttgacgacagggtgagaaagagatggtttgggcagaggaatcccagccgtattcaaattgagaagcagttctgggagattgtggaggggaaggcaggggaacttgaggttatgtatgggagtgacttggacacttcaatttatgggagcgggtttcctcgtcttggtgatacagtgccatcatctatggacctagagacgtggcagaaatactgttcaagcccgtggaatttgaacaattttccgaatctgcctggctcagttcttaggacagtcaaggataaaattcctggtgtcatggtcccatggctctacatagggatgctgttttcgtcattttgttggcatgttgaggaccattgtttctattcaataaattatttgcattggggtgagccaaaatgttgggtatggggtgcctggagcaaaagcaaatgcctttgagcaggttatgcgccaggccttacctgatctgtttgatgcacaaccggatctgctttttcaccttgtcacaatgctgaatccatctattttacaagcaaatagcgttccagtatatagcgtgatgcaggaacctggaaacttcatcatcaccttccccaggtcattccatggtggcttcaatttaggtttgaactgtgccgaggctgtaaattttgcccctgctgattggttacctcatggtggaattggggctaatctatatcgtttataccgcaaagcgcctgtcttgtcacatgaggagcttctgtatgtggttgcaaaggtttctcccggcccttcttccgcttcctagtcatgtgaccgagctgcaccgtcttctccggttgccatcatgccagccaactgtactcccccctccactcctctctaagagcgagtgttccgccaccaccgccgcggagcgtgg

SEQ ID NO: 9730 - DNA, 1396 bp, Zea Mays
taatcacccttgcaaattgactttatatatggaagcgggtatggacgtatggttggattcctgcgtggcgcactgggccctcggtgagagggaaagattctaacaactaaagaaaaacaaaattgccatggtggcccccacagtttttgttgttacgacaacaccaaaaaatgaagggcaaaaccaagcgaagccaggccaagcaactttcttgttgtcctttcgtctcacagcggcagcaggatccattagatgctcgggtggagcactgagccttttccggcggtgagttgagctgagcagaaccgtgctacctagccaatccacaggaggaagagaggagaacgggagccctttttatgacaagaagggaggcgccaggcgtgtgattaacagttttgaagggagagttacctgcatctgcatggaagagggaggcgacccgcagcttccgagcatctccgcacgcaccacgtccgaaggcgcggggggcgtcgacttggatctccttgagcagctactgtctgacgacaacggctggctcgaggtggtctcacgctcgcccaactcggtagcgtttcctccactctcagccttcttctcggctgacgtgacagccaccacagtgacgacgacggcgacggcagcgccggccgcgaacgccagctggtgaattcagacgggtggcgcgagcccctcctccgtggaggagcagttcagccaggccctgtcctacatccgagatacgcagagcgacggcgacgtcctcgtgcagctctgggtgccggtcaaccacgatgacgggaaactggtgctgaccacaagcgagcaaccgttcacgctcgaccaccgctccgacagcctcctccggttcagggaggtgtccaccaagtaccagttctcggccaatgttaagtcgggggattcgccggggctgtcagggagggtctttatcggcaggctccccgagtggtcgccggacatcaggtacttcaccagctacgagtatcccagggtaagggatgcacaatacctcgatgtccatggcaccatgggtctgccagtgttcgagaagggaagctacaactgcctgggcgtcatcgagctgatcatgataaggcagaagataaacttcacctctgagctcaacaccatttgcagtgctctccaggcagttaatctcagaagtacagaagtttcaagcattccacgcataaaggagcatgattcactgacttgtgaaccattacctttatgggaaaagaaaaactccataagcagccctctggccgtctgactgaatctctaaaaatgttgtgattggcttcttatatttcttctcatcgccttttatcaggaagaccatcaaaccaaactattcaaacttcaatcgatg

SEQ ID NO: 9731 - DNA, 3155 bp, Zea Mays
taaaatgagcaaggctagccgctggccgcgttctttgccttcacttgtcctgttcgcccgctagtacagtagtatttttatttcgccccctcgctctcggctcgcctcccattctctctctcctttccccactactagctgcccgtcacccgccgctctgttccatccagcctgcgccggtcccattcgcccgccattccgccgcgcgccgccggcagggcgccgcgtcccgggaacgcgcgcgtgcggtgcgggcgcggggggattcgtcgcgcgcgggcaccaggagagggagggggcgcggggggattcgtcgaccgcgccacctgggaactgggatgccgtgatcgacgccgcgcgcctggagcctggggatggggcgggttggcctcggcgtggcggcgggttgcgcggccgccacgtgcgcgatcgctgccgcgctggtggcgcgcagggcgtcggcgcgggcgcgctggcgccgggccgtcgcgctgctcagggagttcgaggacggctgcgccacgccgccgccacgcctgcgccaggtcgtcgacgccatggtcgtcgagatgcacgccggcctcgcctccgacggcggcagcaagctcaagatgctgctcaccttcgtcgacgcgctgcccgccggaaatgaagaaggaacatattattccatcgatctcggaggaacaaactttagagtgttaagagttgaagttggtgctgggtctgtggtcacccgtcggaaggttgaacttcccatccctgaggaattgaccaagggtacaattgaggagctattcaactttgttgccatgactctaaaggaatttgtagaaacagaagatgggaacgatgaacaacgagcgcttggtttcacattttctttcccagttagacaaacatcagtatcttcggggtcattgattaggtggaataaagggtttttgattgaagatgcggttgggaaagatgtggctcaatgcttaaatgaagctcttgctaggaatggactaaatgtgcgagttactgcactggtgaatgacaccgtggggacattagctctaggacattatcacgatgaggatacagtggctgctgtgatcattggtgctggcaccaatgcttgctatattgaacgcactgatgcaattattaaatgtcagggtcttcttacaaactctggtggcatggtagtaaacatggaatggggcagtttctggtcatcacatttgccaagaactccttatgacatctcccttgatgatgagacacaaaaccgcaatgatcaggggtttgagaaaatggtctctgggatttatcttggggaaattgcaaggctggtgctgcatcgaatggctctagaatcagatttttttggtgacgctgctgataatctatgtacccccttcacattgagcacaccactcctcgctgcaattcgcaaggacgattcaccagatctgagcgaagtcaggaagatactgcaagaacatctgaagataccggacactcctctgaaaactcgaaggctggttgtcaaagtgtgcgacatcgtcacccggagagctgcccgcctagccgccgctggtattgtcgggatactgaaaaagctcggccgtgatgggagcggtgttgcttcaagcgggagaacgggagggcagatgaggcggacggtggttgccatcgagggtgggctgtacgagggctacccggtgttcagggagtacctagacgaagccctggtggagatcttgggggaggaggtggcgcggacggtggcgctgagggtgacagtggatgggtctggggccggcgctgccctccttgccgccgtacattcgtcgaatagacagcaagttcacagagagtaccaagctgtcatgggctgggctgacagaggacagggatccttcagtaataagaagcccgatatgagaacagcacataccataacggaagtacgttcgtgggccacgagccacaaaggccgaaagcgtgcgccattcgaaaaacgcgacggtttcttccagaaggctccgaggctccaaccacacgtcggttcctccgactccgcgcgcgtctcccgccgttccgccggcaccgtacacgatggctctccaattcgattaatcggctctgtggctgtcggatcaagtttcgcttgtacagttacgacaaggattacacggattgtgcgacgaatgatgcacgggaggaggatagtacggtacaaacaaggcactcctgagtgggatgagatgctagttacaagtgaaataacaggcagtgttatttgttaatcaaggcactactaccctcaagcaactttctgcactgttgataaccgggatactggttagtgatcagttgatcatcacagctcgtctcaattatcaacgctgtaacaacatacaggtttcttggaccgctacgatcctccagtgattgcctccaaaggtgtcagagttcaggtgacattgctccactttgaagtattgctctgaggtgtcttcggccactataaaaaaagtcgctatgctgtgttcttcaggctagctaccttccgtagatattgtctttacaggggatactttttacctacacttttgtacaacgtaaacgtatgctctacagaatccttcaagtagcaggaactgtcacaaaggcaatggcagtgacgcctttgggaatattctctgtcctggcgctaggatggctaggggatcatatctgtgtttcctccgttcaaatgtctcccaccttgctccaaagtgggctttccactgctgctgtgtggtgtagggtgccagatactgtttcatcccaataccagcctcttcacagaactccactatctgtttgttcaggttcattgaatgtgcaatgctgccgtaacctgagagagacggtgctgaagaaaggaaccccactaggatcttgccaaagacttccttagcaaatctgcggatggagctcctcggtattagaagattcagccaaggatgtggaacttcccagaggccttgtgccctcagtttcaactcagaggtgtgcaccctgtccaagaactccaggttcacctgttccatggtatcagtgtcgtcactattgaagttcttggttagctcgaggcagtatagtactcttccatccga

SEQ ID NO: 9732 - DNA, 1542 bp, Zea Mays
cctgaccgattctcctaatcaaccgagggctcggatgttagattcattgtgcacatacactctctgggtcatcaacgggcggcttcatcgaggcgtagaggtcgtgctcgacatagctgtcgtagacgacgagaggaggatgcgtggactccaccacctccacctgcggctgtgggtccttcaactcgatggtgctggacaccgtcgcggtagacgtctgtgacctctgtgacgaccgacttcccaccacggcgaccgcatcgtgggagactcctccaccgagacggagtagagcgacggcggtggcagcggcaggaggtcaaggatatacgtctgtaaaccgcggacggggctcgggcgtgcgcagcggctgcaggtctcgccagcgtcggcgtcggcgaggtcgccgccatgggcgcgcggccgtgtggtcacagtcacagtggtcggagtgtgattggttggaaatcgaacgcgatgcgggccttccttttgggctcggtgggccgtgagtcccattttgtttgggcggcaaaggaaacaaaattgatcctactcatcatattcgtttggcttcaacggtcaggatttggcttccactccatgggcctttcgctcgacaagctcatcaaagccgccgccgccgccgccgtcgcctcagctcgctccggctgcctctgcctcccctgcctctgaggatttgcttggggagagacttattatgagattcgcgggttggtacctgaagatcgcggcggtaggggcctccattggcgccgccatggagctcttcatgatccacacgggcttctacgagaaggtaactgtcttggagtcagaaaaacgagcttgggaaagcagtccagaggcccaagcaatgagagaagctctcaatccatggcgcaagcatgatgaacaagaacaacagaagtagtcaagatttatgtgtcttgtcgagtgtctgtgcccccccatccgtagacccatgaatgaggtgggtcactcatctagcagtcaaaagcagagaaggggcagactggtaggaggaaagcagagttcagccggttgcagatgacatccaattcagagtttctgttggttggtttgttgatgatgaatgttcttaactttttgctggatactccgctgatttattatagtgtccccatctcatgtcacgtcatttaagctcggtcctttgtttggatttttttaaagaaattgtttggtgtctgatttttttaaaaaaagatgatttgaaacaatattattatactatcaacgtcaactaaaacaaatcaattgttcttttggtttgtctttgtaccatggtatatcattttgttcctgaatgcagaaaccattgtaaactataattgtctttgtgccaactttaatcagattttagcggaattacccttttgtctaacggttttttgttttggaaatttaaaataaattattatgcattatttatgcttatcgaaattgcaacgagctaaagctataaaactacaattctaatatgaaatatgcgcaata

SEQ ID NO: 9733 - DNA, 1045 bp, Zea Mays
gtctagaaacacattaccatgacacaccatgttatagtgaagctgttatgcttttgtaaggaacatcatatacaaaccaaccatggatctgtatctgttgccatatatggtgaacatgataagcctgctcttattacctacccagatattgctttgaaccatatgtcttgcttccaagggctactcttctgtcctgaagcagcttcattgctgcttcataatttttgcatttaccatatcagccccccaggacatgagttaggagctgctccgattttgccgagcacacctgtggcatctcctgatgacttagcagatcaaatcgcagacatacttgatttttttggactggattcggttatgtgcttaggtgtcactgcgggcgcatacattcttactctgtttgcaacgaagtatagggagcgagtactaggacttattctcgtttcacctctatgtaaagctccctcatggtctgagtggttttataataaggtaatgtcaaatttactgtattattatggcatgtgtaatgtcgtgaaggatattttgttgcagcgctactttggaaagggagtacgtggaggctcagctgaacctgaatcagatattgtgcaggcttgcagaagttttctagatcaacggcagtgtgtgaacgtgtggcgatttatccaaactatcaacgagagaaaagacttgacagagaacctgaagcagctacagtgcaggacactaatttttgttggtgagaattcccagttccatgctgaagctgttcacatgactgcaaagcttgataggcgatatagcgctcttgtggagtacaaagcttgtggctcggttgtgacagaggagcaacctcatgcaatgctgataccaatggagtactttctcatgggatatggactgtacaggccaagccagataaactgtagccctcgtagccctctgaatccgttttgtatatcaccagagctccctctctcctgagagcatgggggtttaagctaagcccattcaagaacgcgaggctaaccttaatgca

SEQ ID NO: 9734 - DNA, 3454 bp, Zea Mays
ccgcagtgcgttcgccccttacctttttcttgtccctttcacggtttcaccccgcgttcgctctctctcccgtggcgacgactgggcggccgccgcagccgccctagcccggtgcggctcttcgtcgggtccttcgccggcgacgggcacctaccaggatgaagacgaggatagtgtactccagggagtttctgctgtcgcttggcgagttggagcattgcaagaagctgccccctgactttgatgcagcgctgcttagtgagctgcaggagctgtcagcgggtgtgcttgagagaaacaagggctactacaacacatcccagggacggccagatgggtcggtgggatatacttactcttctcgtggtgggaacactggagggaggtgggatactcgctcatctggatcaagtgatcgggatggggaacctgatcggcgtggtgcaaaccagtacagacgcaattggcagaacacggagcatgatggcctacttggccgtggtggtttccctaggccatcaggatatactgggcagttgtcatcaaaggatcatggcaatgcgcctcagctaaacaggacatcagaacgctaccagccaccacgtccttacaaggctgctcctttttcacggaaagacattgactcgattaatgatgagacattcgggtcttctgaattatcaaatgaggatagagcagaagaagaaaggaagcggagggcatcttttgagttgatgagaaaagagcaacataaagcagtgctaggaaagaagagtggtcctgatatcctgaaggagaatcccagtgatgatatattttcaaagttacagacatctactgcaaaggcaaatgccaaaactaaaaacgagaagttagatggttctgtagtatcctcatatcaggaagataccactaaaccatcttcagttctactagctcctgcagccaggccgcttgtcccgccgggttttgcaaatgcattcgctgacaagaagcttcagtcacagtcgtctaacatcacacatgagccgaagctagaggatgaccagtcagcaacagggttcacatctgaaagtaaagagaagggagtttctggtaacgatgctactatgggtccaaagcacacgcttccacctggtagtgttacctcttcagctgaattggcttctagcgttctgaaagggagcgaggattgggatgctgatgtaatggataagtattctattggaaaagaaggcaaatctaaaaatattgatccagttaggaaggatgattcagtagcaatcttagaacagttctttggcaatgttttatcgaaaagcggcagcaacctaccaacttatgttgagaaccagccattgaaaactgatgatgacatgatcacttctgtgccagaatcatccaaatttgctcattggtttcttgatgaagacttgaaacctgcagaagacttatcttcaaagagcctgctctccatgattgtcaaaaatgaaaatccaggtctagaaaatttaaaccatactcctttatctgatgctgctgcccagaatttatccccaagagcacctattgataaacttgattctgcatcagagcttatctcatttacatcctctacgcctgccaatggagttcttgaacaatgcatccattctgatgttccagaggcagttcctattatgacatgtgaggatcttgagcagacgatgttagcacaggttagcaatagcagctcaactcagataaatgctacaaaggagcaactgactgttatggatgaaccagttgccatgcagaaagtaactgtagataatcatgcatcacaacatcttctttcattgttgcaaaaaggaacagataataagggagcaccttccctgggtttccagagagaatcaactgatgaacctctgagtgttgacacaaatttaatggcaaatggtggaatatctggaagtgatccggttaacagtgttgaaaatgttcctacttctgggaaggacttgacattggaagcgttattcggggctgcatttatgaatgagctccactcgaaagatgcaccagtttctattcgaggagccacaactggtggtcctactgagtttgcagagatgggtaaaactctgttgtcatctagccatgaaggatactaccctgttgaacagaccgtacacttcaacaatactaaagatgctgctgtccgtagagaaccaggtattgagcattcagcagtacctggtctaagtcaggggagtgctagttttgacaagaaaggaatggaaattcatctgcctgaagaagataatttgtttaccatgagtgattctctgcttggtcaaaattctgatattttggcatcagtaggatccagcagggttgaagggctattgcctgaaaaggcacttgataacctcagctataggtttcaaagtcttgtgcctggtgatgcagaacacattcaagtatatggtcctgatgcacttggatctcatcctcgtgattctcagaatatgtatcatcttctacagggtaggcctcctatgatagcacctcaccctatgatggatcacattgttaataggaaacagccagctccatttgatatggcacagtcgatacaccatgattctcaccgttctttcccatctaatgtgaatcatatgcaacataatcttcatgggccaggggtccctcacttggaccctgctggacatattatgcgacaacacatgtccatgcctggaagatttcctccagaaggcttgccaagaggtgtccctccatctcagcctgtgcatcacatggctggttatagacctgaaatgggtaatgtaaataatttccatatgcaccctcgccagcccaactatggagaatttggattgatgatgccaggtccagaggtgaggggcaatcatccagaggcgttcgaaaggttgatccagatggagatgtcagccagatcgaagcaacagcaggtgcaccaccctgcaatggccgctggccgtgtgcctagtgggatgtacgggcacgagcttgatgcgaaattgagatacagatgatggatgcctggatgcttcactccgtacagaggacctggagcatgtacatctgaacgggtgatggaacggagtgggtctaagatctgtaggagcggaagtctaccgggaaaaggggttatggtgtgctgaatggaagacgtggcgtcgacgtcttagcagccacatgtgtaatgacgttttctgtctactgtttctgacgactatgcagtttccattttgtataagctctgttatgcaaaaggaaaaaaaaagaagaaaaaaaactgagtcagattaacagattggcgacagtgtccgcttgaccctatatcttcaacttgtttgaaaggaaatgaccacgcgtcatgccgagacgtttgtagctgatagcactgtttgagacgttttgc

SEQ ID NO: 9735 - DNA, 3458 bp, Zea Mays
gcgttcgccccttacctttttcttgtccctttcacggtttcaccccgcgttcgctctctctcccgtggcgacgactgggcggccgccgcagccgccctagcccggtgcggctcttcgtcgggtccttcgccggcgacgggcacctaccaggatgaagacgaggatagtgtactccagggagtttctgctgtcgcttggcgagttggagcattgcaagaagctgccccctgactttgatgcagcgctgcttagtgagctgcaggagctgtcagcgggtgtgcttgagagaaacaagggctactacaacacatcccagggacggccagatgggtcggtgggatatacttactcttctcgtggtgggaacactggagggaggtgggatactcgctcatctggatcaagtgatcgggatggggaacctgatccagggcgtggtgcaaaccagtacagacgcaattggcagaacacggagcatgatggcctacttggccgtggtggtttccctaggccatcaggatatactgggcagttgtcatcaaaggatcatggcaatgcgcctcagctaaacaggacatcagaacgctaccagccaccacgtccttacaaggctgctcctttttcacggaaagacattgactcgattaatgatgagacattcgggtcttctgaattatcaaatgaggatagagcagaagaagaaaggaagcggagggcatcttttgagttgatgagaaaagagcaacataaagcagtgctaggaaagaagagtggtcctgatatcctgaaggagaatcccagtgatgatatattttcaaagttacagacatctactgcaaaggcaaatgccaaaactaaaaacgagaagttagatggttctgtagtatcctcatatcaggaagataccactaaaccatcttcagttctactagctcctgcagccaggccgcttgtcccgccgggttttgcaaatgcattcgctgacaagaagcttcagtcacagtcgtctaacatcacacatgagccgaagctagaggatgaccagtcagcaacagggttcacatctgaaagtaaagagaagggagtttctggtaacgatgctactatgggtccaaagcacacgcttccacctggtagtgttacctcttcagctgaattggcttctagcgttctgaaagggagcgaggattgggatgctgatgtaatggataagtattctattggaaaagaaggcaaatctaaaaatattgatccagttaggaaggatgattcagtagcaatcttagaacagttctttggcaatgttttatcgaaaagcggcagcaacctaccaacttatgttgagaaccagccattgaaaactgatgatgacatgatcacttctgtgccagaatcatccaaatttgctcattggtttcttgatgaagacttgaaacctgcagaagacttatcttcaaagagcctgctctccatgattgtcaaaaatgaaaatccaggtctagaaaatttaaaccatactcctttatctgatgctgctgcccagaatttatccccaagagcacctattgataaacttgattctgcatcagagcttatctcatttacatcctctacgcctgccaatggagttcttgaacaatgcatccattctgatgttccagaggcagttcctattatgacatgtgaggatcttgagcagacgatgttagcacaggttagcaatagcagctcaactcagataaatgctacaaaggagcaactgactgttatggatgaaccagttgccatgcagaaagtaactgtagataatcatgcatcacaacatcttctttcattgttgcaaaaaggaacagataataagggagcaccttccctgggtttccagagagaatcaactgatgaacctctgagtgttgacacaaatttaatggcaaatggtggaatatctggaagtgatccggttaacagtgttgaaaatgttcctacttctgggaaggacttgacattggaagcgttattcggggctgcatttatgaatgagctccactcgaaagatgcaccagtttctattcgaggagccacaactggtggtcctactgagtttgcagagatgggtaaaactctgttgtcatctagccatgaaggatactaccctgttgaacagaccgtacacttcaacaatactaaagatgctgctgtccgtagagaaccaggtattgagcattcagcagtacctggtctaagtcaggggagtgctagttttgacaagaaaggaatggaaattcatctgcctgaagaagataatttgtttaccatgagtgattctctgcttggtcaaaattctgatattttggcatcagtaggatccagcagggttgaagggctattgcctgaaaaggcacttgataacctcagctataggtttcaaagtcttgtgcctggtgatgcagaacacattcaagtatatggtcctgatgcacttggatctcatcctcgtgattctcagaatatgtatcatcttctacagggtaggcctcctatgatagcacctcaccctatgatggatcacattgttaataggaaacagccagctccatttgatatggcacagtcgatacaccatgattctcaccgttctttcccatctaatgtgaatcatatgcaacataatcttcatgggccaggggtccctcacttggaccctgctggacatattatgcgacaacacatgtccatgcctggaagatttcctccagaaggcttgccaagaggtgtccctccatctcagcctgtgcatcacatggctggttatagacctgaaatgggtaatgtaaataatttccatatgcaccctcgccagcccaactatggagaatttggattgatgatgccaggtccagaggtgaggggcaatcatccagaggcgttcgaaaggttgatccagatggagatgtcagccagatcgaagcaacagcaggtgcaccaccctgcaatggccgctggccgtgtgcctagtgggatgtacgggcacgagcttgatgcgaaattgagatacagatgatggatgcctggatgcttcactccgtacagaggacctggagggttgtagcatgtacatctgaacgggtgatggaacggagtgggtctaagatctgtaggagcggaagtctaccgggaaaaggggttatggtgtgctgaatggaagacgtggcgtcgacgtcttagcagccacatgtgtaatgacgttttctgtctactgtttctgacgactatgcagtttccattttgtataagctctgttatgcaaaaggaaaaaaaaagaagaaaaaaaactgagtcagattaacagattggcgacagtgtccgcttgaccctatatcttcaacttgtttgaaaggaaatgaccacgcgtcatgccgagacgtttgtagctgatagcactgtttgagacgttttgc

SEQ ID NO: 9736 - DNA, 3467 bp, Zea Mays
cagacccgcagtgcgttcgccccttacctttttcttgtccctttcacggtttcaccccgcgttcgctctctctcccgtggcgacgactgggcggccgccgcagccgccctagcccggtgcggctcttcgtcgggtccttcgccggcgacgggcacctaccaggatgaagacgaggatagtgtactccagggagtttctgctgtcgcttggcgagttggagcattgcaagaagctgccccctgactttgatgcagcgctgcttagtgagctgcaggagctgtcagcgggtgtgcttgagagaaacaagggctactacaacacatcccagggacggccagatgggtcggtgggatatacttactcttctcgtggtgggaacactggagggaggtgggatactcgctcatctggatcaagtgatcgggatggggaacctgatcggcgtggtgcaaaccagtacagacgcaattggcagaacacggagcatgatggcctacttggccgtggtggtttccctaggccatcaggatatactgggcagttgtcatcaaaggatcatggcaatgcgcctcagctaaacaggacatcagaacgctaccagccaccacgtccttacaaggctgctcctttttcacggaaagacattgactcgattaatgatgagacattcgggtcttctgaattatcaaatgaggatagagcagaagaagaaaggaagcggagggcatcttttgagttgatgagaaaagagcaacataaagcagtgctaggaaagaagagtggtcctgatatcctgaaggagaatcccagtgatgatatattttcaaagttacagacatctactgcaaaggcaaatgccaaaactaaaaacgagaagttagatggttctgtagtatcctcatatcaggaagataccactaaaccatcttcagttctactagctcctgcagccaggccgcttgtcccgccgggttttgcaaatgcattcgctgacaagaagcttcagtcacagtcgtctaacatcacacatgagccgaagctagaggatgaccagtcagcaacagggttcacatctgaaagtaaagagaagggagtttctggtaacgatgctactatgggtccaaagcacacgcttccacctggtagtgttacctcttcagctgaattggcttctagcgttctgaaagggagcgaggattgggatgctgatgtaatggataagtattctattggaaaagaaggcaaatctaaaaatattgatccagttaggaaggatgattcagtagcaatcttagaacagttctttggcaatgttttatcgaaaagcggcagcaacctaccaacttatgttgagaaccagccattgaaaactgatgatgacatgatcacttctgtgccagaatcatccaaatttgctcattggtttcttgatgaagacttgaaacctgcagaagacttatcttcaaagagcctgctctccatgattgtcaaaaatgaaaatccaggtctagaaaatttaaaccatactcctttatctgatgctgctgcccagaatttatccccaagagcacctattgataaacttgattctgcatcagagcttatctcatttacatcctctacgcctgccaatggagttcttgaacaatgcatccattctgatgttccagaggcagttcctattatgacatgtgaggatcttgagcagacgatgttagcacaggttagcaatagcagctcaactcagataaatgctacaaaggagcaactgactgttatggatgaaccagttgccatgcagaaagtaactgtagataatcatgcatcacaacatcttctttcattgttgcaaaaaggaacagataataagggagcaccttccctgggtttccagagagaatcaactgatgaacctctgagtgttgacacaaatttaatggcaaatggtggaatatctggaagtgatccggttaacagtgttgaaaatgttcctacttctgggaaggacttgacattggaagcgttattcggggctgcatttatgaatgagctccactcgaaagatgcaccagtttctattcgaggagccacaactggtggtcctactgagtttgcagagatgggtaaaactctgttgtcatctagccatgaaggatactaccctgttgaacagaccgtacacttcaacaatactaaagatgctgctgtccgtagagaaccaggtattgagcattcagcagtacctggtctaagtcaggggagtgctagttttgacaagaaaggaatggaaattcatctgcctgaagaagataatttgtttaccatgagtgattctctgcttggtcaaaattctgatattttggcatcagtaggatccagcagggttgaagggctattgcctgaaaaggcacttgataacctcagctataggtttcaaagtcttgtgcctggtgatgcagaacacattcaagtatatggtcctgatgcacttggatctcatcctcgtgattctcagaatatgtatcatcttctacagggtaggcctcctatgatagcacctcaccctatgatggatcacattgttaataggaaacagccagctccatttgatatggcacagtcgatacaccatgattctcaccgttctttcccatctaatgtgaatcatatgcaacataatcttcatgggccaggggtccctcacttggaccctgctggacatattatgcgacaacacatgtccatgcctggaagatttcctccagaaggcttgccaagaggtgtccctccatctcagcctgtgcatcacatggctggttatagacctgaaatgggtaatgtaaataatttccatatgcaccctcgccagcccaactatggagaatttggattgatgatgccaggtccagaggtgaggggcaatcatccagaggcgttcgaaaggttgatccagatggagatgtcagccagatcgaagcaacagcaggtgcaccaccctgcaatggccgctggccgtgtgcctagtgggatgtacgggcacgagcttgatgcgaaattgagatacagatgatggatgcctggatgcttcactccgtacagaggacctggagggttgtagcatgtacatctgaacgggtgatggaacggagtgggtctaagatctgtaggagcggaagtctaccgggaaaaggggttatggtgtgctgaatggaagacgtggcgtcgacgtcttagcagccacatgtgtaatgacgttttctgtctactgtttctgacgactatgcagtttccattttgtataagctctgttatgcaaaaggaaaaaaaaagaagaaaaaaaactgagtcagattaacagattggcgacagtgtccgcttgaccctatatcttcaacttgtttgaaaggaaatgaccacgcgtcatgccgagacgtttgtagctgatagcactgtttgagacgttttgc

SEQ ID NO: 9737 - DNA, 2427 bp, Zea Mays
tctctctccacatcagttttggtcccaaattcagcctgagagctgcagcagcgaagagccgaagaaagccagcctcgccttccccctctccccatactaatcatcatcaagggcctgcgattccaagttgcgtttcctgtctggggattcagggtggaaggagatgaaatcgccattgcgcaggttccggggcttcgcccttcatcaccaccaccaccacagggagaggaaggaccaccgcccgccgtccgccaagctcgacgagctcgtctacgccgcccaggaaatggaagatatgaggaactgttacgatagcttgctttcagctgcagccgcaacgacaaatagtgtatatgagtttgcggaagccatgggtgaaatgggaacttgcttgcttgaaaaagctgcattgaattatgatgatgatgaaagtgcgtacaaatattataaatacaatcacaaatccatcagagtcccttctgaaagagctacaagtcgtagaggaaatgaaagaccaatgtgatcaaaaaagagtggaatatgaagccatgcgagcagcctatggggagaaaggagggcgattgaggcacctaaaaaatgaatcattctcattgggacaactgcaaacttcatttcttgagtaccaagaggaggcggcattgtttatttttcgcttgaaatcactaaagcaaggtcaatttttaagtattttgacacaggctgctcgtcatcatgcttctcagttgagttttttcaggaaagggctgaagcatctagaggctttggagccttgtgtcaaagcagttgctgagaagcagcacattgactaccacttcagtggactggataataacagtgatattgatgattacagctcttaccaggataatcatagtgatggcagtgagttaagttttaactatgagataaatgacagggacaaggacctccccactttcagaagtccaatggatatggatcaagctcatccagtgagttccccaagacctctgaaggaacaggagcaggaaaatgctgaagaaataaaggcgactttaggagttcctcatatgaagcctgagattggtacccaatcagcaccaatttttgctgagaatgttcctgatccatctatgagattccggaaaatgaacttgttaaccagaactgttcactcctacaaactcccaacgccagctgatgacaagaaccctgcttcagtaattgccaacaaatcgcctcattcagatcaacccgagagtaaatctcacgtggcagtaaatttgtggcattcctctccactggctaaagattttatgccgaattccatgcacagtggacctgttaagatgccatcaagtaacgaaggggtatcactagcttattcctactccacgacagattttaagaaagtgaagagggaagctttttctggcccaatcccaagcaaggtaggattgagcacccccctgatttctgcgactgatcgcaaaccgtcagggaagcggccttcctatgtgttgccaacaaggcctcctggcccaggttggcagtcatctgtgcctccaaaagctacgcccagggtgacctcgctcccaacaacgactcccaggataagcgagctgcatgagctgccccggcctccagcaaatgctggtttggttggatattctggccctctggtttcaaggcggccgatgcctactgctgtatccaccacccgtgtctcacccccatcacatacggcgtcgccactcccacgaccacctgctgccatgactcgtagctactccataccttcaaacagtcaacggactcctattattaccgtgaacaaattgttggaggctaggcatagcagggagagtagcgaagtttcctcccccccagtaacacctatatcactggcagacgtttcccgcagaccaacaacagaagcagctgtttgacaagaaaaggataaaggaatccttgtgagcagttgcgcaactgaacatgttgataatcttaggaaattttgtatgtggttgactgtattctatgattccctccataatctctcgtgttccctgcgaaaggaaaaaaatgtaaataaggttccattatgttatcgccttgatatgcttgtccgaactacctcttggatatagtgtaatagtctacaagagagagtttagatatggacgctgttgattcagtggtcatctgagctaattttttggactctggtgtgtagctctacccataatactgcactgcccgaactgatatttgtattagcggatatctacaagtttaagttagaggtttgggtatgtgatatttctggcccaggtagattatgtgatattagtctaaggcagtggcaaacctagctgctatgtttagtgtgtgtcagaaaaaaaacaaaaaacatgaatcaactag

SEQ ID NO: 9738 - DNA, 2583 bp, Zea Mays
cttggttcgaaatctcccggcgcttctagtctagcgctcagttcatcggcagtccggcacggcgcagaagctctcctcgctcgcgccgccacacagcccacaaccttctatggattcgtcctcggccaccgccgctaccgttgcgccggtggtgacctcggccccgccgctcgaagactgcctccgcctcctccgcggcgagcgcgacgagcagaagctggcgggcctgctagtcgccgccaacgtctgccgcgcgggcgacgccgacgccgtcgccaacgtctaccgcgccgtcgggccccgcttcctccgacgcctcctcaacactgggttggggaaagtggagggcgggaaggaggaggagcgagaggcatacatgcggctcgccgtcaccgtgctcgcagggctcgcgcgcgtcccggaggttgcggccgacgagggtgtcgtttccaccgtgcccctagtcgccgaggttgtcgccaaatcgactgatccagcaatcactgaagaatgctttgaacttctgtcacttattgcaatagcgtctgaagatggggcatatgagttttgtgagcccggtgtaatagacatgatcttccttcaaatcttaagcttaacagatggttctaagtgcgtagaacttgccattaacctactgcagttactagttcataaactcaaagttgacactatgagttcggagaaactgcaaggaatgactagaatggtaacttgtcttgccaggatatttgctgttctccacactgcagttaaatttgatgccttgcacatgcttaccttcctcctgtcccaaaaagaatctccacttcatgattttttgagatcaatacctgcatcaatttgggaatctcacattcgagttggaatcactgccattctccaaaatcgtgttgtatcctctgaaaagttgcacgctcttcttttggcggagtgcatgatgtccatactgggcgaggattggttgtcagaagattttgaagtccaggataaccaaaatgtgttgtctgttgacaaatttgtattgcttgtgctggaatccgcaagggttgaagtggcagtcttgctaaatgagcttgcttatctgaagtacgagtcatcaaaaatttctcagacagatgaagccatcagtcagaaacagaggaacctggctatactattttcgttaatagaaagaataattaaaatgatatcaaatgccagtagtggtgaaggtgcaccaattcataccatccgtgaaagtaccataatgcaggccattacgggattaaatgagacaatcaatttagtcttagactttctgcaggacgcgaaggatcatggtcaatggaaaggtgacgatcttttagcagctgcaagaatagtaggaagaagcaccatatgcctgcaaggagaagactgggaatctattggaatttatcttttctatagaaggtcaagatgaatcaagttccttctattctatttgcttcatgcttccaatgctatcccaaataacaatggaggttgatggatgtagaactttggcatcatttggtggccataaggcagttatagattgccttgttaaaatgactgagcagggtggaatgacgattgataacggtagcatgtttttggcatgtgataccatcataaatttcatgtctaatatgaagagtgtccatattccagtggattattgtttcattcgcctcctaaaagcacttgttacatgggctggaaccacagatgcctcatcagttaccatgacagcatcctgcttatgtgtaatgctgttggacatgacgtcagaaaagtttctattgagctgctctcattttgacgccaatatccttgggagtttgtctgagatcatcatcagaagtttgcagcaggatatccctgatgatgatagtgagcaattcaagcagaagcagatcattgtatcaggttataagcgatgggctgatcgatttccacgtgttaaagatgttgtggagcagcatgtatccgtgtgaatgtgatcaacccccaggagctgttctctatgaatgcaaacctgcaaacgtgacagtgcagctttgacaatgcctcggttctggtggttcattccttttacctggttagcgaaattctccagcggcaggccggcagctaacgaggtgcaccaacgtggatcagaaagatgtcgttgtttatccgggaaattctcagctgcgaagcaaatctgacattgtaatgtttatgctgcacgagaaagaacaaggcggtttggggactagattctcatctcgctttcaccatttctgaacgcatgtgtaacagaaccaagcccaagtttcaggcaaggggttttcatttatattgtttagcatgtatacatgcgagacgaacatatgaaaggataaactcctacttaaatgtaagtagagatattgtagtggagtaaaaagcacacgtctagatttgagatggctcctaaatcttaaaaagtgagtctgaactaatggaatgttgtttgggatagctcctaaaccttaacaaatgaatctgaatctagaatttactcagattcactgtgaa

SEQ ID NO: 9739 - DNA, 8802 bp, Zea Mays
ctgtatcaggaagattagaggcaattgctgatttcatacttgcatcttcatcggtcaccataaggattggagcttttcctcccattgccaaaaggaatgtcttcaacaaccattcataagactcgatcttctcatttaaataatctcgaggagctgtgggcacttctaaattttttgttgcccaatatttttaattcgtcagaggacttctctcagtggtttaacaaaccatttgaaagtaatggtgataattcacctgatgaggccttactttcagaggaggagaacttgttgatcataaatcgtcttcaccaggttcttcggccctttgtactcagaagacttaagcataaggtcgaaaatgagcttcctgaaaaaattgaaagacttgtaagatgtgaggcatctgcttatcagaaacttctcatgacaagggtggaagaaaatcttggtggaattggagccgttaaggttcgctccgttcacaactctgtcatggaattgaggaacatatgcaaccatccatacttgagccagcttcatgttgaagagattgagggctacctacctaaacattacctaccatctattttgaggctctgcggaaaacttgagatgttggacagattgctgcctaaactcaaagctacgggccatagggttctacttttttctacaatgacaagattgcttgatgtaatggaggattacttggtttggaaaaagtataaatatcttcgattggatgggcacacttctggccatgaaagaggagctcttatcgataaatttaacgatcctaattctcaagcattcatttttcttcttagtatacgagctggaggtgttggggtcaatctccaagctgccgatacagttatcatatttgatactgattggaatcctcaggttgatctgcaagcacaggctagggcccacaggattggtcaaaagaaggaggttcttgttttacgtttagaaacggtccgaactgttgaagagcaagtcagggcttcagcagaacacaaattaggtgttgctaatcagagtataactgctggtttttttgacaataacacaagtgctgaagatcgaagagagtatcttgaatcactcctacgtgagtctaaaaaggaagaagcagctccagtgttagatgatgatgctctgaatgacattctagctcggagcgaagctgagattgacatattcgaatctattgacaagcaaaggagagaagaagaaatggcagcttggcaaaaggtggttcaggatggttcaactagtgggctagaccctggagtattgccttctcgtcttgtaactgatgatgatctgaagcccttctgccatgctatgaaactttatgagccatcaaatgtgaaaacagtaaatgtgaatgtgaggaagaagggtgaacttgggggccttgatacacagcactatggaaggggtaaacgagcccgtgaggttcgctcttatgaagaccaatggactgaagaagaatttgaaaaactttgtcaagctgattctcctgaatcatcccaacctggtggcatgtcgaaggatttggatattcttaataaaggcattaagactgaaattcttgtggagagttcaaaagaaccagaacaaacgaagatggaggcatccccaactgtcggtgactctccaccagccaaacggcggagaggtagacctaaaaggtcagatgtttttgtatctcctactgctggtctgactgatgctgtcaaacaagacacaggaaccacacaggacggtagttctgctacaccagcaagtaccatccactctgatgcaccagctactgcaatcaattcagctgtttcagatgttaatatacattctattccaccagctgataccaagaaacaagagttcagtactgataccaaggtttccagttctgtttctgttttggaaggatctgtgccgaatgaaattggtacaccattacagagtgttcataatgtagcagtttctgcaccaccgcatcaatcagctaggggcaggaaatgccaagcaggagaaacacctcgtaggcgaggccgaaaaccaaaatctctatcttcatctggtgtagatgatgttagtcttaacccaaccttttcaactgttagtggtgtagcagacactagttatgttccttcatattctcaggtctcatcacaaggcactgctgtggcactggcaggaatccagaaggattttgtgacagttaagttggatacattgttaccagatagtggtaagggtgctcctcctgttaatgagggagataaaggtgctactgttacaacacctgtggcaaaagatatatgtgctgggactgtgacaacatcagacaacactgtcaccctgacaccaaatactcttaaggaaaacattggattagttcaagtggcatctgcaccttctatgctcgtggcttctgaagaactaatgaaaatagcacatgttgcggtggccgataagcctgttgagaagcaaactgcttcacgtcgccgcagaaagaaaacatctagtagcgaggatactggagtcagcactagacaaagatcagctatgaaaagatcttactacaacacctctgttgccgttgatgatattggttctgctgtgatcccaaatgaaaaatcaggaataacgaaggaaagagatgtcagttcaattcaaagtacatccaatgaactaccaaatattaactcaccattgtatgagaagtctggatatgattctcaaccaagcacacctatagctgtccccatcaatgaagacactcttcctagtggttttgacacctgtactaattctatgataactcttgccacatctgccaactctgctgaagatgataaaccagttgatttgcaccttaatgcacctgtttctgttgattcccaaaaccaagaacaacacatgacagggaaggaccatttggcagtgtgttctagaatctttgctactcagttacagacggacactgcaaatcctgctattgatcataaaccaggaactgcccagtttgaaccatctgcttccttgccccagaattcaggcaaggatgctactgcactaccttctgaggttgacagtgctgctccaaatagggcatcaagcaggaggaggaaagggtcaactcgagaaccacgcaccagaagtaattctgcatcagctgcaagtgaacgtcgtgcccgacttactggattgaagcaggcagaggacataaagaagttagagatgtcagcaacgccgaccacaacagtgtgtatttcatcggtagagcaacagggagctgcttctttaagtgcgaagattaccaatgcttctgtttctgaaggacagaagaatcctggaaattatatgccttctgccatttcaattcccgtggggagccatgttctgggcctgggcgcaacaagtattgaagaaacaactgccactatgataactcaggctcctgcagtttcaaaatcagaacgaagaaaacttccaggaggcagtcaacaaggtattcagtttgagagttcagcatcaaaaacaaagatggtatcagctgtggaaccagcacctgcaaatgttgaatgcatgcaaggtactgaagttaatagttcagaacagacaatagtttctgctactgaaccagcacctgcaaatgatgaacacatgcaagagcaaccaacaaatatcgtttcatctgtggaatcagaaccttcaaatgatgaagagcacacaaagcatgaagtgtttcttgcgactactggtgataatatgcttgcttctagtgcaggaactgaaatattgcgggatacagttgagcatgctgcttgccagccagaagcagtatgcacagatggaactgcaaggcagtctgaattgtcgcaacttgatagaaaagcctttcatgatgcctcatataaatacactcatgggtccactaaagatgatggtatcttgcccagtgaaggtacttctgttgatgttactggttctaagcaggatgatgtgaacattgttggcacacaaactgatgatgtttctcggggttctagtcattttccagttattttacaatcaactgagtcagatcggcctccaggtcaagtgaagaatttggagagtaggatggagcaggtgaaaacagaagaagctttggttaacagttctggtggcaatcaaactcacagtctgggcgatgaaccttctcataatacatcattagcaagaaattctccctcagaacactcgaatgagcgttgctctgatcaagtaattggtgaaaatttcaaaagtaaagaaaatattgttgaagtccattctggcattaatactgatggccccgatgaagctctgaatgcattgcacacccaatctaaggaggccagcatgacagatattggtgtacctactgatggtgatagatgtgaaggtaaagggactagtgtcgaggtctgtgctgacatgaatactgatgggcctgtggctacccaggatgcttcgtccacgaaatctgataaagagtcctgcatgatggaatgtggtgtgtctaccgatggctgtcccacagtttgcaaaacacacaatgatctccagggtcatgtatcttgtgaagaaacctttgttaggactggtggtgatgacacaacccatatcaccaatgcaaattatggttctaataatgaaagtgaggccaccattgctagtcctgttgaaaccacacaaaaactgatggaagggagcactgttattgtgtcggagaattctgatttaaataagcaatgccacacattgcatactagaaatgatcctcctgcaaataccctgttgatagttgagtctaacaaagttacttgtgatgctgaaattgtttgtgctagcaggttagaatcttctggcattgaggctgaaacagtgggtatccaagagtcagctcttactgattttgagggaacaaaaggaactggggatttgggtgacagaactaacagtcaactgcatgatgatgttcatgggacatcatgttccacgatagctcttgtatctgagaaagaaccttccgaagatcttaccaccggtagccattcagaagcatctaatttacttgctgctgtagaacaaactcaagaaactactgttgagaaccaagagatcatagatgcagtagtgtttatggatgcctgcaaggcagaacctgttggtgattttactattgctaaaggagctgaacagactgtagaaatggttcattatgttgataagcaatctgctgtattagactatgttgagacacagacaaaacgaacttcggtttgtggttctacgctaaatgaatcccctcaggctgcagggttggaagaagactgctctgtactgaagcatggtgatcctacttcatctgagcttcttactgtagcacctaatccaatcggtgaaacttctgttattcaagtggaaccagaggcaagaaactcagatggatactgcacaacagaggctggcagtgctttatctgaaactgtcatgggattggagccaaataaagaaactgcggttccaatgcaagagaatattggagaagctaatgataattttaataattgcgaagcacacaataattcggagattcatgcatttgaagtgtcgatggaaacgcagtcatcagaagtcaaggaagtatcttctattcagtctggtgcagcaaatttgagcacacagacaactgcactgcctgatgtaacaggacaaaccagtatggcatcgactggagaactagtatctacaaatgaacacatacacatgcaaggcactgaaatcaattcagagcaacaaacaaagatggtttcacctgctgaatcagcacctgctaatgatgaacacgtgcaagacattgtgattcttagttcagaacagcaaacaaagatggttttagctgcagagattgacgcattatgcgtccaggagactgcaattattgatcttgggggagcaagaggaacagttgacctgaatgacataagaacacaggttcctgcattacctggaagggatgtgctagatgtggaggcacatattttggagcaaaaaaaaacatcttcaccaggtgatgaaattaagggttcagaacaagcaaaaatcgaatcgattgcagagatcgaaacagtgggcgtcaaggagaatgtcattgctgatcataaggaaacaggtaacaacagtggcgtaagtatacatgcgcctctattagttgaatctggacaaaaggcatcacctggagttgaattgcgtggtattgaggttgatgctcatgttttggaacaagcaaagatggtttcagctctagaaccagactctactccagaagtttgtgctgacaagttagaaccttctggtgctgatgatgttggaatgattgttgtccaggaggctgcttctgttgatgatcacaatagagcacaaggtggtgaggctcattgttcagaacaaataaagatggcttcaattgcacaagcggtgtctagcatggctttagtaggatattcttcttcagaagactcaatggtggatgctgctgcccgagtaactgatgctgattttgtggatagtaaagcagctggtgtttatcgccaagaaactatgcctactcaaaccacctctaccctcccagagaacatggattctcctgcaactgctgctaccatggttgaatcgaagtttgctgcctcgtctgagcacgttgcaggacccgagccaattgatgaaacttctgttatgcaagtggaactggcaacaagcacaggggatggatgtgcagcagatggtcacaatcttgtttcatctgaaactgttgttgaagtgaagcttgctcaagaaattgttgttcctagtccaggtggtagcatagaagctaataatacttctaccatcagcgaagtatacaaagatacccagtctcgtgcatctggtgaagcatgcaatgatggtcagtctcatggtgatgaaaatatgaaacttggtgaagcttacactgaactgcagctggcaccttcctctggtgaggaggccatgacatgtatgtgtagtgagctgcccagccaggaggtggaggctccaagcagtgaccctttggagaataatgaagaaacgaaaaatgaagctgctgctcaaggatcagtaaatgaggattctgctcctcgtgctgaaaatgcaaagattgatgaagctgacacagaacaggaactgcttccatctggtgaggccacggtagacgaatccagcgagctactcagccaagacgaaaaggtggctcgtaaagatgcaaagatggaagagtctgctgctgctgctgctgcacagagacagctaactactgaagttgctcatgcaagtgaaaacgcgaaacttggtgaagatggcacggagctgcaactgccaccaccttcaatggtagacatatctagggagcaactcagccaggaagtggaggttgcaagctctgggccttcaggaactgatgaaactgctgagatgaaacggctaaacactgaacattcacctggtgatgaaacttcaaaacttgttggaactgatctaggactgcaattgtcaccttctggtgatgccatggtagatatatctaataagccacccagctgccaagacgtaaaggaggccccgagcagtgacattttgggaaatgatgaaaattcagacaccgagaagactcctgctgccttgcatggacggctgaacaccgaacttgctcctagtggcagaaatacagaatttagtgaagctgacactggaaaacaagagacacccgtgtctgctgaggctatggtagaatcatcgagcgagcctcgcagccatgaggcaaaggaagctccaacccctgacctgtctggggatgatgaaaaagcgaagtcagcaagggctgctgttgttgcggaactttttggagatgcaacagaaggtggttcggatcagccattgccgtctcctagagaacaaggcaaggaagcagaggccgatggaggcttttagagtaaagttgcaaatattgtatcaagagatactagaatccgtgtaagtaagaactgctaatagtgcttttagttgtaactggtgtaagcttctactcagaatcaaaagcgacgtgctgagattacagcaacagtggcctacggcagtttactactgttttgtgcaatattgctgctgagttttgttgagacaggcaattgatctgtcatctgtctcgtcttgcatcgaagttggcagcaccatggtgaggtgctcccgccttaacctggaagcgctgacagagggaagaacaatactctctggtttcctaatgttttcctgttcactgttttgatttgatgctgcattgcagtagtgtgacttagtaacataatggtgcgtttggatagacggacataccgatccagaatcatctgaacctaaatattgagtacaagcttagattatctgtttggtctgctttatgtctgggtgcaatgctctctgatttctggacggagtggtaccgcaatccaaacagactttaatgtttgggtgcttcaggtcataatcaaccatctaatttactttgcaaatgaatgtttcaaactggactgctcaagcctaccaagtttaatggtccttcctagtattgaatccttttgagtctagcccgtttcctcatttgaattttcactgttagtgtgcctatacttgcctcacgtagaattttgaaagcttatggttgggtgcgttgtactcgac

SEQ ID NO: 9740 - DNA, 12320 bp, Zea Mays
ccgggagagagtgcatcagcactgcaggggtctactgaggcactccaagtggggaaatggcggaggcgacgaattcgagcttgggcacgtaggcgtcgctcctgccatcgccgcagcggtcactggactctcacgccgccgccgccgccgccggagaccattagttctcctgcgcggcggctccgcggctcccgccctctcccttaccttcttcccgctagggttttctccgatccccaatcactgctggttcacaaatggcttcatctcagcatgttgagatggaggctgcgaaacttctacataaacttatccaggagtcgaaggatgagcctgctaaactagcaacaaaactttacgtgatatgtcagcatatgaaactaagtggaaaggagcaatcactgccatatcaagtcatatcaagggctatggagacagttgtgaaccaacatggaattgatatggatgcattgcgatcatcacgaattccatttgctggtggtcctcaggcaggggattctagtggtgtcatgtcaaaggacaaggaggtcattggtaaccagtctcccatggtcggaagtgatgcttcccaaagtagtggacaagctggattatggcagcttccatcaggttcaaccgatatgataagacatggggcatctatttcaggtagggtacccacagggccaaataggggagatttctcagcagctgatattcatcaaggctccatgtcacaaaaaagcggtagatcctctggcattgaaagccctgcaagtctgcagatggaggacaccagatctatgaattcacatgattctttgaaatccgatgagaaaacaagtaagaaaacctcttccaagagaaaaaggatggattcaaaaggagctggtgatttgcgttcagaagacaactcaaagtcagatgttatctccactggacagaataccaggaaggggaaacaggttggtaaggctggtagacaaggtcagccttccatgggaattgagcatgagcagcaacctcataaactgcaaggtggtactggtcaggtaccacctatacatggtggtgcaccttttctcaggactcgctcagaaggtccttctgggaggacaatggacaagactaaaccatcaaatccattctcaatgggtcaaattccaaattttcctgaagggctggcttctactggtgctccaatcgagttgcagaaaagtatacagggtggagcaagtttatttaatcctggttttggctggaaccaaaatccacaagttcaaaccttgaagaattctcaaggttctattcataatttagtgaggtctggagttactgttgaagggaaagttaatgtaggggcacaaggagcttttaactctgcctctgcaccacagatggaatttcccacagttcctccatacaacccctcttccttcggagctagctcacagtttctggacaaaggcaaggagttggtttccagcattataagcactgaacctcattcatctaaagttgcatctcagcctgggatttctcatggaagtcccatgcaagaaaggcaaggtatgatcagggtgccacagagaggcgaggcatcatttcaggaacgcaggccatcttcacttccgagtagaagtactgggccaagtccaatgtctcacatttcttccaacacaccatttaaagaacagcagctgaagcagctcagagcacagtgcttagtatttcttgcatttaggaataatttgcagcccaggaaggtacatcttgaaattgctttgggcagagggcctcctgcagaaagtgacagtgcaggtcaaaggggcagcgagggcagagtgtctgatgctctgggaaaggaaaatggtagcagtcgggagaactctggtgtcttttgtaggcaaactgatatctctagacttccagccacatctgcaggaagtattgcagaggatgattccttatcgaaggatccagaaaatgctacaaaaaaaatcaagttagctgaacaggagaagtcattgatggaagtagaaaatgtccagcaagcttctgttatgcaaggaactagttctgaaatgcgttcccaagaaactgcatctcaaaatccatatcgaccacaacagtcatattatcaaggagatacaagaagaatcgcctcggatatccataggactgatgctgaaattttgaaccagaatttaagttggggaggccagggatctactgctttgggtggtactagacagcttctgaatcaggaaactaaagaatcacttgcaccttcaaagtcacaccatatgcctgttgatggttacaactccaatatacaaggaatagatcggactccagagatagctggagctggtaatgatgttgaaaattgtagccacgtagcagatattgtgcctgagcaggctgctgatgaaggagatgaggacctctcagagcatgaggatttattgtcatctccaaagcacacaatgacggaaaaatggatcttagattaccagaagagaatttacaatgagaaacaaaagagaacattggagcagcataaggtacacagcagaatgtcagcaacatatgaggagctaaaggagagcgttaattcatccgaagatctttctgcaaagaccaagagcgtcattgaattgaaaaagcttcagcttctgccacttcaacgtcgtgtacgcagtgaatttttgctggattttttcaagcctaatacatccgacttagagcgcataaaatcactgaagaaacataggcatgggcggcgggtgaaacagcttgaaaaaattgaacagaaaatgaaggaagaaaggcaaaagagaattcgtgagagacagaaggaattctttgctgatattgaagcttacagagagaaactcgaggataacttcaaggttaagagagagcgcttgaaggggttcaatcgatacataaaagaatttcacaaaaggaaagaaagaattcatcgggagaaactggataggatccaacgcgagaaaatcaacctgcttaagaacaatgatgttgaaggttatcttagaatggtcaaggatgcaaaatctgatcgtgtcaagcaactattgcgtgaaactgagaaatatcttcagaaacttgggaacaaattacagagtgcaaagtccacagatggccgctcatcttttgttactgataagagtgacactgcaaacgacattgaagatgagagctaccagccacagcattatctggaaagtaatgaaaagtactatcaactggcacacagtgtaaaggaaactgtaaatgatcagccatcttatcttcagggcggcaaattgcgagagtaccaaatgaatggcttgcgttggctggtttcattgtacaataataatttgaatggtattttagcagatgagatgggccttggtaaaacagtacaagtaatctctttgatatgctaccttatggaaacaaaaaatgaccgtgggccttttctcgtggttgtaccatcatctgttcttcctggatgggaatctgaactcagcttctgggcacctagtataaataaaattgcttatgctggtcctcctgaagaaaggcgcaggatgttcaaagagatgattgttcatcagaagttcaatgttcttctgacaacatatgagtacttgatgaacaagcatgataggccaaaactaagcaaaatacaatggcactatataataatcgatgaagggcatcgtattaaaaatgcttcttgtaaacttaatgctgatttgaagctttatcggagctctcatcggatattattgacaggaacacctcttcagaataatctcgaggagctgtgggcacttctaaattttttgttgcccaatatttttaattcgtcagaggacttctctcagtggtttaacaaaccatttgaaagtaatggtgataattcacctgatgaggccttactttcagaggaggagaacttgttgatcataaatcgtcttcaccaggttcttcggccctttgtactcagaagacttaagcataaggtcgaaaatgagcttcctgaaaaaattgaaagacttgtaagatgtgaggcatctgcttatcagaaacttctcatgacaagggtggaagaaaatcttggtggaattggagccgttaaggttcgctccgttcacaactctgtcatggaattgaggaacatatgcaaccatccatacttgagccagcttcatgttgaagagattgagggctacctacctaaacattacctaccatctattttgaggctctgcggaaaacttgagatgttggacagattgctgcctaaactcaaagctacgggccatagggttctacttttttctacaatgacaagattgcttgatgtaatggaggattacttggtttggaaaaagtataaatatcttcgattggatgggcacacttctggccatgaaagaggagctcttatcgataaatttaacgatcctaattctcaagcattcatttttcttcttagtatacgagctggaggtgttggggtcaatctccaagctgccgatacagttatcatatttgatactgattggaatcctcaggttgatctgcaagcacaggctagggcccacaggattggtcaaaagaaggaggttcttgttttacgtttagaaacggtccgaactgttgaagagcaagtcagggcttcagcagaacacaaattaggtgttgctaatcagagtataactgctggtttttttgacaataacacaagtgctgaagatcgaagagagtatcttgaatcactcctacgtgagtctaaaaaggaagaagcagctccagtgttagatgatgatgctctgaatgacattctagctcggagcgaagctgagattgacatattcgaatctattgacaagcaaaggagagaagaagaaatggcagcttggcaaaaggtggttcaggatggttcaactagtgggctagaccctggagtattgccttctcgtcttgtaactgatgatgatctgaagcccttctgccatgctatgaaactttatgagccatcaaatgtgaaaacagtaaatgtgaatgtgaggaagaagggtgaacttgggggccttgatacacagcactatggaaggggtaaacgagcccgtgaggttcgctcttatgaagaccaatggactgaagaagaatttgaaaaactttgtcaagctgattctcctgaatcatcccaacctggtggcatgtcgaaggatttggatattcttaataaaggcattaagactgaaattcttgtggagagttcaaaagaaccagaacaaacgaagatggaggcatccccaactgtcggtgactctccaccagccaaacggcggagaggtagacctaaaaggtcagatgtttttgtatctcctactgctggtctgactgatgctgtcaaacaagacacaggaaccacacaggacggtagttctgctacaccagcaagtaccatccactctgatgcaccagctactgcaatcaattcagctgtttcagatgttaatatacattctattccaccagctgataccaagaaacaagagttcagtactgataccaaggtttccagttctgtttctgttttggaaggatctgtgccgaatgaaattggtacaccattacagagtgttcataatgtagcagtttctgcaccaccgcatcaatcagctaggggcaggaaatgccaagcaggagaaacacctcgtaggcgaggccgaaaaccaaaatctctatcttcatctggtgtagatgatgttagtcttaacccaaccttttcaactgttagtggtgtagcagacactagttatgttccttcatattctcaggtctcatcacaaggcactgctgtggcactggcaggaatccagaaggattttgtgacagttaagttggatacattgttaccagatagtggtaagggtgctcctcctgttaatgagggagataaaggtgctactgttacaacacctgtggcaaaagatatatgtgctgggactgtgacaacatcagacaacactgtcaccctgacaccaaatactcttaaggaaaacattggattagttcaagtggcatctgcaccttctatgctcgtggcttctgaagaactaatgaaaatagcacatgttgcggtggccgataagcctgttgagaagcaaactgcttcacgtcgccgcagaaagaaaacatctagtagcgaggatactggagtcagcactagacaaagatcagctatgaaaagatcttactacaacacctctgttgccgttgatgatattggttctgctgtgatcccaaatgaaaaatcaggaataacgaaggaaagagatgtcagttcaattcaaagtacatccaatgaactaccaaatattaactcaccattgtatgagaagtctggatatgattctcaaccaagcacacctatagctgtccccatcaatgaagacactcttcctagtggttttgacacctgtactaattctatgataactcttgccacatctgccaactctgctgaagatgataaaccagttgatttgcaccttaatgcacctgtttctgttgattcccaaaaccaagaacaacacatgacagggaaggaccatttggcagtgtgttctagaatctttgctactcagttacagacggacactgcaaatcctgctattgatcataaaccaggaactgcccagtttgaaccatctgcttccttgccccagaattcaggcaaggatgctactgcactaccttctgaggttgacagtgctgctccaaatagggcatcaagcaggaggaggaaagggtcaactcgagaaccacgcaccagaagtaattctgcatcagctgcaagtgaacgtcgtgcccgacttactggattgaagcaggcagaggacataaagaagttagagatgtcagcaacgccgaccacaacagtgtgtatttcatcggtagagcaacagggagctgcttctttaagtgcgaagattaccaatgcttctgtttctgaaggacagaagaatcctggaaattatatgccttctgccatttcaattcccgtggggagccatgttctgggcctgggcgcaacaagtattgaagaaacaactgccactatgataactcaggctcctgcagtttcaaaatcagaacgaagaaaacttccaggaggcagtcaacaaggtattcagtttgagagttcagcatcaaaaacaaagatggtatcagctgtggaaccagcacctgcaaatgttgaatgcatgcaaggtactgaagttaatagttcagaacagacaatagtttctgctactgaaccagcacctgcaaatgatgaacacatgcaaggaactgaaatattgcgggatacagttgagcatgctgcttgccagccagaagcagtatgcacagatggaactgcaaggcagtctgaattgtcgcaacttgatagaaaagcctttcatgatgcctcatataaatacactcatgggtccactaaagatgatggtatcttgcccagtgaaggtacttctgttgatgttactggttctaagcaggatgatgtgaacattgttggcacacaaactgatgatgtttctcggggttctagtcattttccagttattttacaatcaactgagtcagatcggcctccaggtcaagtgaagaatttggagagtaggatggagcaggtgaaaacagaagaagctttggttaacagttctggtggcaatcaaactcacagtctgggcgatgaaccttctcataatacatcattagcaagaaattctccctcagaacactcgaatgagcgttgctctgatcaagtaattggtgaaaatttcaaaagtaaagaaaatattgttgaagtccattctggcattaatactgatggccccgatgaagctctgaatgcattgcacacccaatctaaggaggccagcatgacagatattggtgtacctactgatggtgatagatgtgaaggtaaagggactagtgtcgaggtctgtgctgacatgaatactgatgggcctgtggctacccaggatgcttcgtccacgaaatctgataaagagtcctgcatgatggaatgtggtgtgtctaccgatggctgtcccacagtttgcaaaacacacaatgatctccagggtcatgtatcttgtgaagaaacctttgttaggactggtggtgatgacacaacccatatcaccaatgcaaattatggttctaataatgaaagtgaggccaccattgctagtcctgttgaaaccacacaaaaactgatggaagggagcactgttattgtgtcggagaattctgatttaaataagcaatgccacacattgcatactagaaatgatcctcctgcaaataccctgttgatagttgagtctaacaaagttacttgtgatgctgaaattgtttgtgctagcaggttagaatcttctggcattgaggctgaaacagtgggtatccaagagtcagctcttactgattttgagggaacaaaaggaactggggatttgggtgacagaactaacagtcaactgcatgatgatgttcatgggacatcatgttccacgatagctcttgtatctgagaaagaaccttccgaagatcttaccaccggtagccattcagaagcatctaatttacttgctgctgtagaacaaactcaagaaactactgttgagaaccaagagatcatagatgcagtagtgtttatggatgcctgcaaggcagaacctgttggtgattttactattgctaaaggagctgaacagactgtagaaatggttcattatgttgataagcaatctgctgtattagactatgttgagacacagacaaaacgaacttcggtttgtggttctacgctaaatgaatcccctcaggctgcagggttggaagaagactgctctgtactgaagcatggtgatcctacttcatctgagcttcttactgtagcacctaatccaatcggtgaaacttctgttattcaagtggaaccagaggcaagaaactcagatggatactgcacaacagaggctggcagtgctttatctgaaactgtcatgggattggagccaaataaagaaactgcggttccaatgcaagagaatattggagaagctaatgataattttaataattgcgaagcacacaataattcggagattcatgcatttgaagtgtcgatggaaacgcagtcatcagaagtcaaggaagtatcttctattcagtctggtgcagcaaatttgagcacacagacaactgcactgcctgatgtaacaggacaaaccagtatggcatcgactggagaactagtatctacaaatgaacacatacacatgcaaggcactgaaatcaattcagagcaacaaacaaagatggtttcacctgctgaatcagcacctgctaatgatgaacacgtgcaagagattgacgcattatgcgtccaggagactgcaattattgatcttgggggagcaagaggaacagttgacctgaatgacataagaacacaggttcctgcattacctggaagggatgtgctagatgtggaggcacatattttggagcaaaaaaaaacatcttcaccaggtgatgaaattaagggttcagaacaagcaaaaatcgaatcgattgcagagatcgaaacagtgggcgtcaaggagaatgtcattgctgatcataaggaaacaggtaacaacagtggcgtaagtatacatgcgcctctattagttgaatctggacaaaaggcatcacctggagttgaattgcgtggtattgaggttgatgctcatgttttggaacaagcaaagatggtttcagctctagaaccagactctactccagaagtttgtgctgacaagttagaaccttctggtgctgatgatgttggaatgattgttgtccaggaggctgcttctgttgatgatcacaatagagcacaaggtggtgaggctcattgttcagaacaaataaagatggcttcaattgcacaagcggtgtctagcatggctttagtaggatattcttcttcagaagactcaatggtggatgctgctgcccgagtaactgatgctgattttgtggatagtaaagcagctggtgtttatcgccaagaaactatgcctactcaaaccacctctaccctcccagagaacatggattctcctgcaactgctgctaccatggttgaatcgaagtttgctgcctcgtctgagcacgttgcaggacccgagccaattgatgaaacttctgttatgcaagtggaactggcaacaagcacaggggatggatgtgcagcagatggtcacaatcttgtttcatctgaaactgttgttgaagtgaagcttgctcaagaaattgttgttcctagtccaggtggtagcatagaagctaataatacttctaccatcagcgaagtatacaaagatacccagtctcgtgcatctggtgaagcatgcaatgatggtcagtctcatggtgatgaaaatatgaaacttggtgaagcttacactgaactgcagctggcaccttcctctggtgaggaggccatgacatgtatgtgtagtgagctgcccagccaggaggtggaggctccaagcagtgaccctttggagaataatgaagaaacgaaaaatgaagctgctgctcaaggatcagtaaatgaggattctgctcctcgtgctgaaaatgcaaagattgatgaagctgacacagaacaggaactgcttccatctggtgaggccacggtagacgaatccagcgagctactcagccaagacgaaaaggtggctcgtaaagatgcaaagatggaagagtctgctgctgctgctgctgcacagagacagctaactactgaagttgctcatgcaagtgaaaacgcgaaacttggtgaagatggcacggagctgcaactgccaccaccttcaatggtagacatatctagggagcaactcagccaggaagtggaggttgcaagctctgggccttcaggaactgatgaaactgctgagatgaaacggctaaacactgaacattcacctggtgatgaaacttcaaaacttgttggaactgatctaggactgcaattgtcaccttctggtgatgccatggtagatatatctaataagccacccagctgccaagacgtaaaggaggccccgagcagtgacattttgggaaatgatgaaaattcagacaccgagaagactcctgctgccttgcatggacggctgaacaccgaacttgctcctagtggcagaaatacagaatttagtgaagctgacactggaaaacaagagacacccgtgtctgctgaggctatggtagaatcatcgagcgagcctcgcagccatgaggcaaaggaagctccaacccctgacctgtctggggatgatgaaaaagcgaagtcagcaagggctgctgttgttgcggaactttttggagatgcaacagaaggtggttcggatcagccattgccgtctcctagagaacaaggcaaggaagcagaggccgatggaggcttttagagtaaagttgcaaatattgtatcaagagatactagaatccgtgtaagtaagaactgctaatagtgcttttagttgtaactggtgtaagcttctactcagaatcaaaagcgacgtgctgagattacagcaacagtggcctacggcagtttactactgttttgtgcaatattgctgctgagttttgttgagacaggcaattgatctgtcatctgtctcgtcttgcatcgaagttggcagcaccatggtgaggtgctcccgccttaacctggaagcgctgacagagggaagaacaatactctctggtttcctaatgttttcctgttcactgttttgatttgatgctgcattgcagtagtgtgacttagtaacataatggtgcgtttggatagacggacataccgatccagaatcatctgaacctaaatattgagtacaagcttagattatctgtttggtctgctttatgtctgggtgcaatgctctctgatttctggacggagtggtaccgcaatccaaacagactttaatgtttgggtgcttcaggtcataatcaaccatctaatttactttgcaaatgaatgtttcaaactggactgctcaagcctaccaagtttaatggtccttcctagtattgaatccttttgagtctagcccgtttcctcatttgaattttcactgttagtgtgcctatacttgcctcacgtagaattttgaaagcttatggttgggtgcgttgtactcgac

SEQ ID NO: 9741 - DNA, 12419 bp, Zea Mays
ccgggagagagtgcatcagcactgcaggggtctactgaggcactccaagtggggaaatggcggaggcgacgaattcgagcttgggcacgtaggcgtcgctcctgccatcgccgcagcggtcactggactctcacgccgccgccgccgccgccggagaccattagttctcctgcgcggcggctccgcggctcccgccctctcccttaccttcttcccgctagggttttctccgatccccaatcactgctggttcacaaatggcttcatctcagcatgttgagatggaggctgcgaaacttctacataaacttatccaggagtcgaaggatgagcctgctaaactagcaacaaaactttacgtgatatgtcagcatatgaaactaagtggaaaggagcaatcactgccatatcaagtcatatcaagggctatggagacagttgtgaaccaacatggaattgatatggatgcattgcgatcatcacgaattccatttgctggtggtcctcaggcaggggattctagtggtgtcatgtcaaaggacaaggaggtcattggtaaccagtctcccatggtcggaagtgatgcttcccaaagtagtggacaagctggattatggcagcttccatcaggttcaaccgatatgataagacatggggcatctatttcaggtagggtacccacagggccaaataggggagatttctcagcagctgatattcatcaaggctccatgtcacaaaaaagcggtagatcctctggcattgaaagccctgcaagtctgcagatggaggacaccagatctatgaattcacatgattctttgaaatccgatgagaaaacaagtaagaaaacctcttccaagagaaaaaggatggattcaaaaggagctggtgatttgcgttcagaagacaactcaaagtcagatgttatctccactggacagaataccaggaaggggaaacaggttggtaaggctggtagacaaggtcagccttccatgggaattgagcatgagcagcaacctcataaactgcaaggtggtactggtcaggtaccacctatacatggtggtgcaccttttctcaggactcgctcagaaggtccttctgggaggacaatggacaagactaaaccatcaaatccattctcaatgggtcaaattccaaattttcctgaagggctggcttctactggtgctccaatcgagttgcagaaaagtatacagggtggagcaagtttatttaatcctggttttggctggaaccaaaatccacaagttcaaaccttgaagaattctcaaggttctattcataatttagtgaggtctggagttactgttgaagggaaagttaatgtaggggcacaaggagcttttaactctgcctctgcaccacagatggaatttcccacagttcctccatacaacccctcttccttcggagctagctcacagtttctggacaaaggcaaggagttggtttccagcattataagcactgaacctcattcatctaaagttgcatctcagcctgggatttctcatggaagtcccatgcaagaaaggcaaggtatgatcagggtgccacagagaggcgaggcatcatttcaggaacgcaggccatcttcacttccgagtagaagtactgggccaagtccaatgtctcacatttcttccaacacaccatttaaagaacagcagctgaagcagctcagagcacagtgcttagtatttcttgcatttaggaataatttgcagcccaggaaggtacatcttgaaattgctttgggcagagggcctcctgcagaaagtgacagtgcaggtcaaaggggcagcgagggcagagtgtctgatgctctgggaaaggaaaatggtagcagtcgggagaactctggtgtcttttgtaggcaaactgatatctctagacttccagccacatctgcaggaagtattgcagaggatgattccttatcgaaggatccagaaaatgctacaaaaaaaatcaagttagctgaacaggagaagtcattgatggaagtagaaaatgtccagcaagcttctgttatgcaaggaactagttctgaaatgcgttcccaagaaactgcatctcaaaatccatatcgaccacaacagtcatattatcaaggagatacaagaagaatcgcctcggatatccataggactgatgctgaaattttgaaccagaatttaagttggggaggccagggatctactgctttgggtggtactagacagcttctgaatcaggaaactaaagaatcacttgcaccttcaaagtcacaccatatgcctgttgatggttacaactccaatatacaaggaatagatcggactccagagatagctggagctggtaatgatgttgaaaattgtagccacgtagcagatattgtgcctgagcaggctgctgatgaaggagatgaggacctctcagagcatgaggatttattgtcatctccaaagcacacaatgacggaaaaatggatcttagattaccagaagagaatttacaatgagaaacaaaagagaacattggagcagcataaggtacacagcagaatgtcagcaacatatgaggagctaaaggagagcgttaattcatccgaagatctttctgcaaagaccaagagcgtcattgaattgaaaaagcttcagcttctgccacttcaacgtcgtgtacgcagtgaatttttgctggattttttcaagcctaatacatccgacttagagcgcataaaatcactgaagaaacataggcatgggcggcgggtgaaacagcttgaaaaaattgaacagaaaatgaaggaagaaaggcaaaagagaattcgtgagagacagaaggaattctttgctgatattgaagcttacagagagaaactcgaggataacttcaaggttaagagagagcgcttgaaggggttcaatcgatacataaaagaatttcacaaaaggaaagaaagaattcatcgggagaaactggataggatccaacgcgagaaaatcaacctgcttaagaacaatgatgttgaaggttatcttagaatggtcaaggatgcaaaatctgatcgtgtcaagcaactattgcgtgaaactgagaaatatcttcagaaacttgggaacaaattacagagtgcaaagtccacagatggccgctcatcttttgttactgataagagtgacactgcaaacgacattgaagatgagagctaccagccacagcattatctggaaagtaatgaaaagtactatcaactggcacacagtgtaaaggaaactgtaaatgatcagccatcttatcttcagggcggcaaattgcgagagtaccaaatgaatggcttgcgttggctggtttcattgtacaataataatttgaatggtattttagcagatgagatgggccttggtaaaacagtacaagtaatctctttgatatgctaccttatggaaacaaaaaatgaccgtgggccttttctcgtggttgtaccatcatctgttcttcctggatgggaatctgaactcagcttctgggcacctagtataaataaaattgcttatgctggtcctcctgaagaaaggcgcaggatgttcaaagagatgattgttcatcagaagttcaatgttcttctgacaacatatgagtacttgatgaacaagcatgataggccaaaactaagcaaaatacaatggcactatataataatcgatgaagggcatcgtattaaaaatgcttcttgtaaacttaatgctgatttgaagctttatcggagctctcatcggatattattgacaggaacacctcttcagaataatctcgaggagctgtgggcacttctaaattttttgttgcccaatatttttaattcgtcagaggacttctctcagtggtttaacaaaccatttgaaagtaatggtgataattcacctgatgaggccttactttcagaggaggagaacttgttgatcataaatcgtcttcaccaggttcttcggccctttgtactcagaagacttaagcataaggtcgaaaatgagcttcctgaaaaaattgaaagacttgtaagatgtgaggcatctgcttatcagaaacttctcatgacaagggtggaagaaaatcttggtggaattggagccgttaaggttcgctccgttcacaactctgtcatggaattgaggaacatatgcaaccatccatacttgagccagcttcatgttgaagagattgagggctacctacctaaacattacctaccatctattttgaggctctgcggaaaacttgagatgttggacagattgctgcctaaactcaaagctacgggccatagggttctacttttttctacaatgacaagattgcttgatgtaatggaggattacttggtttggaaaaagtataaatatcttcgattggatgggcacacttctggccatgaaagaggagctcttatcgataaatttaacgatcctaattctcaagcattcatttttcttcttagtatacgagctggaggtgttggggtcaatctccaagctgccgatacagttatcatatttgatactgattggaatcctcaggttgatctgcaagcacaggctagggcccacaggattggtcaaaagaaggaggttcttgttttacgtttagaaacggtccgaactgttgaagagcaagtcagggcttcagcagaacacaaattaggtgttgctaatcagagtataactgctggtttttttgacaataacacaagtgctgaagatcgaagagagtatcttgaatcactcctacgtgagtctaaaaaggaagaagcagctccagtgttagatgatgatgctctgaatgacattctagctcggagcgaagctgagattgacatattcgaatctattgacaagcaaaggagagaagaagaaatggcagcttggcaaaaggtggttcaggatggttcaactagtgggctagaccctggagtattgccttctcgtcttgtaactgatgatgatctgaagcccttctgccatgctatgaaactttatgagccatcaaatgtgaaaacagtaaatgtgaatgtgaggaagaagggtgaacttgggggccttgatacacagcactatggaaggggtaaacgagcccgtgaggttcgctcttatgaagaccaatggactgaagaagaatttgaaaaactttgtcaagctgattctcctgaatcatcccaacctggtggcatgtcgaaggatttggatattcttaataaaggcattaagactgaaattcttgtggagagttcaaaagaaccagaacaaacgaagatggaggcatccccaactgtcggtgactctccaccagccaaacggcggagaggtagacctaaaaggtcagatgtttttgtatctcctactgctggtctgactgatgctgtcaaacaagacacaggaaccacacaggacggtagttctgctacaccagcaagtaccatccactctgatgcaccagctactgcaatcaattcagctgtttcagatgttaatatacattctattccaccagctgataccaagaaacaagagttcagtactgataccaaggtttccagttctgtttctgttttggaaggatctgtgccgaatgaaattggtacaccattacagagtgttcataatgtagcagtttctgcaccaccgcatcaatcagctaggggcaggaaatgccaagcaggagaaacacctcgtaggcgaggccgaaaaccaaaatctctatcttcatctggtgtagatgatgttagtcttaacccaaccttttcaactgttagtggtgtagcagacactagttatgttccttcatattctcaggtctcatcacaaggcactgctgtggcactggcaggaatccagaaggattttgtgacagttaagttggatacattgttaccagatagtggtaagggtgctcctcctgttaatgagggagataaaggtgctactgttacaacacctgtggcaaaagatatatgtgctgggactgtgacaacatcagacaacactgtcaccctgacaccaaatactcttaaggaaaacattggattagttcaagtggcatctgcaccttctatgctcgtggcttctgaagaactaatgaaaatagcacatgttgcggtggccgataagcctgttgagaagcaaactgcttcacgtcgccgcagaaagaaaacatctagtagcgaggatactggagtcagcactagacaaagatcagctatgaaaagatcttactacaacacctctgttgccgttgatgatattggttctgctgtgatcccaaatgaaaaatcaggaataacgaaggaaagagatgtcagttcaattcaaagtacatccaatgaactaccaaatattaactcaccattgtatgagaagtctggatatgattctcaaccaagcacacctatagctgtccccatcaatgaagacactcttcctagtggttttgacacctgtactaattctatgataactcttgccacatctgccaactctgctgaagatgataaaccagttgatttgcaccttaatgcacctgtttctgttgattcccaaaaccaagaacaacacatgacagggaaggaccatttggcagtgtgttctagaatctttgctactcagttacagacggacactgcaaatcctgctattgatcataaaccaggaactgcccagtttgaaccatctgcttccttgccccagaattcaggcaaggatgctactgcactaccttctgaggttgacagtgctgctccaaatagggcatcaagcaggaggaggaaagggtcaactcgagaaccacgcaccagaagtaattctgcatcagctgcaagtgaacgtcgtgcccgacttactggattgaagcaggcagaggacataaagaagttagagatgtcagcaacgccgaccacaacagtgtgtatttcatcggtagagcaacagggagctgcttctttaagtgcgaagattaccaatgcttctgtttctgaaggacagaagaatcctggaaattatatgccttctgccatttcaattcccgtggggagccatgttctgggcctgggcgcaacaagtattgaagaaacaactgccactatgataactcaggctcctgcagtttcaaaatcagaacgaagaaaacttccaggaggcagtcaacaaggtattcagtttgagagttcagcatcaaaaacaaagatggtatcagctgtggaaccagcacctgcaaatgttgaatgcatgcaaggtactgaagttaatagttcagaacagacaatagtttctgctactgaaccagcacctgcaaatgatgaacacatgcaagagcaaccaacaaatatcgtttcatctgtggaatcagaaccttcaaatgatgaagagcacacaaagcatgaagtgtttcttgcgactactggtgataatatgcttgcttctagtgcaggaactgaaatattgcgggatacagttgagcatgctgcttgccagccagaagcagtatgcacagatggaactgcaaggcagtctgaattgtcgcaacttgatagaaaagcctttcatgatgcctcatataaatacactcatgggtccactaaagatgatggtatcttgcccagtgaaggtacttctgttgatgttactggttctaagcaggatgatgtgaacattgttggcacacaaactgatgatgtttctcggggttctagtcattttccagttattttacaatcaactgagtcagatcggcctccaggtcaagtgaagaatttggagagtaggatggagcaggtgaaaacagaagaagctttggttaacagttctggtggcaatcaaactcacagtctgggcgatgaaccttctcataatacatcattagcaagaaattctccctcagaacactcgaatgagcgttgctctgatcaagtaattggtgaaaatttcaaaagtaaagaaaatattgttgaagtccattctggcattaatactgatggccccgatgaagctctgaatgcattgcacacccaatctaaggaggccagcatgacagatattggtgtacctactgatggtgatagatgtgaaggtaaagggactagtgtcgaggtctgtgctgacatgaatactgatgggcctgtggctacccaggatgcttcgtccacgaaatctgataaagagtcctgcatgatggaatgtggtgtgtctaccgatggctgtcccacagtttgcaaaacacacaatgatctccagggtcatgtatcttgtgaagaaacctttgttaggactggtggtgatgacacaacccatatcaccaatgcaaattatggttctaataatgaaagtgaggccaccattgctagtcctgttgaaaccacacaaaaactgatggaagggagcactgttattgtgtcggagaattctgatttaaataagcaatgccacacattgcatactagaaatgatcctcctgcaaataccctgttgatagttgagtctaacaaagttacttgtgatgctgaaattgtttgtgctagcaggttagaatcttctggcattgaggctgaaacagtgggtatccaagagtcagctcttactgattttgagggaacaaaaggaactggggatttgggtgacagaactaacagtcaactgcatgatgatgttcatgggacatcatgttccacgatagctcttgtatctgagaaagaaccttccgaagatcttaccaccggtagccattcagaagcatctaatttacttgctgctgtagaacaaactcaagaaactactgttgagaaccaagagatcatagatgcagtagtgtttatggatgcctgcaaggcagaacctgttggtgattttactattgctaaaggagctgaacagactgtagaaatggttcattatgttgataagcaatctgctgtattagactatgttgagacacagacaaaacgaacttcggtttgtggttctacgctaaatgaatcccctcaggctgcagggttggaagaagactgctctgtactgaagcatggtgatcctacttcatctgagcttcttactgtagcacctaatccaatcggtgaaacttctgttattcaagtggaaccagaggcaagaaactcagatggatactgcacaacagaggctggcagtgctttatctgaaactgtcatgggattggagccaaataaagaaactgcggttccaatgcaagagaatattggagaagctaatgataattttaataattgcgaagcacacaataattcggagattcatgcatttgaagtgtcgatggaaacgcagtcatcagaagtcaaggaagtatcttctattcagtctggtgcagcaaatttgagcacacagacaactgcactgcctgatgtaacaggacaaaccagtatggcatcgactggagaactagtatctacaaatgaacacatacacatgcaaggcactgaaatcaattcagagcaacaaacaaagatggtttcacctgctgaatcagcacctgctaatgatgaacacgtgcaagacattgtgattcttagttcagaacagcaaacaaagatggttttagctgcagagattgacgcattatgcgtccaggagactgcaattattgatcttgggggagcaagaggaacagttgacctgaatgacataagaacacaggttcctgcattacctggaagggatgtgctagatgtggaggcacatattttggagcaaaaaaaaacatcttcaccaggtgatgaaattaagggttcagaacaagcaaaaatcgaatcgattgcagagatcgaaacagtgggcgtcaaggagaatgtcattgctgatcataaggaaacaggtaacaacagtggcgtaagtatacatgcgcctctattagttgaatctggacaaaaggcatcacctggagttgaattgcgtggtattgaggttgatgctcatgttttggaacaagcaaagatggtttcagctctagaaccagactctactccagaagtttgtgctgacaagttagaaccttctggtggtgaggctcattgttcagaacaaataaagatggcttcaattgcacaagcggtgtctagcatggctttagtaggatattcttcttcagaagactcaatggtggatgctgctgcccgagtaactgatgctgattttgtggatagtaaagcagctggtgtttatcgccaagaaactatgcctactcaaaccacctctaccctcccagagaacatggattctcctgcaactgctgctaccatggttgaatcgaagtttgctgcctcgtctgagcacgttgcaggacccgagccaattgatgaaacttctgttatgcaagtggaactggcaacaagcacaggggatggatgtgcagcagatggtcacaatcttgtttcatctgaaactgttgttgaagtgaagcttgctcaagaaattgttgttcctagtccaggtggtagcatagaagctaataatacttctaccatcagcgaagtatacaaagatacccagtctcgtgcatctggtgaagcatgcaatgatggtcagtctcatggtgatgaaaatatgaaacttggtgaagcttacactgaactgcagctggcaccttcctctggtgaggaggccatgacatgtatgtgtagtgagctgcccagccaggaggtggaggctccaagcagtgaccctttggagaataatgaagaaacgaaaaatgaagctgctgctcaaggatcagtaaatgaggattctgctcctcgtgctgaaaatgcaaagattgatgaagctgacacagaacaggaactgcttccatctggtgaggccacggtagacgaatccagcgagctactcagccaagacgaaaaggtggctcgtaaagatgcaaagatggaagagtctgctgctgctgctgctgcacagagacagctaactactgaagttgctcatgcaagtgaaaacgcgaaacttggtgaagatggcacggagctgcaactgccaccaccttcaatggtagacatatctagggagcaactcagccaggaagtggaggttgcaagctctgggccttcaggaactgatgaaactgctgagatgaaacggctaaacactgaacattcacctggtgatgaaacttcaaaacttgttggaactgatctaggactgcaattgtcaccttctggtgatgccatggtagatatatctaataagccacccagctgccaagacgtaaaggaggccccgagcagtgacattttgggaaatgatgaaaattcagacaccgagaagactcctgctgccttgcatggacggctgaacaccgaacttgctcctagtggcagaaatacagaatttagtgaagctgacactggaaaacaagagacacccgtgtctgctgaggctatggtagaatcatcgagcgagcctcgcagccatgaggcaaaggaagctccaacccctgacctgtctggggatgatgaaaaagcgaagtcagcaagggctgctgttgttgcggaactttttggagatgcaacagaaggtggttcggatcagccattgccgtctcctagagaacaaggcaaggaagcagaggccgatggaggcttttagagtaaagttgcaaatattgtatcaagagatactagaatccgtgtaagtaagaactgctaatagtgcttttagttgtaactggtgtaagcttctactcagaatcaaaagcgacgtgctgagattacagcaacagtggcctacggcagtttactactgttttgtgcaatattgctgctgagttttgttgagacaggcaattgatctgtcatctgtctcgtcttgcatcgaagttggcagcaccatggtgaggtgctcccgccttaacctggaagcgctgacagagggaagaacaatactctctggtttcctaatgttttcctgttcactgttttgatttgatgctgcattgcagtagtgtgacttagtaacataatggtgcgtttggatagacggacataccgatccagaatcatctgaacctaaatattgagtacaagcttagattatctgtttggtctgctttatgtctgggtgcaatgctctctgatttctggacggagtggtaccgcaatccaaacagactttaatgtttgggtgcttcaggtcataatcaaccatctaatttactttgcaaatgaatgtttcaaactggactgctcaagcctaccaagtttaatggtccttcctagtattgaatccttttgagtctagcccgtttcctcatttgaattttcactgttagtgtgcctatacttgcctcacgtagaattttgaaagcttatggttgggtgcgttgtactcgac

SEQ ID NO: 9742 - DNA, 12571 bp, Zea Mays
ctaaaaccggcccaataacagtttttttcgcaacgccccggtatcagttttaagcccatacacaagccgaataccacacggaaccgggagagagtgcatcagcactgcaggggtctactgaggcactccaagtggggaaatggcggaggcgacgaattcgagcttgggcacgtaggcgtcgctcctgccatcgccgcagcggtcactggactctcacgccgccgccgccgccgccggagaccattagttctcctgcgcggcggctccgcggctcccgccctctcccttaccttcttcccgctagggttttctccgatccccaatcactgctggttcacaaatggcttcatctcagcatgttgagatggaggctgcgaaacttctacataaacttatccaggagtcgaaggatgagcctgctaaactagcaacaaaactttacgtgatatgtcagcatatgaaactaagtggaaaggagcaatcactgccatatcaagtcatatcaagggctatggagacagttgtgaaccaacatggaattgatatggatgcattgcgatcatcacgaattccatttgctggtggtcctcaggcaggggattctagtggtgtcatgtcaaaggacaaggaggtcattggtaaccagtctcccatggtcggaagtgatgcttcccaaagtagtggacaagctggattatggcagcttccatcaggttcaaccgatatgataagacatggggcatctatttcaggtagggtacccacagggccaaataggggagatttctcagcagctgatattcatcaaggctccatgtcacaaaaaagcggtagatcctctggcattgaaagccctgcaagtctgcagatggaggacaccagatctatgaattcacatgattctttgaaatccgatgagaaaacaagtaagaaaacctcttccaagagaaaaaggatggattcaaaaggagctggtgatttgcgttcagaagacaactcaaagtcagatgttatctccactggacagaataccaggaaggggaaacaggttggtaaggctggtagacaaggtcagccttccatgggaattgagcatgagcagcaacctcataaactgcaaggtggtactggtcaggtaccacctatacatggtggtgcaccttttctcaggactcgctcagaaggtccttctgggaggacaatggacaagactaaaccatcaaatccattctcaatgggtcaaattccaaattttcctgaagggctggcttctactggtgctccaatcgagttgcagaaaagtatacagggtggagcaagtttatttaatcctggttttggctggaaccaaaatccacaagttcaaaccttgaagaattctcaaggttctattcataatttagtgaggtctggagttactgttgaagggaaagttaatgtaggggcacaaggagcttttaactctgcctctgcaccacagatggaatttcccacagttcctccatacaacccctcttccttcggagctagctcacagtttctggacaaaggcaaggagttggtttccagcattataagcactgaacctcattcatctaaagttgcatctcagcctgggatttctcatggaagtcccatgcaagaaaggcaaggtatgatcagggtgccacagagaggcgaggcatcatttcaggaacgcaggccatcttcacttccgagtagaagtactgggccaagtccaatgtctcacatttcttccaacacaccatttaaagaacagcagctgaagcagctcagagcacagtgcttagtatttcttgcatttaggaataatttgcagcccaggaaggtacatcttgaaattgctttgggcagagggcctcctgcagaaagtgacagtgcaggtcaaaggggcagcgagggcagagtgtctgatgctctgggaaaggaaaatggtagcagtcgggagaactctggtgtcttttgtaggcaaactgatatctctagacttccagccacatctgcaggaagtattgcagaggatgattccttatcgaaggatccagaaaatgctacaaaaaaaatcaagttagctgaacaggagaagtcattgatggaagtagaaaatgtccagcaagcttctgttatgcaaggaactagttctgaaatgcgttcccaagaaactgcatctcaaaatccatatcgaccacaacagtcatattatcaaggagatacaagaagaatcgcctcggatatccataggactgatgctgaaattttgaaccagaatttaagttggggaggccagggatctactgctttgggtggtactagacagcttctgaatcaggaaactaaagaatcacttgcaccttcaaagtcacaccatatgcctgttgatggttacaactccaatatacaaggaatagatcggactccagagatagctggagctggtaatgatgttgaaaattgtagccacgtagcagatattgtgcctgagcaggctgctgatgaaggagatgaggacctctcagagcatgaggatttattgtcatctccaaagcacacaatgacggaaaaatggatcttagattaccagaagagaatttacaatgagaaacaaaagagaacattggagcagcataaggtacacagcagaatgtcagcaacatatgaggagctaaaggagagcgttaattcatccgaagatctttctgcaaagaccaagagcgtcattgaattgaaaaagcttcagcttctgccacttcaacgtcgtgtacgcagtgaatttttgctggattttttcaagcctaatacatccgacttagagcgcataaaatcactgaagaaacataggcatgggcggcgggtgaaacagcttgaaaaaattgaacagaaaatgaaggaagaaaggcaaaagagaattcgtgagagacagaaggaattctttgctgatattgaagcttacagagagaaactcgaggataacttcaaggttaagagagagcgcttgaaggggttcaatcgatacataaaagaatttcacaaaaggaaagaaagaattcatcgggagaaactggataggatccaacgcgagaaaatcaacctgcttaagaacaatgatgttgaaggttatcttagaatggtcaaggatgcaaaatctgatcgtgtcaagcaactattgcgtgaaactgagaaatatcttcagaaacttgggaacaaattacagagtgcaaagtccacagatggccgctcatcttttgttactgataagagtgacactgcaaacgacattgaagatgagagctaccagccacagcattatctggaaagtaatgaaaagtactatcaactggcacacagtgtaaaggaaactgtaaatgatcagccatcttatcttcagggcggcaaattgcgagagtaccaaatgaatggcttgcgttggctggtttcattgtacaataataatttgaatggtattttagcagatgagatgggccttggtaaaacagtacaagtaatctctttgatatgctaccttatggaaacaaaaaatgaccgtgggccttttctcgtggttgtaccatcatctgttcttcctggatgggaatctgaactcagcttctgggcacctagtataaataaaattgcttatgctggtcctcctgaagaaaggcgcaggatgttcaaagagatgattgttcatcagaagttcaatgttcttctgacaacatatgagtacttgatgaacaagcatgataggccaaaactaagcaaaatacaatggcactatataataatcgatgaagggcatcgtattaaaaatgcttcttgtaaacttaatgctgatttgaagctttatcggagctctcatcggatattattgacaggaacacctcttcagaataatctcgaggagctgtgggcacttctaaattttttgttgcccaatatttttaattcgtcagaggacttctctcagtggtttaacaaaccatttgaaagtaatggtgataattcacctgatgaggccttactttcagaggaggagaacttgttgatcataaatcgtcttcaccaggttcttcggccctttgtactcagaagacttaagcataaggtcgaaaatgagcttcctgaaaaaattgaaagacttgtaagatgtgaggcatctgcttatcagaaacttctcatgacaagggtggaagaaaatcttggtggaattggagccgttaaggttcgctccgttcacaactctgtcatggaattgaggaacatatgcaaccatccatacttgagccagcttcatgttgaagagattgagggctacctacctaaacattacctaccatctattttgaggctctgcggaaaacttgagatgttggacagattgctgcctaaactcaaagctacgggccatagggttctacttttttctacaatgacaagattgcttgatgtaatggaggattacttggtttggaaaaagtataaatatcttcgattggatgggcacacttctggccatgaaagaggagctcttatcgataaatttaacgatcctaattctcaagcattcatttttcttcttagtatacgagctggaggtgttggggtcaatctccaagctgccgatacagttatcatatttgatactgattggaatcctcaggttgatctgcaagcacaggctagggcccacaggattggtcaaaagaaggaggttcttgttttacgtttagaaacggtccgaactgttgaagagcaagtcagggcttcagcagaacacaaattaggtgttgctaatcagagtataactgctggtttttttgacaataacacaagtgctgaagatcgaagagagtatcttgaatcactcctacgtgagtctaaaaaggaagaagcagctccagtgttagatgatgatgctctgaatgacattctagctcggagcgaagctgagattgacatattcgaatctattgacaagcaaaggagagaagaagaaatggcagcttggcaaaaggtggttcaggatggttcaactagtgggctagaccctggagtattgccttctcgtcttgtaactgatgatgatctgaagcccttctgccatgctatgaaactttatgagccatcaaatgtgaaaacagtaaatgtgaatgtgaggaagaagggtgaacttgggggccttgatacacagcactatggaaggggtaaacgagcccgtgaggttcgctcttatgaagaccaatggactgaagaagaatttgaaaaactttgtcaagctgattctcctgaatcatcccaacctggtggcatgtcgaaggatttggatattcttaataaaggcattaagactgaaattcttgtggagagttcaaaagaaccagaacaaacgaagatggaggcatccccaactgtcggtgactctccaccagccaaacggcggagaggtagacctaaaaggtcagatgtttttgtatctcctactgctggtctgactgatgctgtcaaacaagacacaggaaccacacaggacggtagttctgctacaccagcaagtaccatccactctgatgcaccagctactgcaatcaattcagctgtttcagatgttaatatacattctattccaccagctgataccaagaaacaagagttcagtactgataccaaggtttccagttctgtttctgttttggaaggatctgtgccgaatgaaattggtacaccattacagagtgttcataatgtagcagtttctgcaccaccgcatcaatcagctaggggcaggaaatgccaagcaggagaaacacctcgtaggcgaggccgaaaaccaaaatctctatcttcatctggtgtagatgatgttagtcttaacccaaccttttcaactgttagtggtgtagcagacactagttatgttccttcatattctcaggtctcatcacaaggcactgctgtggcactggcaggaatccagaaggattttgtgacagttaagttggatacattgttaccagatagtggtaagggtgctcctcctgttaatgagggagataaaggtgctactgttacaacacctgtggcaaaagatatatgtgctgggactgtgacaacatcagacaacactgtcaccctgacaccaaatactcttaaggaaaacattggattagttcaagtggcatctgcaccttctatgctcgtggcttctgaagaactaatgaaaatagcacatgttgcggtggccgataagcctgttgagaagcaaactgcttcacgtcgccgcagaaagaaaacatctagtagcgaggatactggagtcagcactagacaaagatcagctatgaaaagatcttactacaacacctctgttgccgttgatgatattggttctgctgtgatcccaaatgaaaaatcaggaataacgaaggaaagagatgtcagttcaattcaaagtacatccaatgaactaccaaatattaactcaccattgtatgagaagtctggatatgattctcaaccaagcacacctatagctgtccccatcaatgaagacactcttcctagtggttttgacacctgtactaattctatgataactcttgccacatctgccaactctgctgaagatgataaaccagttgatttgcaccttaatgcacctgtttctgttgattcccaaaaccaagaacaacacatgacagggaaggaccatttggcagtgtgttctagaatctttgctactcagttacagacggacactgcaaatcctgctattgatcataaaccaggaactgcccagtttgaaccatctgcttccttgccccagaattcaggcaaggatgctactgcactaccttctgaggttgacagtgctgctccaaatagggcatcaagcaggaggaggaaagggtcaactcgagaaccacgcaccagaagtaattctgcatcagctgcaagtgaacgtcgtgcccgacttactggattgaagcaggcagaggacataaagaagttagagatgtcagcaacgccgaccacaacagtgtgtatttcatcggtagagcaacagggagctgcttctttaagtgcgaagattaccaatgcttctgtttctgaaggacagaagaatcctggaaattatatgccttctgccatttcaattcccgtggggagccatgttctgggcctgggcgcaacaagtattgaagaaacaactgccactatgataactcaggctcctgcagtttcaaaatcagaacgaagaaaacttccaggaggcagtcaacaaggtattcagtttgagagttcagcatcaaaaacaaagatggtatcagctgtggaaccagcacctgcaaatgttgaatgcatgcaaggtactgaagttaatagttcagaacagacaatagtttctgctactgaaccagcacctgcaaatgatgaacacatgcaagagcaaccaacaaatatcgtttcatctgtggaatcagaaccttcaaatgatgaagagcacacaaagcatgaagtgtttcttgcgactactggtgataatatgcttgcttctagtgcaggaactgaaatattgcgggatacagttgagcatgctgcttgccagccagaagcagtatgcacagatggaactgcaaggcagtctgaattgtcgcaacttgatagaaaagcctttcatgatgcctcatataaatacactcatgggtccactaaagatgatggtatcttgcccagtgaaggtacttctgttgatgttactggttctaagcaggatgatgtgaacattgttggcacacaaactgatgatgtttctcggggttctagtcattttccagttattttacaatcaactgagtcagatcggcctccaggtcaagtgaagaatttggagagtaggatggagcaggtgaaaacagaagaagctttggttaacagttctggtggcaatcaaactcacagtctgggcgatgaaccttctcataatacatcattagcaagaaattctccctcagaacactcgaatgagcgttgctctgatcaagtaattggtgaaaatttcaaaagtaaagaaaatattgttgaagtccattctggcattaatactgatggccccgatgaagctctgaatgcattgcacacccaatctaaggaggccagcatgacagatattggtgtacctactgatggtgatagatgtgaaggtaaagggactagtgtcgaggtctgtgctgacatgaatactgatgggcctgtggctacccaggatgcttcgtccacgaaatctgataaagagtcctgcatgatggaatgtggtgtgtctaccgatggctgtcccacagtttgcaaaacacacaatgatctccagggtcatgtatcttgtgaagaaacctttgttaggactggtggtgatgacacaacccatatcaccaatgcaaattatggttctaataatgaaagtgaggccaccattgctagtcctgttgaaaccacacaaaaactgatggaagggagcactgttattgtgtcggagaattctgatttaaataagcaatgccacacattgcatactagaaatgatcctcctgcaaataccctgttgatagttgagtctaacaaagttacttgtgatgctgaaattgtttgtgctagcaggttagaatcttctggcattgaggctgaaacagtgggtatccaagagtcagctcttactgattttgagggaacaaaaggaactggggatttgggtgacagaactaacagtcaactgcatgatgatgttcatgggacatcatgttccacgatagctcttgtatctgagaaagaaccttccgaagatcttaccaccggtagccattcagaagcatctaatttacttgctgctgtagaacaaactcaagaaactactgttgagaaccaagagatcatagatgcagtagtgtttatggatgcctgcaaggcagaacctgttggtgattttactattgctaaaggagctgaacagactgtagaaatggttcattatgttgataagcaatctgctgtattagactatgttgagacacagacaaaacgaacttcggtttgtggttctacgctaaatgaatcccctcaggctgcagggttggaagaagactgctctgtactgaagcatggtgatcctacttcatctgagcttcttactgtagcacctaatccaatcggtgaaacttctgttattcaagtggaaccagaggcaagaaactcagatggatactgcacaacagaggctggcagtgctttatctgaaactgtcatgggattggagccaaataaagaaactgcggttccaatgcaagagaatattggagaagctaatgataattttaataattgcgaagcacacaataattcggagattcatgcatttgaagtgtcgatggaaacgcagtcatcagaagtcaaggaagtatcttctattcagtctggtgcagcaaatttgagcacacagacaactgcactgcctgatgtaacaggacaaaccagtatggcatcgactggagaactagtatctacaaatgaacacatacacatgcaaggcactgaaatcaattcagagcaacaaacaaagatggtttcacctgctgaatcagcacctgctaatgatgaacacgtgcaagacattgtgattcttagttcagaacagcaaacaaagatggttttagctgcagagattgacgcattatgcgtccaggagactgcaattattgatcttgggggagcaagaggaacagttgacctgaatgacataagaacacaggttcctgcattacctggaagggatgtgctagatgtggaggcacatattttggagcaaaaaaaaacatcttcaccaggtgatgaaattaagggttcagaacaagcaaaaatcgaatcgattgcagagatcgaaacagtgggcgtcaaggagaatgtcattgctgatcataaggaaacaggtaacaacagtggcgtaagtatacatgcgcctctattagttgaatctggacaaaaggcatcacctggagttgaattgcgtggtattgaggttgatgctcatgttttggaacaagcaaagatggtttcagctctagaaccagactctactccagaagtttgtgctgacaagttagaaccttctggtgctgatgatgttggaatgattgttgtccaggaggctgcttctgttgatgatcacaatagagcacaaggtggtgaggctcattgttcagaacaaataaagatggcttcaattgcacaagcggtgtctagcatggctttagtaggatattcttcttcagaagactcaatggtggatgctgctgcccgagtaactgatgctgattttgtggatagtaaagcagctggtgtttatcgccaagaaactatgcctactcaaaccacctctaccctcccagagaacatggattctcctgcaactgctgctaccatggttgaatcgaagtttgctgcctcgtctgagcacgttgcaggacccgagccaattgatgaaacttctgttatgcaagtggaactggcaacaagcacaggggatggatgtgcagcagatggtcacaatcttgtttcatctgaaactgttgttgaagtgaagcttgctcaagaaattgttgttcctagtccaggtggtagcatagaagctaataatacttctaccatcagcgaagtatacaaagatacccagtctcgtgcatctggtgaagcatgcaatgatggtcagtctcatggtgatgaaaatatgaaacttggtgaagcttacactgaactgcagctggcaccttcctctggtgaggaggccatgacatgtatgtgtagtgagctgcccagccaggaggtggaggctccaagcagtgaccctttggagaataatgaagaaacgaaaaatgaagctgctgctcaaggatcagtaaatgaggattctgctcctcgtgctgaaaatgcaaagattgatgaagctgacacagaacaggaactgcttccatctggtgaggccacggtagacgaatccagcgagctactcagccaagacgaaaaggtggctcgtaaagatgcaaagatggaagagtctgctgctgctgctgctgcacagagacagctaactactgaagttgctcatgcaagtgaaaacgcgaaacttggtgaagatggcacggagctgcaactgccaccaccttcaatggtagacatatctagggagcaactcagccaggaagtggaggttgcaagctctgggccttcaggaactgatgaaactgctgagatgaaacggctaaacactgaacattcacctggtgatgaaacttcaaaacttgttggaactgatctaggactgcaattgtcaccttctggtgatgccatggtagatatatctaataagccacccagctgccaagacgtaaaggaggccccgagcagtgacattttgggaaatgatgaaaattcagacaccgagaagactcctgctgccttgcatggacggctgaacaccgaacttgctcctagtggcagaaatacagaatttagtgaagctgacactggaaaacaagagacacccgtgtctgctgaggctatggtagaatcatcgagcgagcctcgcagccatgaggcaaaggaagctccaacccctgacctgtctggggatgatgaaaaagcgaagtcagcaagggctgctgttgttgcggaactttttggagatgcaacagaaggtggttcggatcagccattgccgtctcctagagaacaaggcaaggaagcagaggccgatggaggcttttagagtaaagttgcaaatattgtatcaagagatactagaatccgtgtaagtaagaactgctaatagtgcttttagttgtaactggtgtaagcttctactcagaatcaaaagcgacgtgctgagattacagcaacagtggcctacggcagtttactactgttttgtgcaatattgctgctgagttttgttgagacaggcaattgatctgtcatctgtctcgtcttgcatcgaagttggcagcaccatggtgaggtgctcccgccttaacctggaagcgctgacagagggaagaacaatactctctggtttcctaatgttttcctgttcactgttttgatttgatgctgcattgcagtagtgtgacttagtaacataatggtgcgtttggatagacggacataccgatccagaatcatctgaacctaaatattgagtacaagcttagattatctgtttggtctgctttatgtctgggtgcaatgctctctgatttctggacggagtggtaccgcaatccaaacagactttaatgtttgggtgcttcaggtcataatcaaccatctaatttactttgcaaatgaatgtttcaaactggactgctcaagcctaccaagtttaatggtccttcctagtattgaatccttttgagtctagcccgtttcctcatttgaattttcactgttagtgtgcctatacttgcctcacgtagaattttgaaagcttatggttgggtgcgttgtactcgac

SEQ ID NO: 9743 - DNA, 591 bp, Zea Mays
agtggcctagtgggggactgggggcatggggcctaaaagtggcacattatgcagattccatttgaccttggtgactacagctgtaatttgttgttggatgatgtatgctatcgtttaccttgctcagatgaagccattgatcaaccccatcctgagcggggagtgatctctcctctgcattaaaaagaatgaaagctaggtctgctgtaccattattcagtctgtgaacttcctattcatttggccccacctgatgaaataaataaactgccatgagtttttttttttttgctactccttcactgcagacattgagaaggctcgctgtgattagtgtatgcaattgtatgatatacgcaataataataatagtatctaaatatatgtgtgccgctcattggaatgtctgggtgcgtgtacccaactttgttcgtcacgactcaggtgtttgtctgcttgaaatggaattatgaacgtaaaacaatgtagcacaattttctgctttcagtgggtgttttgacttttgagcttacattttttggtggttctagtactggtacactgccaaatgtctgctattttcttgcttga

SEQ ID NO: 9744 - DNA, 3540 bp, Zea Mays
ctggaacccccgagcccccccgcgtccgcctgcccccctcatggtggttcttatttctggacaaacaggctgcggtaaaaccacccaggtgcctcaatacatcttggatcatatgtggggcaagggtgaatcatgtaagatcatatgcactcaaccacgtcggatatcagctatttcagttgctgagcgaatctctgctgaaagaggtgaggctgttggtgacacagttggatataagatacgtttggagtcaaaaggcgggaagaattcatcagtcttgttctgcacaaatggtgttcttttgagattattgataggaagaggaactaacgcttcaaaagcacgaaaccagaagcgctcattagatgatgcagttttgggaataacgcacatcattgtggatgaaatccatgaaagggataggttttctgatttcatgctgactattctaagagacttgttgcctttgtatcctcatcttcgtatggtactcatgagtgcaacaattgatgctgagcgtttttcgcaatatttcaatggatgttcggtcatacaagtccctggttttacctatcctgtcaaaactttctatttggaggatgtgctttctattctgcagtctgcagagcagaacacagaagtctacaattaccagcattcagagactggtataactcctttaatggtttttgctatgaagggtcagcttggggacgtctgtatgcttttatcttttggtgtggattgttcagcacaggatcatgatggaaaatccgcattagattgggcacaacaagagaatcaacaagaggtctgtgaagtaataaagaaacatatggagtgtagttcagaaaaatcaactgaagataacgagctgcttaacaagtacttggcatctattaatccagagcacattgatactctgctaattgaacggctgcttcgaaaaatttgtgtggattccaatgaaggagccatcttggtattccttcctggctgggaagatatcagtcaaacacgtgaaagattatttgcttctccattctttcaggattcatcaagatttcttgtgttgtctcttcattctatgatcccgtcctcagagcagaaaaaggttttcaaacgtccaccagtgggggttcgtaaaattattctctcaactaatattgcagagactgctgtgacaattgatgatgttgtgtttgtcatagatagtgggagaatgaaagagaaaagttatgatccatacaataatgtgtccacacttcatgcttcttgggtttcaaaagccagtgcaagacaacgcgaagggcgtgctggccgatgtcagccaggaacttgctatcatctttactcaaggtttagagcttcatccttgccagactaccaaattcctgaaataaaaagaatgcccattgaggaactttgtttgcaggtcaaactgcttgattcaaactgcagaatagcagactttctgaagaaaaccttggaccctccaattccagaaactgtaagaaatgctattgctgtgcttcaggatcttggtgctttaacacaagacgaacaactaacagaattaggagaaaagctgggttccctgccagtccatccatccaccaccaagatgctcctgtttgctatattaatgaactgcctggatccagcattgacattggcatgtgcagctgattatagagatccatttgtccttccagtagcgcctgatgagaggaaaagggcagctgcagcgaaagttgagcttgcttcgttgtatggtgggttcagcgaccaacttgctgttgtcgcggcatttgacttctggaggcatgccaaagatagaggccaagattctcaattttgtgcgaagtactttgtctcttcaaacatcatgaatatgctatcaagcatgaggaaacaacttcagaatgaactgtctcaaagagggtttgtccctgcagatgcatctgcctgcagcttaaactctaaagatccaggtatcatgcgtgctgttcttatggctggtgcttacccaatggtagggaaaatgctccctcctcgcaaaaatgctagaaaatcagttctggaaacagcgagtggtgccaaagttcgtctgcacccacactcctgcaactttaacctatctttcagtaaatcttctgggaatccactgctgatatacgatgagatcactcgaggtgatggtggaatgtatataaaaaattcttcagttgttgggtcatatcctttgcttctaatagctgcagaaatggttgttgctccacctgatgatgatagtgatgaagatgaggaagattctagtgaggatgaagctgaggaaagcacattggtacagcacaaagaagagattatgtcttcacctgacagcattgtttcagttgttgttgatcggtggctccggtttgacgctacggctctggatgttgctcaaatatactgcttaagagaacgtctagcatctgctattcttttcaaagtgaaacatccacaagatgttctacctcctgcgcttggagcgtcaatgtatgccatcacatgcatcctttcattcgatggtttgccttctatggttccacctaatgacctttcagcaaaccgaggttcaggccaggatttagcagaagctagcaagttctctcagggaagaagagcgggttatattccaccaagtggttttctgatgtccttgttagctgataggacccataatgcaccttctttccagaactcatctaaccatccaggaggtggttcagcgcatactcggccatccagggctcctgttggtaggtttgatcgatctcggcgacctttccgcaattctggacctgggacttcagcaccacgttctttcaaaaggcagcgcgacgctccacggtgagcagggcataaaggcagccttttgcatgccagccatttcggatgtgctttgtcaacggtgcctagtctaagaaaaggacgtgctacagaatcacaagctttgctgtgttccgttgtagaaatgaaaggaaaagaattatagcactgcatcagattcctttgtcgaagagtttttgtaggtatgcccctgagtgttttgtgtactttgctcagccgagctcatttgcaccgtagatctcagaggtgcctgtaatcttttggatggagttcggatgttaaaaagaagtgggaaagaaaagggaagacctgttatctgctcaaatgatgagccccataattgacggtatcactggaccatagatgaactttgtgctgtagtgccataggcaatatggtgtgacgggcgagtggaatttgccctgcatcgcaagcgttaaattttgtccttgtatgtacgtacttagtaaacttagtaataaccctttctttgaattcagttttatagtgagtccaacatgatatggcgcattttgttcttgtttgggaaaaaatgcaagcgaagtacgatgcaccaacggatttttcgggggatgaaggttaaagtctgacaacttggaatccaggcaagtcggaatgttggat

SEQ ID NO: 9745 - DNA, 2194 bp, Zea Mays
gacatcgtagcgtaggagcaaaaaaaaaaaaaaaaaaaaaaaaaaaacggcaaacgacgcgcgcgccgcctcttcgtaacaccactctgccgccccctcgctcgttcgatcgccctgtgagcttatccgacgccgtggtcacttgagccccgatggagtttgccgccggcgctgcggtggccccgcgcccgatgcccgccgggcccggccgaaaccgccgggtgggcggtggagcgatcggcatcggttgggcccgccgcgcgaccgcgccggggctctcgctggctcccgccgtcgcgagacgggcggcctccgcgtcgggaggaggccacgggcgcgtcgtcgttcgctcaaccggcggcggctgtctgtggttccgcggcgagggcgccgacggtgatcgatcatccctggcgcgcgcgtctccgtcggatggcgcggctcctgcgcgcagttcagttcgggaacagactataggaattaagaaggagctcttcaatctggccgttccagccatagttgggcaagcgatcgaccccgtggcgcagttactggaaaccgcatatgttggccgcttaggtcctgtggagctggcttcagcagccgtcggtatgtcagtattcaacattatatcaaagctcttcaaacatacccctcctaagtatcacaacatcatttgtggctgaagatgtgtcaaaacatgactcttcacagtatgcttcggctgcaattggtgtcattgaagccttggctttgattttggggtctggaatactcctcaacattatgggtgtctcacatgcatcagctatgcacaatccagcaaggctatttctttctgtaagagcacttggtgctcctgctgttgttgtttcattggctatccaaggtgtgtttcgtggactcaaagatacaaaaacacctctactttatagtggtttgggtaacatctcagctgtggttctgcttccttttttcgtgtattccttgaaccttggattgactggagctgcacttgcaactattgcttcacaatatattggtatgtttctgcttctttggtctttaagcaagagagcagttctattaccaccaaaaatgaaagacctagagtttgttgggtacataaaatccggtggcatgctgttagggagaaccctttcagttctgataacaatgactctcgggactgcaatggctgctcggcaaggcacagtagcgatggccgctcatcaaatatgtctgcaagtttggctggctgtatcattactttcggatgcattggctgtttctgcccaggcactgattgcaagttcatttgccaaacttgactacgaaaaagtggaggaggtcacattctatgtattaaaggcaggagtgttcgttggtatcgctttagcacttcttctgtttgtctcttttggtagacttgcagaaatattctccaaagaccccatggttatacaaattgtgaggagtggtgttttgttcgttagtgctagccagcctatcaatgccctcgcttttatctttgacggactccattttggtgtctcagacttctcgtactcagcttcctccatgatggtagttggagcaatatcctctttgtttttgctgtgtgctccacgatttttcgggcttcttggtgtttgggctggcctggctcttttcatgagtttgcgcatgactgctggatttatgagattgggatggagagcagggccttggtggtttttgcacagaaaagaacccaaatacaggctgcaatgaacaaaatgtggatctatggagccgaataaccaaatggcgagattaggatggaggatacaagttatgaaggcacactacaatggcgaaacatactttcatgttgactcccgtgtatgttttaaccagttcggttattctaattccatgtgtggtttggaatgtattttgacttgttatggatttcaaccaactcaatatcagtcaatccacatagattaacggtgaaacgaacaagcccttaggtggttttagaacttggaatttgagagtaaagctacattggacaaattttcgcttgtatgtgtcacataggcgatgattgttcagtatctctatcctctctgtcaaactctagattgaatattgcagatttatttagacatatctgatgggttcaaactttacggttcaaacactcata

SEQ ID NO: 9746 - DNA, 1878 bp, Zea Mays
atttcatcttctccgagcaaggaatccgctgtaaaggatctgccaataaagtctgagaagagcgaatcccatctccgattctagaatccgcaggcgacttagcagatctggagacatcgattcccagtaggccccccagagaagacgataaaccatccccacaaatctgaatatcttgacaagatttgcgaattgccggcttggagtggtgcggatggcaaggaacagacccccaaaaacttaccgccgttggagagtgctgccagagcggccctaccggatcttcaaaataaccattgtcttgcttcacgggaagacgaacgcggaaggcaggagacgaaggcggcaccagacgagtaaggccagccccaccagatctgaggagaccgaaaagctggcggcgccgggagaaggagcggaggccccgccgccagggaagtcggcaccgcgagcggccgcgaccgcccgaccgtcagtcttgcaccgcatgtcctctgtaaattgaaggaatcaggacgtcgctagcaacaagttgtcaactacccaaatctgcacgaggtcaataggagtatctcaaatcggctaacaagtaataatcctctcgatacccgaatcggtgaaggaaaacaagacgagtccgtcggtcgtgatcggtaccaatggaaggcgcagcggggatcaggacgaggccggcggtgtgcgtgaccggcgcgggcggcttcgtggcctcgtggctcgtcgagcgcctcctcgccggcggccgatacatggtccatggcaccgtccgtgatccgggcgacgccaagaacgcgcacctggcggcgatggacggcgccgcggaccggctgcgcctgttcagggccgaattgctcgactacggcagcgtggcggcggccatcgccggctgcgacggcgtcttccacgtcgcgtccccagtccccatgacctatccaatcggtgaccccgaggtagagctgctcgctccggccgtgacgggcaccaagaacgtcctgaaggcgtgctcggaggccaaggtgaagagggtcgtcgtggtgtcgtcggtggccgccgtgatggtgaaccctggctggccccagaacgaggccatggacgaggcttgttggtccgacgtcgaattctgcagaaccactcagaactggtactgtctctccaagacactcgcggagctggaagcgcttgattacgcaaagaggagtggactagacgtggtgtccgtctgcccgtcgctggtgatcgggcccttgctgcagtcgacggtgaacgcaagcagctccgtcatagtcgattgcttgaaaggagatcgtgaggtgaagctgaagctgaggaacttcgtggacgtccgcgacgtcgccgacgctctgctcctggtgtacgagactccggaggcgtctggacggtacatctgcgacgcaaatgcaaggcagatgtctgaggtcgtagcgctgctcaaggactggtaccctgcctacagtcatgctgccaccaagttcgtgcaggtgagcgatgagcctttgttcagctccaagaagctgcaggcgctgggctggaaattccggactctggaggagagcctcagggacagcgttgaatccttcaaggcggcaggtgtcctggtggattgaacagaacaggcagcgccctattcctggatgaccttcgcattttgtaaaccgaagttgctgtcttgtgcaagagcatcccgacgtcctcggataatgtaataaaaaaagcaaaagcgacaaagtttgccgtgtattatagcggcattgttacttaacgctgttttattttgtggaaatacttaacggtgttttagtttaatgccttgttgcttttgaaacatatgagaaatggtgg

SEQ ID NO: 9747 - DNA, 4717 bp, Zea Mays
ctcctgtcttcctcttcccttttctttctcttatatccctcgcccgccaagccgcggccgcagtagtgcagcagaaacgcaaaccggccaccccgcccgcactcgccgccccatctcttccgctcccgtcctctccgatccatccacgacgcgggaaccagcctccgaacagcagcttcccgccgccggcccccaagcctctgcgggcgtggttgcgtctccgcggtggcgccaccggagcggctcttgcgtccgagaggcgccctcgtgcgcgcgattttggccagatccgaccagcaatatttgtcgattctgaacaagcaccgtttgatgggcccggcaaagggttctcgaacaattaacaagaccatagtaaaaggatatgaagatcaacagcagcatgatgacccatctagttcaagcaaagctaaacagaaaaagaggaaaatttcagatttagatcccaaatggagcaaggatgaacttacacgcttttatgaagcctaccgtcaacatgggaaggattggaaaaagatcagcatagcgataggcggtaagtcgtcggacatggtgcggtctctttacagtgcacatcggactttcttatctcttccagaacatcaagctactgccatggggtttatcgcgctggtgactggtcatcacaatgcttcggagaaaaccacgagtcatagaggatatgatcacatagccagagcatctggaaaggcaaggaaacatggagaacaacagaaatcaattgatggacctgacctgcacaactgtcatgaaggggaaattactggattttcagcttccttcaaaaaacgatactatggcgaattggtcaggaacagccgaaatcatgctgttcagaggcgtactcctcttataccagttatagctcctgcagacaggagtaccattgatgagcccacaccaggaattgaaaacgtcatcaattttaattctaccaagagaaaatatgaagcggccaatcatggctgtgctgttgctccaacaaataagtactcttcggacagagtttctggattcgctgaaacatgcaaggctgatcaaggccatagttacttggataccatggaaattggggacatagcgatgtgtcaacaacattttaagaaaacacgaattcagcaaactgtggaggaaagtcagactggtatagttgagcatgagacaacgatggcatctaaagaagggaataagctagtctcttctgtaaacaacaatcagatacttatcgacagtatttctgaaggccatgttttggaatgttgagcctgagcacacaccccattaaactcgttagcctccagcccactaccgtggaaaaataaaatacatataatatttggcacacagatgaactacctttacaaattgcaatcagagcaaaaaccctgaccccctgtacaatatgtgattaggcattcattatgttcacttcttcaaccacataattgctgtctgatgatatgttggtcttggatgtattgaatagcctggtgaatgcaccctctaaaatgtcagaactagagattaatattccttcaggttcgcttggaaaaactgactctgtgttaagggaggaaggccaccctaccattgatctgtctaaacaagggaagccagttcgtaaatccagtgcttccaagactaggaagaaaaaacataagaagatattaggtgcagaggtgcctgctgaagcacaaaaaaaatgtgacgataatttagtcctgccggaaacactgagggttggtatcactgatgattcttccttgtgtactgactctggaagagcgaggacaccggaagcatctgaagatatttctgctgaagtccccaatacacaaacagaagccaagcctgaatttataatgtctggaaggaccaggttgaaatctcagatgcattgcaaaacaaagcctatgtcgtgcaatgaaggttcagataattttcaggtagtttatgccacctattatcaatactgtaagtagaggtatgtcctgctcttagacttcttatcctaaaatgttgactatgttcaggcaaagaagttgctgcactgtttgtcatctgaaccacttcgtagatggtgcacatatgagtggttctacagtgcagttgattatccatggttttcaaataatgagtttgtgcactacttagatcatgcaaaattgagtcatctttcaaggttgactagatcagaatggagcgcgattcgaagctcccttggtaaaccgcggcgattttcaaatcattttctggcagtggaaaaagaaaaacttgaggattatcgggagaaagttagaaaaatctacgctcaactcaatgatggttcacgggattctctacctgcagacctagctaggccattttcaattggtcagcaggttattgttcgtcatccaagttctagggaactttgtgatggcaaagtggtgatgatggggccggattgttacaaggtccattttgatgatcctgaccttggtgttgatactgtgaaggtatgtagtttctgtttcagctgctttcattaattattgtcagtaagacttttatattatgctggtaatgtgaccttttttcatgttaagcatcaaacctttagttttcacgttgaagaatcaatttcacaattcactgaacattgttctagttttttgttctgtaagcctattcctgtgcaaatgtagtggcaagcttttttgcccttacatgtggagagcaatcaaggaacttttcaaaagtggattgtcagcacgggtagctgttgcatcctgctacaatctcggtcgggtactgaccattctgcatacaaacttctctttggtttgacatgtggcatgcttgatttatgatgtattttttgtattcatactttgggtcgtattttcctagaacttggtgagcatttgctagttattcacaaacttttgcgttcatgtgcttgagaattttaatgacagtctgatgctatgttacatacatacctaaacttatttggtttcaggacactgattgtatgccagttaattggctgcataatcgtcctgacaacatgagaaggaactacctttcaaatgatgtgtacaacatactggagatggatcacattcctgaccttacaccaagtgagaaccggaatcatgctataaatggaactactgtattcgaggagctcaaaagtctgcgcttaacatcagatagacagcctaaggcagaatctattatacatagtgaacggccaccatataggagtacatctgatggccctacaagttctagtggtttctcttgcccagacaataatgctggtcacaacggtgaactagagtcatatgtagctgcattttttgaaaactcactatcacaagccaggcagatggttgacgaagccatccaggcaaactctggtggtagtgatgatgaaaaggtatgcatgttaaatcaagtgacaggatgtctaggctcagattctcgtggcgtgcaacttccatctgacctgatatcaaactgcatcgcaacggttatttcaatcaagcgccttagcgactcgcgacatccatttggtaacgtagcaggcgtcttggagcatgctttatcaatgctgcgtccaagctgtccacagaacctcggagtttacacagaaataaagagagacctttgcaccatagcgaaccagatttttgcacttgtgccaacagcatcgggcaattgcagccctcctgtctcgcccatgtaactgggacctgccccggatagacccgttgccttcttgcaggccctgcagtagacacgctgcttcctctgctgtgagttcaaaacagaggttttgctgctgttggagcttgatgttatgaagtccggttgaatggtagcatacggaggacgcaagtctgatgtgctgacttgagcttgtatatgcagcgtgcgatcattaattggctagcctccttgtaacctgtgtatatacctgaatgaataatttataggtccatatacagattcaggatagttaatatctgatacagtagtgaataaagatgtatttctgcagtcatgattctcgtcttctcgatgtaatgtcacaggaacgtttcttgataggaaatttacataataatattaaaatgagcgagccaagagttcaagacccgttcgctgtgaaccgcgacaggtttccttagtgcctctgtacattgggacaggacataaattattcgatcctgatcgtacatacacacatttgggaacacgtattttatcaaataaatttgtgtcggcctggtaccttcacagtatcaacacaaatttattcttcctaattcctggacaaagaaatttacggatgataacaacacaactgcttcatcctcaactgtgttcttaacagaacatcatccttgaatcctgcaattacggtcattagatcctaattatgtcaaacgacactcaattcatagctcaattagagtattagaaaagagaaatttctcaagaataaactaacctttaatcagtatagtacaagagcaaggatttttcacattccccacaaatgtgtacttttcttctacgagaacatactcatagacaagatcagatgagcctagacaattttcagtcaagtcatcaactgaattgatagctccaccaccacgtgatagctcgaagagcaataatc

SEQ ID NO: 9748 - DNA, 1444 bp, Zea Mays
accattctgttgtagttgacaatcatgatatttgaaaaacgagctcacaactatatttcacacaattgatgctccaaattatttttctgtaattgaaacctaatgtaggaatgtgtaggatatttgatttgcctattagagaaagatttgataggatgtttgctttgcttggtagggaaatatttgataggatgtttgctttgactgataggaaaataccaacattctcatcttcttatggccctgtgcttttacttcatgtgctatctgaatatagagtataatgtaaagctatttttgcagattggaactgcagagtggtcgggttctcagatgtaagctgcacaacattaagctatctccccatcgatattgcacactttaacttgttaccatatttagttcttttgtatgcctttatagtggcttgttaatttacactgctggttcctgcaaccttttacaaattggtaaaaatgaaaattgagagaggaaaatttgtgctgaagctttattcgtcctttggttaagtgattactgaatgaaaacaaatttaaaaatagtaataaggtttttgttctatcaaacacaatcaagatttgttagcttgcttgctgctgcttagatcaatattggtttctcacatcaactatgctaatgttgaggtgataatcagtctttcactagcataatgatgtatatgcagactaatttttgtctccgttgcatggcatttgtgttgttgtatactgctcaagtactgcttatgagattgcttgaactttatcctagagcctcaagagttgtcgttggccaaagctacatctatctttctttcagtgttttgctggaactgataacgtttcgagtctgcagaagaatgaatcatagaaagttaatgtgtgcatccatggttgtggtcttgacacggcggagcggacctcgctcgggaagctgctgcagccggtagactattgattggaacttttaggtcaatccctgttttgttcccatgcttgaaattgatggtcttcattttgttggttgtgacaaaagtcaaaaccggatggagttgtggagcagattgcgggttttgaatttcttttccaaatgtcgtcttcacgcccaccgcggaggggtggtgaccgaagagatagtggcaaaggcgtcccttgtgggctctgctcctatctcgcggtatgaagcctttaacttatgagatgagataggagtctgtgttcttatcccaatataaggtctacaatggcacaatgcttgtaccatctgtttttgcggtaacttatttttatcatgcagtgcatgtgatttgaaactttgtgttagcctttattgctttctaccttatggcacctgtagtagtgaactgatgatattattgtggactctgaagctttgtttgcttagaatggtaattttgttgtat

SEQ ID NO: 9749 - DNA, 2772 bp, Zea Mays
ctcgaggtgagcatccctcccccggcgccgcgccctcggctttgtagcagccagccgtcatggcgccgccggccagcaccgacgagaccgcacgccacaagaaggccaggaaatccaagatcgatatagaagagaagaagcacaagaaaacaaataaggcgcgcgccgccgcagaggacgccccgatacccgacgccgccgagcgcaagaagcgtaagcacaaggacgggcgcgaggagaagcgggacggccagaagtccaagaaggagcgcaagtccgagggaaagggagaggaagccgaggcggccgtggggagggacgagaagatgaggcgtgcgatggaggacgagcggttcgcggcggcgcggactgacccgcggttccggccgatgcggaggaaggaatccaaggtggcgctggactcgaggttcagcagcatgatgacggacccgaggttcgcctcgtcggcggcgcccgtggacaagcgcgggaggcgccgcaagaaacgcgagaaccccatgctgcattactatctcaaccaagaggacttggaggatgatgggaaggggaaggaaaaggggaagaaggagaaaccagtgcttgttcaagaagaggaggaagatgaagaggaactagaggaacaggaggaagaagagagctctagcagcgatgacgacgaagatgaagatttggatgacgacgacgaagagtgacattgctcattacttaatgggaaggcatgatgatacacctatgattgacaaggaaactcacaggcttgctgttgttaatatggactgggatcatattaaggcagttgacctgtatatggtgatgacttcttgcctcccaaagggtgggcgagttttgtcggtctcaatctatccatcagaatttggactgaagtgcatggaaattgagtcaacacagggcccagctgctctggtcaatgccaatgttgataaaaaagacagtgatgaagatgaggatgacacggatgatgatgaagagagcactgatgatgatgttgatgaagaagaagaggaagttgactctgataaagagaataacaaactgcgtgcttacgagctaaacagattgaggtattactatgcagttgtggtgtgtgattccagcgcaacagcaaatcacctgtacatgactcttgatgggactgagttcttgaaaacagcaaatgtgtttgatttgcagttcattcctgactctagggagttcaaacatcctgctcgagacgccgctacagaggcacctccgagttacaaggaacctgattttgagactcgtgctttgcaacatagcagagttaagctcacctgggatgatgatgaacctgaacgtaagaaagtcttgaggcgaaagttcaatgatgatcagctagatgagcttaacatgtatttagcaagtgatgacagcgcgtcagataatgaaggtgtagacgattctgaggatgaatctctgccaaatgggggatccaaacggaagctaacaaaagaggagaggttggctcttctgctgcaaggagacaaatctgatgaggagcaaactgatgaccaggatatggagattacattcaacacggagcttgaggatcttagtaaacggatcctagagagaaagaacaatgaggagaagaccatctgggagaagcaccaagagaaaatgaaagagaaaaggaagggtaggaagaggggactaaaggacgaagatgatgataaccactacatcagcgatgatgagcctgagaatgatgatgatttctttgcagatgaacagtctgatgaagaacctaagccgagcaaaagcaagaaacacaaggcaaaggcaaaaggcgaagcaaagaggaaaggaaatgatgggaccacagatgagcatttggaacaagaagcaaccaaagatgagttggagctcttggttgctggtgaccaggatactgccaatggtgcaaagggttataacttgaagcgtaaaaagggcaagaagggcaaagaggaatctgctgatgacaaacttcctgacattgaccttagcaaggatgagaggttctcagcaatgtttacttcccacttgttcgcattggatccaactgatccccagtacaagaggagtgccgccttcatgcgaaagcaagctgggaagccaggggtacatgggggcaaatcaagcagagaacctccgctggagggttcgtctctgggaggtacagtaccacctgacgatgctgttactaacaatgatggtcagaaacctgatggttcagccacagagaagctgcaaattttgtctgctgttaagtctctcaagagaaaccttggtgcattcaaaaactcaaagacaggtgaccgataaaaagagcatcatttttgttccggctattacacttaatcagtgaaatccctttgttggaaaatggtctcagttatatagtcttcgagatagtttcatggttatgtatgcttatctctgattctgtagacacgcgtccaatctttggattttcagttttgacactatccagattccagaatccaatagaacgattctgttcatttctagtgagataattggtttaatttatcaatttagtcacagcgcatttgaatatctggccttgttgatgtaatctctatgcgggatactagcaagaggttgagactcgtagaaagtttattaggctgtgcccaatgttggatggtagtcttatcaggagataaacgacagctctaggctcagccaagccatccttaattgtgg

SEQ ID NO: 9750 - DNA, 3112 bp, Zea Mays
atgccccaccaggcaccaggttgctgggtttgggcctcacggtccagcagatgccagccagttgccacgcgtttcatcagcccgacccaaccaaagccagaagacacggtgccgtcagctgtgctcccggcgctcccgcaccacaagcaagcgcgtgcgcgccgtcaagtcgcctctacagcaacttccaccgcgtactccctccctccctcgtctcgtcttcgtctccaggtttcgcgggggccaaggtttctgccggagcagtcgcggtctgcgctgcggcacggcgacgaggtggggatggagtaccgcgacaagctcgtgctggcgcccatggtccgcgtgggcaccttgccatttaggctactggctgctgaatatggtgctgatattacttatggagaagaaattattgatcacaaattcttgaagtgtgagcgtgttacaaatgaatctcttgggactactgattttgtggagaaagggactgacagtgtagttttccgtacatgcccacaagaaaggggcagggttgtattccaaatgggcacatcaaatgctgtgagggcacttaaagctgctcagatcgtgtgccgtgatgtttctgctatagatatcaacatgggttgtccaaagtctttttcacttagtggagggatgggtgctgcattactctccaaacctgagcttatacacgatattctgacaacactgcggaggaacttggacacaactgtgacatgtaaaatccgtcttctgaacacacctaaagacactgtggagttggcacgccggattgagaaaactggtgttcctgctcttgctgtccatggaagaaagattaaagatagaccgagagatcttgccaagtgggatgagatagctgatgttgtgtcagcgctgtcaattccagttatagctaatggagatgtctttgagtatgaggattttaagagaattaaagatgcaacaggtgccgcgtctgttatggttgctagaggtgctatgtggaatgcctccatcttttgtgccaaaggaaaaacaccttgggaggatgtcaaaagagagtatgtaagaaagagcatattgtgggacaacgatgtgaagagcacgaaacataccttgaaagaaatgataatgcactattcttgccttgaacttcctgaggggaaaggcgttataaagtgtgatacatctgaagatttagcgagactatacggggaagaggactactataattttgttgttgcaaataggaaatgaatacaatttgatgttgtgagctctcatgtgtaccaggtatctatttccgaatacattgggtctagagctagtgaaaaaggaaataatattatgtgaaactgatgaagttgatagtttcatgtagtctacatgcggtactttttccttgcaaataacaattacttgcaaaataagcatgtttgttgacatgggtttcaaaactaaaattggttccagttccttggccaggtagccactcttaataggggcttgcatgctggtagtctgtaaactagcgattagagtttgtaaatgtatgatactgatcaagaagtcaagaactggctaaactaaatggtattttacctggacccagcaaaaccggtgaaacttgcctggaacttgaagaaagatgttcacttgcatgattaaattgcaaatcagaggtacccatggccacaatgtaatttcgaaaggttttttcatcataataaaaaattgcaataattcagtgatcaatgggtaatggagcagaactctcaacttcatgattgattattcgcttcgattaaagccagctgtttggactgctgtagctgcaatccatagagataaaacactgtagaagcaatagaagcctacggattaaagtcaagcaaacaggctagacctctctctttctctgaaaaatgtactaccaagaacctgcatatctacatacaatgacacctctcctcacctgcccgtgacgctgagctgccttcgccccccccccccctcccccttcgccgccgctgcctagatgtttcatttcatctttgtgcgtgtgaggcacacggcacgataaggacgaatgttgggtggggctgctccctctttcaatggaatgacatggtcaatatcacgttgaggagggacttttgtgtactcctgacagaattcagagtattgttgcagtaaggcttgaatagccagacgaagagtgtggtgcctgcagagacaagctgttgagatgcagaatgaaactagaaatgcctttgttgagaagcttgttcattatccttttcagttgttcagtgtacgcatcctgagatgtacaatcctttaatgagaggagagtatcatcttctaaggagtcaagggtgttgttcaaggcatgttcctgaatagagaatgcagtgcctgttatgattgccccagatcttctgcttggattcctatctcaccctttattgatgggattaggaggaattcctgccaccaaggacaacgggatttgccattttggcgctgtctggacttaacactgaagctgctgatctttctcttgtactgcacatcgtttatctttggtggggctctacctctacttcacaaatgctctgtatctgtatcttggtgggcaaaggcgcaaagctgcatcagccatgagtccatgacatcagagacggttatgctgatatgcatgcatggtattccccttacacaaaaccgtaatatctcattctcattcatactccataatctctgcgcataggccatcttcgattctttttatatttaataaagacgccatcttggagctaccataccaagatgcagaaatgtcgtgcaaaccaaaggcaccgaagaacagtcgagacctagctttgttggtaagccaaacctagtcttcaattctctaggacccaaaaatcgtgtcttaaactgtcagtctgtcactgccagaaaatgcgggccagatttttttttgatacctctggaacgtgtactaagctatttaaaaagtttgctttcaacttcgaggcttcagcgagtggatgaactctgcacgctcccttgagacctcaatgcaagttcaatcagtcgg

SEQ ID NO: 9751 - DNA, 2052 bp, Zea Mays
cacaggtaccggaccaaggtttaggtcctacatcatatcatattgtcaaggcattattaacttctagaaagttgttgctggaagaactgaagaaaatcagtggtgctattggtaagacagtagaggaattagatgttgctgacttgaatcttggtagatatgagtcatttaatccatcaaaatctggattaccaaattctagtaaagtgttccctgcaactggcaagggtgtgggacagttgactggagttttacatgatttcttggagaaaaacaacgatatggttaatggtacagatgattctatgctggtaaataaaacaaagatattggagtacttgcacgatgcttgggctattgacaggaaggcagaatggtcaatatggactgttcactcaaaaattgagatccctcatcgctatttgcggagtatgaatgatgaatcatctcaccgtcattcacttcttagagtttctggatcaaggaagttccatgacgatcctgcacagaactctgcttcacgggctgaactacaccggaaaagcatagcacaaatgaagaacaacatgtcatggttgttccacagcatagttccagcaaggatttggcttcgaatgcttctgaacaaaaggatactattgtgctacctaaactacaaggagagcctctggtacccaaaagtagtgttgggccaccatttggatttacgtcttgttagaaaccaatggcttctattggaccctggagctgattgcctaatgtctgaggctaatgaagataaaacatctggagacttcaaagaaatgggtagcaggttggccggggaggtaattgccttcctgaagaagaaaatggataagctttctagatatggaggctgcaaagagctgaagttaagttttgtcggccattccatcgggaacatcatcattagaagtgccctggcagaacctgcattgcagccatacttgaagaacctctacacttacatgtcaatatcagggcctcacttgggttactggtacagttcaaattctttgttcaattctggactctggctgctgaaaaagctcaagaatgctcaatgcatccatcaactcactttcagtgatgatcaagacccccacaatacatacttctataagctttgcaagttgaaaacattggagaacttcaaaaatatcatattgttatcatcaccacaggatggctatgtaccatatcactcagcgagaatggagctctgcccagccgcatcatcggacacctcaaagaagggtcaagtcttcacagaaatgctcaacaattgcttggatcagatccgtgcgccctcatctgacacccggacgttcatgcgctgcgatgtgaattttgaccagtccaaccacggacggagcctgaacaccatgattggcagggcagcccacatcgagttccttgagaccgacatctacgccaagttcatcatgtggtccttccctgacctgttccgatgacagacaacgccgctcgtctctgtaatgtctctgtaatactgctgcataccaaacctacaaaccgatagcgcacactactgagtactgaccaggcaaggaaaagtaagcttgcataaaggctcccccagaatccaacaccgccacaggcagagtagcgctgtaaagatcctagaagcaacggtttttccagcttgctagatctgattctgtataaatagttgattctttcgtcattccattcatagtgctgtagatgtgcacctttgctgtgaatttataatcctttgtcggcttgtgtatctaacgcttcggtttaggatgtgctgacaatcagtgagcttatgtccaaataagccccctttcttaatgtttggttttagtcaccttggtctttgtgctgctgtaaatccagggtgttgtttctgtttggtgaaatgactgctacatgaatatctggttctggcatcttgccatagccggatcttgcttctgctaaggttattcctatcagggatatataggattggaaaaaaatatgaaagattttgatttattt

SEQ ID NO: 9752 - DNA, 3200 bp, Zea Mays
cacgcgccgccactaggtgtcacccgtccttgcgccgccgccgcatccttcgactttcgatctgcgagctagcgattctccgctgaggagtggggcccatccctccggagcccaaccccagggcatccgcccgcccccgccgccgtggctcaggccccacgcgtcatccccgcgacggacaacgtagtcacgcaggtggagcgcggtccactcccccccccccccccccccccgcgcttcgcctccgctgagaccgcgccctgctggtgcgagtacccgggagcttccaaaccctagggccgggcatcgagcgagcgagggggtgagcgcggagcccaggcatgccttgccgcccgcggggatccaggcagtgatgcgcggatcggcgcggcgggggcggcccggaagctcggccgcatgaggtgcctcgtcggcggcggcgtccaggacagcccgcgcgcagcggccaaaagagtatcgccggcgtcgtggcggctggacgccgccacagcggaggcggacgcggggagagctgaggccaagggggtcaggttctgcgtcaggccgccggacgtcatggagacggtgcacgaggtggccatttacatccaccgcttccacaacctcgatctgtttcagcaaggatggtatcagatgaagattagtgcaatgtgggaggaaggtggcaacaaaacaccggcttcacctgccagggtcgtgcaatatgaagcttctgatgttggtgcggatgatgcattaggcatttggaaaatagatgacgtcgacaatagcttccacacacagccgtttcggatcaagtatgccagacaagatatctatctgtcagttatggtgtcgttcaacatattcaacattgaagaggagcagcctcggcggtgatgttgaagtttgagctgatgtatgccccaacactagagaacgggtctgagcttcaagcttctagtgtcacatcttcagcagctgtgcatgaatttaggatcccccacagagcactcctgggtctacactcctactgtccagttcattttgatgcgttccactctgtgcttgttgatctgacattacacatagtgtacctgaaagctggtgcaactaaaccatcattgaaggtaccggaccaaggtttaggtcctacatcatatcatattgtcaaggcattattaacttctagaaagttgttgctggaagaactgaagaaaatcagtggtgctattggtaagacagtagaggaattagatgttgctgacttgaatcttggtagatatgagtcatttaatccatcaaaatctggattaccaaattctagtaaagtgttccctgcaactggcaagggtgtgggacagttgactggagttttacatgatttcttggagaaaaacaacgatatggttaatggtacagatgattctatgctgtaaataaaacaaagatattggagtacttgcacgatgcttgggctattgacaggaaggcagaatggtcaatatggactgttcactcaaaaattgagatccctcatcgctatttgcggagtatgaatgatgaatcatctcaccgtcattcacttcttagagtttctggatcaaggaagttccatgacgatcctgcacagaactctgcttcacgggctgaactacaccggaaaagcatagcacaaatgaagaacaacatgtcatggttgttccacagcatagttccagcaaggatttggcttcgaatgcttctgaacaaaaggatactattgtgctacctaaactacaaggagagcctctggtacccaaaagtagtgttggtaaaaaaagtgggcgcatcttgcgagctgtcatttttgtgcatggttttcagaaaccaatggcttctattggaccctggagctgattgcctaatgtctgaggctaatgaagataaaacatctggagacttcaaagaaatgggtagcaggttggccggggaggtaattgccttcctgaagaagaaaatggataagctttctagatatggaggctgcaaagagctgaagttaagttttgtcggccattccatcgggaacatcatcattagaagtgccctggcagaacctgcattgcagccatacttgaagaacctctacacttacatgtcaatatcagggcctcacttgggttactggtacagttcaaattctttgttcaattctggactctggctgctgaaaaagctcaagaatgctcaatgcatccatcaactcactttcagtgatgatcaagacccccacaatacatacttctataagctttgcaagttgaaaacattggagaacttcaaaaatatcatattgttatcatcaccacaggatggctatgtaccatatcactcagcgagaatggagctctgcccagccgcatcatcggacacctcaaagaagggtcaagtcttcacagaaatgctcaacaattgcttggatcagatccgtgcgccctcatctgacacccggacgttcatgcgctgcgatgtgaattttgaccagtccaaccacggacggagcctgaacaccatgattggcagggcagcccacatcgagttccttgagaccgacatctacgccaagttcatcatgtggtccttccctgacctgttccgatgacagacaacgccgctcgtctctgtaatgtctctgtaatactgctgcataccaaacctacaaaccgatagcgcacactactgagtactgaccaggcaaggaaaagtaagcttgcataaaggctcccccagaatccaacaccgccacaggcagagtagcgctgtaaagatcctagaagcaacggtttttccagcttgctagatctgattctgtataaatagttgattctttcgtcattccattcatagtgctgtagatgtgcacctttgctgtgaatttataatcctttgtcggcttgtgtatctaacgcttcggtttaggatgtgctgacaatcagtgagcttatgtccaaataagccccctttcttaatgtttggttttagtcaccttggtctttgtgctgctgtaaatccagggtgttgtttctgtttggtgaaatgactgctacatgaatatctggttctggcatcttgccatagccggatcttgcttctgctaaggttattcctatcagggatatataggattggaaaaaaatatgaaagattttgatttattt

SEQ ID NO: 9753 - DNA, 3229 bp, Zea Mays
cacgcgccgccactaggtgtcacccgtccttgcgccgccgccgcatccttcgactttcgatctgcgagctagcgattctccgctgaggagtggggcccatccctccggagcccaaccccagggcatccgcccgcccccgccgccgtggctcaggccccacgcgtcatccccgcgacggacaacgtagtcacgcaggtggagcgcggtccactcccccccccccccccccccccgcgcttcgcctccgctgagaccgcgccctgctggtgcgagtacccgggagcttccaaaccctagggccgggcatcgagcgagcgagggggtgagcgcggagcccaggcatgccttgccgcccgcggggatccaggcagtgatgcgcggatcggcgcggcgggggcggcccggaagctcggccgcatgaggtgcctcgtcggcggcggcgtccaggacagcccgcgcgcagcggccaaaagagtatcgccggcgtcgtggcggctggacgccgccacagcggaggcggacgcggggagagctgaggccaagggggtcaggttctgcgtcaggccgccggacgtcatggagacggtgcacgaggtggccatttacatccaccgcttccacaacctcgatctgtttcagcaaggatggtatcagatgaagattagtgcaatgtgggaggaaggtggcaacaaaacaccggcttcacctgccagggtcgtgcaatatgaagcttctgatgttggtgcggatgatgcattaggcatttggaaaatagatgacgtcgacaatagcttccacacacagccgtttcggatcaagtatgccagacaagatatctatctgtcagttatggtgtcgttcaacatattcaacattgaagaggagcagcctcggcggtgatgttgaagtttgagctgatgtatgccccaacactagagaacgggtctgagcttcaagcttctagtgtcacatcttcagcagctgtgcatgaatttaggatcccccacagagcactcctgggtctacactcctactgtccagttcattttgatgcgttccactctgtgcttgttgatctgacattacacatagtgtacctgaaagctggtgcaactaaaccatcattgaaggtaccggaccaaggtttaggtcctacatcatatcatattgtcaaggcattattaacttctagaaagttgttgctggaagaactgaagaaaatcagtggtgctattggtaagacagtagaggaattagatgttgctgacttgaatcttggtagatatgagtcatttaatccatcaaaatctggattaccaaattctagtaaagtgttccctgcaactggcaagggtgtgggacagttgactggagttttacatgatttcttggagaaaaacaacgatatggttaatggtacagatgattctatgctgtaaataaaacaaagatattggagtacttgcacgatgcttgggctattgacaggaaggcagaatggtcaatatggactgttcactcaaaaattgagatccctcatcgctatttgcggagtatgaatgatgaatcatctcaccgtcattcacttcttagagtttctggatcaaggaagttccatgacgatcctgcacagaactctgcttcacgggctgaactacaccggaaaagcatagcacaaatgaagaacaacatgtcatggttgttccacagcatagttccagcaaggatttggcttcgaatgcttctgaacaaaaggatactattgtgctacctaaactacaaggagagcctctggtacccaaaagtagtgttggtaaaaaaagtgggcgcatcttgcgagctgtcatttttgtgcatggttttcagggccaccatttggatttacgtcttgttagaaaccaatggcttctattggaccctggagctgattgcctaatgtctgaggctaatgaagataaaacatctggagacttcaaagaaatgggtagcaggttggccggggaggtaattgccttcctgaagaagaaaatggataagctttctagatatggaggctgcaaagagctgaagttaagttttgtcggccattccatcgggaacatcatcattagaagtgccctggcagaacctgcattgcagccatacttgaagaacctctacacttacatgtcaatatcagggcctcacttgggttactggtacagttcaaattctttgttcaattctggactctggctgctgaaaaagctcaagaatgctcaatgcatccatcaactcactttcagtgatgatcaagacccccacaatacatacttctataagctttgcaagttgaaaacattggagaacttcaaaaatatcatattgttatcatcaccacaggatggctatgtaccatatcactcagcgagaatggagctctgcccagccgcatcatcggacacctcaaagaagggtcaagtcttcacagaaatgctcaacaattgcttggatcagatccgtgcgccctcatctgacacccggacgttcatgcgctgcgatgtgaattttgaccagtccaaccacggacggagcctgaacaccatgattggcagggcagcccacatcgagttccttgagaccgacatctacgccaagttcatcatgtggtccttccctgacctgttccgatgacagacaacgccgctcgtctctgtaatgtctctgtaatactgctgcataccaaacctacaaaccgatagcgcacactactgagtactgaccaggcaaggaaaagtaagcttgcataaaggctcccccagaatccaacaccgccacaggcagagtagcgctgtaaagatcctagaagcaacggtttttccagcttgctagatctgattctgtataaatagttgattctttcgtcattccattcatagtgctgtagatgtgcacctttgctgtgaatttataatcctttgtcggcttgtgtatctaacgcttcggtttaggatgtgctgacaatcagtgagcttatgtccaaataagccccctttcttaatgtttggttttagtcaccttggtctttgtgctgctgtaaatccagggtgttgtttctgtttggtgaaatgactgctacatgaatatctggttctggcatcttgccatagccggatcttgcttctgctaaggttattcctatcagggatatataggattggaaaaaaatatgaaagattttgatttattt

SEQ ID NO: 9754 - DNA, 4103 bp, Zea Mays
atggatccgcgccgcgcacccccgcggggcggcggcgggctctcttactccacgctgttcaacctcgagcctttgcagaacttaagggttcctgtaccagaaaatctcgcccgctacgggaacagcagctcaaatgggagtccaagcagtgagggtcaaggatccttgttggatcagtacaatggtgtacatgatgcttcccatggcttgcatcggaagcgaaaaaagcaccctgatggtgccggcgatgatgatcatgcagatgcctatagtaacaaaatgatggaggatcactaccgtgcgatgctcagtgaacatgtccagaagtaccgaaggtcaaagtttaaggagggtgcttttatttccgatccttctcaggtggcaatcccccaaataaaacacaaaaacggtggtaaaaaagttatgaagcacattagtaatttcagggatattgcggcattaaatgggatagaagcttcacatgagtataattggatagaatgtattgaaactcatggtggttttaataagcttgtagcatccgttgattccacctatttagatatgggggataatatacactacttagttccagagggttatgataagttagcattatcccttaacctccctatttcttctgatatacgtgttgaggagcacttcttgaagggcgcactagatttgtgcaccctatcagcaatgcttggtactgaccaaaggtttgaggcttccagccatggtggattatctgaacccctgccacaatttgaatctctcaaggaaagggtaaaggtgcagaaattttctcttcaagttaccgaggacccctttgcaattccggaaggagcagctgggaggatacgaaggtctattatatcagaaactggcaatttgcaggtccattacgtcaaagtcttggaaaaaggagatacatatgagattattgagcgcagcttaccaaagaagcaaatagtaaagaaggaaccttttgtaatcgtgaaagaagagtctgaaaagacttacaaactctggcagtatcttgctactaaaagcattccaaagcatcacaggaattttacttctttgatgaagaaacgacaagtagatgcgaagcgcttctctgatagttgtcaacgagaggtaaaattcaaagtaaggaggtcactgaaactgatgagatgtgctgcaatacgtacaaggcagttggctagggatatgctgatattttggaaacgagtagacaaagagcagtatgagttgagaaaaaaagaggaaagagaagctgctgaagctttaaaacgtgaggaggagcttcgtgaagccaaaagacaacaacagaggctaaactttctgctgtcacaaacggagctttatagtcatttcatgcagaacaaggctggtggctcagcgccacctgatgaggaagatgtccctgatgaagatgaggaagaagatcctgaagaagctcaattgaaaagagaggccttgagggcagctcagcatgccgtttctcaacaaaagatgaggactaatgcatttgatagtgaaactgtgaggcttcgtcaaacttctgagtctgttcttccaactgatgattcatctagcatggatcctagtaagattgatctattacacccttcaacaatgcctgagaagtcatctgtgcaaacaccagagttgtttaagggtgtattaaaagaatatcagttaaaaggcttacaatggctggttaattgttatgaacaggggttgaatggcattcttgctgatgagatgggtcttggcaaaactgttcaggctatggcattcctgtctcatttggctgaggacaaaaacatatggggcccctttctagtggtggctcctgcatctgttgtgaataactgggctgaggagttgattagattctgccctgacctaaagatacttccttactggggcccagagaggatgattcttcgaaagaacatcaaccccaagcgtttgtatcgcagagatgctagcttccacattcttattacaaactatcagatacttgtgaatgaagagaagcttttgagacgtgttaagtggcaatacatggtactggatgaggcccaggctatcaaaagttcaagcagcgctggaagacattactgagctttagctgtagaaatcgtctacttcttactgggacaccaatacagaacaatatggctgagttatgggcacttcttcatttcatcatgcccactctatttgacagccatgaacagttcaacgagtggttctcaaagggtattgagggtcatgctgagcatggaggagctttgaatgaacatcagcttagtagattgcatgctattttgaagcccttcatgctccgccgggttaagattgatgtcattgctgaaatgaccaaaaagaaagaagaaattgttccctgcaaattgagttctcgtcaacaaattttctatcaagctataaaaaataagatctcgcttaacgagttgcttgatggaagtcgtggcaatctaaatgacaagaagttacttagcctgatgaatattgtcatgcagctacggaaggtctgcaatcacccggagctgtttgagcgcaatgagggaagctcttacttttactttgctgatatcccaaactcacttctttctcccccgtttggggcattacaagatgtacattatgcaggcaagagaaatcctataatctttgagatcccaaagttagtttatgatggaatcatctgcaacacagaaaattctggaagcatctgtggatttcagaatggatatttgaacaggttgtttaatatatttttgccaagcaatatccatcgctcagccattccagaagttaattcatcaaatgagtctgttttatcatctggtgcatttggctttacacgtttgtcaaacctgtgcccagttgaagctttcttcctggccacttcatcattctttgagggactagcattttcagtaatgcgatggaataggaactacactgatgaaattatggatgcattccttgattcagaagatactgacatccagttcagtcagaatgattccacaagagttcgtgcagttgcccggttgttgctttcttctacaaaggccaagcccagcttacttaggacaaagattggaactggcccaagtgaaggcccatatgaagcactggtgctttctcatcatgacaggcttgcttcgaacataagggttcttcgttcagcatacacttatattccgccagctagagcaccacctataaatgtttcatgtgctgatcgaaattttgcctataagttcactgatgagatgtatgatccttgggtcatgaaactgttcctgggatttgctcgtacttccgagttcaatggtcctagacaaccagttgctcttcatcctttgatacaagaactcaatactgatttgcctatccttgagccgatgctgcagctaccctataggatatttgggtcttctccaccgatgagtaattttgatccagctaaaatgctcactgattctgggaagctccacaccttggatatgctactacggcgccttcgagctgaaggtcaccgtgtgcttctttttgctcagatgactaaaatgctggacattcttgaggattacatgaattttagaaaattcaagtatttcagacttgatgggtcttctgcaatctcagaccgccgtgacatggtccgagctttccagaacaggaatgatgtatttgttttcttgttaagcacaagagctggggggcttggtattaatttgactgctgctgatactgttattttttatgaaattgactggaatccaacacaagaccagcaggcaatggatagaacacacagacttggtcaaacaaaggaggtaactgtgtacaggcttatatgcaaagatactatcgaggagaaaatattgcaaagagcaaagcagaaaaatgcagtgcaagagttggttatgaaggggaaacatgttcaggacgatcatttgttgagacaagaggatgttgtttcattacttattgatgacacacaaattgcacataagttgaaagaaatatccatgcaggtaaacatcaca

SEQ ID NO: 9755 - DNA, 4398 bp, Zea Mays
gcagcacatacgttggcgagtggaaaacccaggcccagaccccttccggtttcgctttccctgctcccctcttctcctctctcccctccgcggccaagccagagccatgcctcgttctactacttcccccaccacgtcacaacagggcatccacaccaccccccaccgcctccctccacctccgcctccttccccaccccccttccgcttccgcccacaaccctaaccttaatcccgtcgccgccgtagccgcggaccgactgggccgactcccgcaccgcgccttcggcgttatattcggtccctgcgttctctctctccggttccccacctcccgcggcgagccggggcgctagggttttctacatggatccgcgccgcgcacccccgcggggcggcggcgggctctcttactccacgctgttcaacctcgagcctttgcagaacttaagggttcctgtaccagaaaatctcgcccgctacgggaacagcagctcaaatgggagtccaagcagtgagggtcaaggatccttgttggatcagtacaatggtgtacatgatgcttcccatggcttgcatcggaagcgaaaaaagcaccctgatggtgccggcgatgatgatcatgcagatgcctatagtaacaaaatgatggaggatcactaccgtgcgatgctcagtgaacatgtccagaagtaccgaaggtcaaagtttaaggagggtgcttttatttccgatccttctcaggtggcaatcccccaaataaaacacaaaaacggtggtaaaaaagttatgaagcacattagtaatttcagggatattgcggcattaaatgggatagaagcttcacatgagtataattggatagaatgtattgaaactcatggtggttttaataagcttgtagcatccgttgattccacctatttagatatgggggataatatacactacttagttccagagggttatgataagttagcattatcccttaacctccctatttcttctgatatacgtgttgaggagcacttcttgaagggcgcactagatttgtgcaccctatcagcaatgcttggtactgaccaaaggtttgaggcttccagccatggtggattatctgaacccctgccacaatttgaatctctcaaggaaagggtaaaggtgcagaaattttctcttcaagttaccgaggacccctttgcaattccggaaggagcagctgggaggatacgaaggtctattatatcagaaactggcaatttgcaggtccattacgtcaaagtcttggaaaaaggagatacatatgagattattgagcgcagcttaccaaagaagcaaatagtaaagaaggaaccttttgtaatcgtgaaagaagagtctgaaaagacttacaaactctggcagtatcttgctactaaaagcattccaaagcatcacaggaattttacttctttgatgaagaaacgacaagtagatgcgaagcgcttctctgatagttgtcaacgagaggtaaaattcaaagtaaggaggtcactgaaactgatgagatgtgctgcaatacgtacaaggcagttggctagggatatgctgatattttggaaacgagtagacaaagagcagtatgagttgagaaaaaaagaggaaagagaagctgctgaagctttaaaacgtgaggaggagcttcgtgaagccaaaagacaacaacagaggctaaactttctgctgtcacaaacggagctttatagtcatttcatgcagaacaaggctggtggctcagcgccacctgatgaggaagatgtccctgatgaagatgaggaagaagatcctgaagaagctcaattgaaaagagaggccttgagggcagctcagcatgccgtttctcaacaaaagatgaggactaatgcatttgatagtgaaactgtgaggcttcgtcaaacttctgagtctgttcttccaactgatgattcatctagcatggatcctagtaagattgatctattacacccttcaacaatgcctgagaagtcatctgtgcaaacaccagagttgtttaagggtgtattaaaagaatatcagttaaaaggcttacaatggctggttaattgttatgaacaggggttgaatggcattcttgctgatgagatgggtcttggcaaaactgttcaggctatggcattcctgtctcatttggctgaggacaaaaacatatggggcccctttctagtggtggctcctgcatctgttgtgaataactgggctgaggagttgattagattctgccctgacctaaagatacttccttactggggcccagagaggatgattcttcgaaagaacatcaaccccaagcgtttgtatcgcagagatgctagcttccacattcttattacaaactatcagatacttgtgaatgaagagaagcttttgagacgtgttaagtggcaatacatggtactggatgaggcccaggctatcaaaagttcaagcagccagcgctggaagacattactgagctttagctgtagaaatcgtctacttcttactgggacaccaatacagaacaatatggctgagttatgggcacttcttcatttcatcatgcccactctatttgacagccatgaacagttcaacgagtggttctcaaagggtattgagggtcatgctgagcatggaggagctttgaatgaacatcagcttagtagattgcatgctattttgaagcccttcatgctccgccgggttaagattgatgtcattgctgaaatgaccaaaaagaaagaagaaattgttccctgcaaattgagttctcgtcaacaaattttctatcaagctataaaaaataagatctcgcttaacgagttgcttgatggaagtcgtggcaatctaaatgacaagaagttacttagcctgatgaatattgtcatgcagctacggaaggtctgcaatcacccggagctgtttgagcgcaatgagggaagctcttacttttactttgctgatatcccaaactcacttctttctcccccgtttggggcattacaagatgtacattatgcaggcaagagaaatcctataatctttgagatcccaaagttagtttatgatggaatcatctgcaacacagaaaattctggaagcatctgtggatttcagaatggatatttgaacagttgaagctttcttcctggccacttcatcattctttgagggactagcattttcagtaatgcgatggaataggaactacactgatgaaattatggatgcattccttgattcagaagatactgacatccagttcagtcagaatgattccacaagagttcgtgcagttgcccggttgttgctttcttctacaaaggccaagcccagcttacttaggacaaagattggaactggcccaagtgaaggcccatatgaagcactggtgctttctcatcatgacaggcttgcttcgaacataagggttcttcgttcagcatacacttatattccgccagctagagcaccacctataaatgtttcatgtgctgatcgaaattttgcctataagttcactgatgagatgtatgatccttgggtcatgaaactgttcctgggatttgctcgtacttccgagttcaatggtcctagacaaccagttgctcttcatcctttgatacaagaactcaatactgatttgcctatccttgagccgatgctgcagctaccctataggatatttgggtcttctccaccgatgagtaattttgatccagctaaaatgctcactgattctgggaagctccacaccttggatatgctactacggcgccttcgagctgaaggtcaccgtgtgcttctttttgctcagatgactaaaatgctggacattcttgaggattacatgaattttagaaaattcaagtatttcagacttgatgggtcttctgcaatctcagaccgccgtgacatggtccgagctttccagaacaggaatgatgtatttgttttcttgttaagcacaagagctggggggcttggtattaatttgactgctgctgatactgttattttttatgaaattgactggaatccaacacaagaccagcaggcaatggatagaacacacagacttggtcaaacaaaggaggtaactgtgtacaggcttatatgcaaagatactatcgaggagaaaatattgcaaagagcaaagcagaaaaatgcagtgcaagagttggttatgaaggggaaacatgttcaggacgatcatttgttgagacaagaggatgttgtttcattacttattgatgacacacaaattgcacataagttgaaagaaatatccatgcagccttagaggattgcccatgcagagaggattggacttacaatggcaactgggagtctctggat

SEQ ID NO: 9756 - DNA, 2159 bp, Zea Mays
atgttccagtcctcggtactccagtccagacatgaggatctgtatggtgcagcaccatcaggattcaggacagtagtgcggctagtgcctgtggcgaccttgcatttgccactgcgagtaccggtccaagttcttgaaaagcgattgaatgatcaattcgtcatgcgccgtgctcttgagaaagctctaggttacaagccttgtgctatccatgcatcaagtgagaactgcattccaaagccgactgaggagctaataaaggagattgcagttctcgagctagaggtcatatgcttggagcaacatctcctaacactatacagaaaggcatttgagcaacaattttcccctgcaagttctgcttgtgacatggagagcaacaagcagccagcaaggtccttttcaggcatactctctgaagctccagagctgagcttctcgaccccaaggaagcatcatcagctaaaccagtccagtcgaatggtcctggcacgcaagtccacgcctacagcttctacaagcgagactagcaatgagaagatcaatatcggacgcagccattcctcgctcctgcaccgctccgttagggtatctccgtcggcaaacaatctcgctagagctctgaaaccatgccatacttcgcctctatcttttgttgaggaagggaaatgcatggatcctggcgtggtgagtttggcagacatcttggggaccagggtcgcggaccatgttccccaaacgccgaacaagatatccgaggacatgatcaaatgcattacggccgtatacatgaggctgagagacgtccccgccgtgcagcacgccttcttcccctcaccgtgctcatccttttcttcggcgagcgggctgtcttccaaatacaccgcggacatatggagccccaggtgcaggaaagagagcttcgttgaggagtggcaggacaacgggttaggcaacggtgaatctagggagctggccctgccatatgattctgtggtagaggtgtctgctctttgcaaaggtgatcagaggtccgctgacgtgaaggatatgctgcgcaaatacatgtcacttgtgcagcttctcgaaagcgttgatctcagcgggatgaaacatgaagagaagctcgctttctggatcaacgtgcataatgcgatgatgatgcccatatagagtacgggatcccacagagtaacagcaaaaggatactgcttaccaaggtgtcgtacatcattagtggccaaagagtgaacgcggagctgatagagtaccagatcctgtgctgccgagcgcactcttctggacagtggcttcggctgctgctatacccgaaatggaagtccagggacaaggacgagctgcaaggcttcgccgtggaccgccccgagccgctggtgcacttcgcactgtcctccggtagctactcggatccagtggtgcggctgtacagccccaagagcgtgttccagcagctggaggcggcgaaggaggagtacgtccgcgccaacgtgggcgtccgcgggcgggggcagcacaagatcatcctccccaaggccctggagctgtacgcgagggacgccgggctgggcgcgcaggaggtggtggccgcggtcgagtgccacctgcccgagggcctccgggacgccgtgcgccggagccagcagcaggccggccgggcgcgcgccgtggagtggaagccccacaacctggcgttccggtacctgctggccaaggagctggtcggcgggtcccccgcgtgcagccggccgctggagccggtcagtgcgccgctgcgggctggtccgtgatccgtcatcagatcgccgtgggcccgtggccgtgccgagccgagcacgagttgagatgtgcggcggcggcacactgcgttcgggccttgggggcgttgtatgtacagagagtcagagagatggacggcgaaacagacatctgattttactcgtaccagtatgcgccctgctgtcaaactgtgaatagtgaattccgcctagccgcccacgttattgactgacgctcgagcgctgcagctgcagctggcctgctgcgcttgccctgcgcctgcacaacccgccctcgttttttttttggataaaggggagtttatttcattaagctaatgaaaaacagtgctcggtctctac

SEQ ID NO: 9757 - DNA, 1672 bp, Zea Mays
gctcgttgttcggactctcacttcctgtgtgctctcgtcgcctccgatcgaatcgtgtcgggcgggctcgtgcccgatcttgtctggtcctgtcttggctccccgccaggaatagcgcaccgagatcccttgcgcgcacggaccagcagatcgcgcgcgggagtgagagggcgacagggcgtggccgcgaggtgggcatgggatcggagggacgggtctggaatggcgcgggcgtggccgccggcagcggctatggcggcagcgtcgaggcgaaagcgaccaccgcggcgcccgcggacgttcccacgtcggcggcctccgtcgacatctcgctgccgctcccggagatgtcgcctcacatcataggtctctgcaaggagttggtcaaagggtggtcgtcgattgacagctcgcgcttctccatcgagaccgtgtctgggggcatcaccaatctattgctcaaggtttctgtcaaaggaaacaatggcaatgattcttctgttactgttcggttgtatggaccaaatacagacttggtgattgatcggaaaagggaattgcagctgcagggttcggggctcggctgcttggaatgtttgaaaatggagtagttcagtcattcatctatgctcgaacactgtcacctgcagacatgaaagaacctaaaatagcagctgaaattgccaaggagctacgcaaatttcatcaagtagatataccagggtctaaagaaccacaattgtggaatgatatattcaagtttttgaagaaagctgcagcattgaagtttgaggataacgagcagcaaaagagatatgtaaagatctcatttacagaaatacaagatgaagttaaagaacttaaggatctcttggacattctgcatgcacctgtggtttatgcacacaatgacttgctttcaggaaatctgatgctcaatgatttggaagggaagctatattttattgattttgagtatgggtcatacagctaccgtgggtatgacattgcaaatcatttcaatgagtatgcaggatttgactgtgactttaatttgtacccagataaagatgcccagtatcacttcttcaggaattatctgcatcctgatagacctagtgaggtgcaggcacaagatatggaagtgctttatgtggaaacaaacactttcagactagcatcgcacatttactgggcattatgggctcttattcaggcaaaggtatccccaattgactttgactatcttggatacttcttcttacggtatggtgagtacaagaaacaaagggactcctgcttcgccttggcacaaagtttcctctccgggctaagaaatggctagagcctgagaatctggtcaagggtttgcactgttgtacgcatactcggggcgggtacgcgttgtgatcatcgtctgctactcagaaactctattatagtggtggtagcagcctcattttgttgtatctgatggtagtttcgtcatcgcctgataggaaagtctcatgatcgccctcgggaacgcagggtggcgagatctgtacttatatttgtaataaacacaatccggatgggttctgtcctgtgcaatttgttgtgcgcataagcattccgtgtttttatacattattgtgaggaattgcataagtttttttgtttttcgattaaa

SEQ ID NO: 9758 - DNA, 1686 bp, Zea Mays
gactctcacttcctgtgtgctctcgtcgcctccgatcgaatcgtgtcgggcgggctcgtgcccgatcttgtctggtcctgtcttggctccccgccaggaatagcgcaccgagatcccttgcgcgcacggaccagcagatcgcgcgcgggagtgagagggcgacagggcgtggccgcgaggtgggcatgggatcggagggacgggtctggaatggcgcgggcgtggccgccggcagcggctatggcggcagcgtcgaggcgaaagcgaccaccgcggcgcccgcggacgttcccacgtcggcggcctccgtcgacatctcgctgccgctcccggagatgtcgcctcacatcataggtctctgcaaggagttggtcaaagggtggtcgtcgattgacagctcgcgcttctccatcgagaccgtgtctgggggcatcaccaatctattgctcaaggtttctgtcaaaggaaacaatggcaatgattcttctgttactgttcggttgtatggaccaaatacagacttggtgattgatcggaaaagggaattgcaggcgataccgtatctctcagctgcagggttcggggctcggctgcttggaatgtttgaaaatggagtagttcagtcattcatctatgctcgaacactgtcacctgcagacatgaaagaacctaaaatagcagctgaaattgccaaggagctacgcaaatttcatcaagtagatataccagggtctaaagaaccacaattgtggaatgatatattcaagtttttgaagaaagcattgaagtttgaggataacgagcagcaaaagagatatgtaaagatctcatttacagaaatacaagatgaagttaaagaacttaaggatctcttggacattctgcatgcacctgtggtttatgcacacaatgacttgctttcaggaaatctgatgctcaatgatttggaagggaagctatattttattgattttgagtatgggtcatacagctaccgtgggtatgacattgcaaatcatttcaatgagtatgcaggatttgactgtgactttaatttgtacccagataaagatgcccagtatcacttcttcaggaattatctgcatcctgatagacctagtgaggtgcaggcacaagatatggaagtgctttatgtggaaacaaacactttcagactagcatcgcacatttactgggcattatgggctcttattcagcacttgaatgcaggcaaaggtatccccaattgactttgactatcttggatacttcttcttacggtatggtgagtacaagaaacaaagggactcctgcttcgccttggcacaaagtttcctctccgggctaagaaatggctagagcctgagaatctggtcaagggtttgcactgttgtacgcatactcggggcgggtacgcgttgtgatcatcgtctgctactcagaaactctattatagtggtggtagcagcctcattttgttgtatctgatggtagtttcgtcatcgcctgataggaaagtctcatgatcgccctcgggaacgcagggtggcgagatctgtacttatatttgtaataaacacaatccggatgggttctgtcctgtgcaatttgttgtgcgcataagcattccgtgtttttatacattattgtgaggaattgcataagtttttttgtttttcgattaaa

SEQ ID NO: 9759 - DNA, 1510 bp, Zea Mays
atggcgtgcggggatggggcagaagaaaaatttagggaaccgctgcggctagcgtcagataccactcctggcgccgctgacttcctcaaccctatgcggccgacgccggcgctcgtcgccggtggacgcatggtaacaagcttcttatccgccactgaatggatgcttccgtctccggccacgcaagtccacaccatctccgtacttccctcccgtcgcgacttcgccttctccaacctcacgatgttgctcaggaatagcggcggcaacgagggagagagtggcagtactaagttccacgtagtacgggacgacctcctccacccgctcgccaacggcaacaaggcgcgcaagctcgacgccctcctgcccatcctccgccgctgcggcgttactgacatcgttacatgtgggggttgccagagcgcccatgccgcagctatcgcggttcactgtgccgaatggggaatcaggccacatatactgctgagaggcgagcaactggatgttcccacagggtataatctcatctcattgatgtttggcaatgtgacatatgtctctcggtctttgtatgcccaaagagacgagatgctttatgagcatgccataaaggttgcaggatatagtggcacagtgatgtgggcagatgaagttataggaaagggtttgggtgtagatgaggacaccactgatggaaatggttcaagaagagtgatgattgttaaggaaggggcaggtagtgttcaagcactgcttggtgtcatgcggctactgaagtatctttctggtttgacattatttagaaaggatgagaaagttcatatcgtggtagattctggaacaggaacaactgctgtggggttagctcttggagcgactccagtggagggttactgctgttatgcttgctgacacacttgaaggatataaacagcgagagagatctcttttatctgattttgagaaggttttcccggaaatctaccatggaatggtggaagatgctactcatgacaatctagttcaatgggtggagcggttttcacctagaagatttggcaaggtgctggatggtgaaatcgcaatgtgccgccaggtagctcaacagaccggtatcctgctggatcctatgtataccttggctgcctgggagcaagctgttgatatatgctgtggagacagtgaagccaaagtcttgatgatccatacgggtggcacccttggcctttttggattggcacaaaggtattcatcacagttcaacacaggcgaacaaccttaggcatgtgcaatgatgatgttcaaatgttacggtttgtgggtatggactatggaatgtgatctttgactttgaataatcaaaagtagaaagaggtggggctttgttaaaggaattggtctttatattgatttggaagctaacatcacgatgtgcgttgaaaatggccttctttgctcgtacatttagaggttgtttgggtttgggacacctccatcggtaagtgtt

SEQ ID NO: 9760 - DNA, 3067 bp, Zea Mays
gtctcgcccccacccctcacaccaccgcaccaccggccaccccctgccccgatgcagcccgacggcggcggcgcgattcgcgtgctgaacgtggcggagaagccgtcggtggcgaaggcagtggctgagatcctgtcgcgccgctcggcgcagtcgcgtgcgggccggtcccagtacaaccgcattttcgagttcaactacgccatcaatggccgcgcctgccacatgctcgtcacctccgtcacgggccacctcatggaactcgaattcgatgaccgcttccgccgctggcactcctgcgaccccgccgaacttttccacgccccagtccgcaagtccgtgccccaggacaagcaggccataaaacaaactttggaagaagaagctaggagatgccagtggctggtgctatggcttgattgtgatagagagggtgagaacatagcatatgaagtgatcgatgtttgtacacgtgccaacagtcatcttaacatttggagggctcgcttctcagctttgattgatagggagatacatgaatctgtgcaacatcttggcaggcccaacaagctctttgcagatgctgtggatgcaagacaggaaattgaccttcgcattggtgcctccttcacaaggtttcaaaccatgctgttaaaggatgcatttgtaattgatgtgactggggatgagagaagtttggttctgagctatggtccttgtcagtttccaaccctaggattcattgttgagcgtttctgggagattcaagctcatgaacctgaagagttctggacaataaattgtactcatacttcagatgaaggcactgcatcttttggttggatacgtggtcatttgtttgattattcatgtgctattagtatctatgaaatgtgtgtttcagaaccaatggcaacagtacaaaatgttaggaatcaagagaagctaaaataccccccatatccactaagtacagtggagcttcagaaacgtgcttctaggtactttagaatgagttcagagcacacaatgaaggtggctgaagaactttatcaagctggattcattagttatccgaggacagaaactgataacttctccccaaacactgacctgcatgcaatcgtacgtgaacaagtgaatcatccagtttggggagcatatgctcagcgacttctaaatcctgaagcaagactttggaggaatcccagtaatggtggtcatgatgacaaggcacatcctcctattcatccaaccaaattttcagaagagattgtatgagtttgttgtccgacatttccttgcatgttgctctcaaccggccgttggagctgaaacaactgtggaaattgacatagctggtgaacagtttaatgcatcagggcgtgtcatacttgctaaaaattatctggatgtttaccgctttgactcatggggtggaacgttacttccaacatacaacattgggcagcagtttgttccgacaactttaacacttgattctggagtgactcggccaccgcctcttctggctgaagccgaccttcttagctgtatggataaagaattggcactgatgcaaccatgcatgatcacataaaaaagttgcttgaccgttgttatgcaaccaaagatgaaaacacacgtttctccccgacaaatcttggtgaggcattggtgatgggttatgatgaaatggggtgagttgactcttaaagttgctgcacttactgaatatataaaggatgatctggttgctttgctcaaacactactttttaggtatgagctttggaagccttatttaagatcaatgatggaagctgatatgaaatcagttagcgtgggtactaagagtaaatcagaagtacttgagagttgtttgcagcagatgaaggcctgttttcttgacgcaagggtgaagaaagcaaaactccttgatgcaatggggacattctttgcaaggcctataaatgaaactcaaaatccagtagaggttgtgaggccttgtggtgcatgcaatggatctgaaatgttgcttaagcgaagggcgagtggtgaatttatggttgggtgccgaagttatccacaatgtagaaacgtggtatggctcccaggatctctttcagaagcggctgtaactaatcaagtttgtcctatctgcgcaccaggtcatcttagagtcccatttgttgaccctgatttatgttggttattgtttagttttcccattgccattccgctcaaattgtatggcaactctaccacacctacaggccctgtttataagattcaattcaagttccgtcggagggatattccaccaaatttcgatgttgatcacctaggttgtgttggtggttgtgatgatatcctcaaagaccttatggagataagtaggtttggaagtcgcagccaggctgcaacaccaggtcaagtgctgtgcacctcatgtggagcgctttgcatatcacgaattgctaatacagaggctaacagggggaggaggttctacaaatgtcaagatcctggctgtggcttcttcaaatgggaagacgaagtggacaatggtacggggagaggccgccgtgggcgcggcagcagcaggcaggcgtctgcgtctgcatctgcaggacggagaggcggaggccggagaggcagaggccgtaacgctgacggcgggatgttcgtttcagcgacgggcgacaccgtgctcggctgctgctttaactgcggcgatccttcccacttcgcaaacgcctgcccgaaccggagatagttatcagggagctgctcgctatgcgtgtacagagactggcagcgtccgccaaacgatgaagccttcggatggttttcgtgtactgaggtgcatataagtgcacctgacaagctcattttctagacaattactaatatttttaaacaaaatgcagctattaggctgatgctagttcagcaaatctgacggcacttatttacaaaagttagggcgcgaaaaactgacaaaggaagagatgcaaacacgagctgatctactaaggtttcgataacaagtttctactcatcgt

SEQ ID NO: 9761 - DNA, 6515 bp, Zea Mays
cttgctatttttgcacccaatcgcccccgcgtcgcatccgcgcctagagaggagagccgccattccccgggccccatccgcagcgacccgccgcgcccgaacccgcgattggtcgacgccggttcctccttcaccgcgtcgctcgcagcaggcccccgccccgacaaattcccccattcccaaatcgcccgcgaactccccgccgcccgccccgcatcatcgacctggtcccgccgccgccgccgccgctcgccgccgtacggaatctcaggtaccccgtcgccgcgcccgcgcccgccaccctcctggcgtggtcctgccgggcttctagggtttcgggcgggccgaccctagggggtctgcaattcgcgggccgggctccacgccccgcggctcccccccgcgcctcggtcgccgatcgccgccatctgcccccgcgcggccctgggcggagcttccacacgctggcctgcctactacatgcggcagctgccacactgctgctcctgctcgatcgggactcgccccgcctcggattccgcgcaggatagaccgtttcctactaccgcgctgccgcacgtgggatgacctgaccctccgcctgcccccaagatgaatgtgggacatgctgcccacctgtccgggcagacagcgcacatgaatcaagttcctggctccggtgttggcattggtgttggcggctcagacgggctaccgcagcaccagccaatgcaggagatggcggcgctctcaggaatggaccagcagtttgtcatgcttcggaccgctatgcgcgacaagatatctgactatataggaagaaaacagtcaccgggtgattggcggaaacggttgcctgaactggcaaaacggcttgaggagatcttgtacagaaaattcccaaacaagcatgagtactacaatatgatgaagggaccagttgagccacaattgcaatttgctatcaagaccttgagtgctcagaaccaacacaatcaacaaaacccacaaatgacaaggcaaatatcatcgtcctctagctatggtgctatgattcctacccctggtatgacgcaaggcaccagtgcaggttctaggactccttatgtcacggagaccaatgctctttcatcgtctggtgcatgcatggttcctcagaatgctaacatgggtacctcaatgcaaggtccaatgtctaacgggtaccagcatttaaataccaacatttcacaaaattctaccacaaataatgtcgaatctacaatgggttcagttggcgttcagcgacaactatctcatatgatcccaactccaggattcagtaatcaacagaatgtaccttcaaatcctgactattcaaatggaactggatacttcaacggtgagtcagctgtggcgccacatatgcagcaccagaaacaatttcctagcaaccacaatagcaatcaaattcaacatattgggggacacaataattctgggatacattcaagcttgctggacaactcatctgcctatggtttatcagatggccacatgaatggtggcataggagtgcatgggtcaaatatgcagctaacaaacaggactactgccccagaagcatatatgaacatatcctcttatggcaattcgcccaaacctatgcagcagcaattcaatcagcaccctcagcagagaataccgattgatatggctggttccggcagcttttatgctattggctctacccctttaaccacagcaaatagtcagagcatgaatgttgcaaatttacaatctagatcaagcatgaatcagatgttggtttccaatcagctaaacattcagtccgtccagcaacagtcccagataaaaaatgggcctttggatcaaacagagaaggtgaattttcagtcaacacagctgactcatgatcaactactacaccagcacccaatgtcgcagcatcaggtgcaacctaattcccagtttattcaaaatcagtatcatataaatcagcagcagccaaattcacagcatcagcaggctatgttaaggaacaattcccttaaacagtctcaaatggcttccaaccattcaatgcaactgccagaacaggggactctgccacacactgaactagtttcttcacaagctagtgatcctgctgaccttccaaacttccagggtcaataccagcaaagaaatgctcttgacaatgttaaaggagggcagatgcttggtcatctatctagctctcaaaattttcttccttctgcctcacatggttctcagcaattgttgccctctaatccgcagcttgataacggttcaaatgctgtaagttatgtgctgaaaggatcacagacagagcaaatgctgctttctcaatggcagccacaaacaatggaaaaggctcctgtcgctactaattcatcactcgaaaaacaagtacaagaagattgttgtcaaagaataatgtcacaagatggagtacagcaaccattttcatcagattggtgtctttctaatggcactctcgcttctgttgatcctgcagtgccaaaacccacagctggagggtttgggcaggtcaagagaaatattcattacctccgtcagataaagtggttgctgttgctgtttcatgcaaaaacatgcacataccctgttggaagttgtaagttcaatggttgtgttcaggtgcaggagcttttgaaccattttcagaattgtcaaaggaaagattgttcgtacaggagttgcactaagtcaaaagcaatgtctcaccattataaaacttgtgtcgatgagcaatgtcctgtgtgcagcgttgtaaggaagtttttgcgccaatcaactgaacaggcatctaagcaaaaaactcttgagtctagaaaacttgctcaacaaaatgtgcctcagagaatcatgaacgggatagaaggtgatagaatggatgttgatccaatgtcagctgaagcgttcgaggatcaaccatctgttccaaaacgtttaaagatgcatcttccatcactcagtggcccagaaaatgatatctctgtagtctccaatcatcatgtaaacccaggctttctattgcaggaagcacagcctgagcagcttgagcacaataataggacaacatatctgaaacgagaggtagatgcaaaggctgacattcgggctcctcaaaagcccataaaaataagttatgacattgatgaaaatgtgactacatcaaggcataatgtgattcctggtgttcccagtgagatggactctcatatcaagcaagaaaacttgtcagttaacaaagagacaagtgaaactgcccttgaggttaaaaatgaaacaaatgatctaactgatgcgactgtgactaaatcaggaaaaccaaaaataaaaggtgtttctatgattgaattgttctatccagatgaagtagatgtacatattgacagtctaaagctgtgggttggtcagagtaaggctaaagctgaaaagaatcaagctattggtcattctgagaatgagaactcttgccagctctgtagagtagagaaacttacttttgaacctccaccaatgtattgttctccttgtggagctcggataaagcgaaacgcaccatactacgctgtaggtactggtgatacacgccactatttatgtatcccttgctacaacgagtctcgtggtgagactattgaggttgaaggtcaaacatttccgaaggcaaagttagagaaaaaaagaaatgaggaggaaacggaagaatggtgggttcaatgtgacaaatgtcaatgctggcaacatcaaatttgtgctctatttaatggaagaaggaacggtggaggacaagctgaatatacttgcccccattgctacgttgaggaggtcaaatgtgggctgcgcaaacctttaccacagagtgctgttcttggggcaaaagatttgccaagaactgttcttagtgatcatatagaagatcggttatttaaacgacttaagcaggagaaacaggaccgtgcagctgctgctggcaaaagtattgatgagattcctggagcggaaggacttgtggtcagagttgtttcatcagtggataaaaagctggaggttaaaccacgttttttggaaatttttcaagaagacaactaccctacagagttcccttacaagtccaaggctgttctcttgttccagagaatagaaggtgtggaagtatgtctatttggcatgtatgttcaagaatttggtgcagaatgctcttccccgaaccagcgccgtgtttatttgtcatacttggattctgttaagtactttagacctgagattaaaacagtatccggagaggccttgcgtacatatgtataccatgaaattctgataggatatcttgaatactgtaagctgcgggggttcacaagttgttacatatgggcttgcccacctttgaagggtgaagattacatcttatattgccatcctgagattcaaaagactccgaaatctgacaaactgcgtgagtggtacttatcgatgcttcggaaagcttctaaggaggaaattgttgttgagctgacaaatctatatgaccatttcttcatcactatggggggatgcaaggctaaggtgactgcttctcgcttgccatactttgatggagattattggccaggagctgcagaagatatgatcaatcaactccgacaagaagaagatgaccgtaaacttcagaaaaagagtaagacaaagaagattattacaaaaagagctcttaaagctgctggccacaccgatctcagcgggaatgcttccaaggatgctatgttgatgcaaaagcttggtgaaaccatatatcctatgaaggaagatttcattatggtccatttgcagtattcatgtagtcactgctgtacccttatggtgtctggaagacgttgggtttgtcatcaatgcagaagtttttacatctgtgacaagtgttatgacgcagaacagcaacttgaagacagggagaggcacccgtgtaatagtagagacacgcatatgctccatccggttgatattgttggggtgcccaaagataccaaagatagagatgacatcttagaaagcgagttctttgacaccaggcaggcattccttagcctttgccaaggaaatcattatcagtacgacacgcttcgccgcgcaaagcattcgtcaattatggtgctataccacctgcacaatccaactgcgccagcatttgtcactacgtgcaatgcctgctgccatgatatcgaaactggtcaaagctggcggtgtgagatctgtccagattttgacgtgtgcaacgcttgtttccaaaaaggagcggttactcatcctcacaagttaacgaaccatccatcagctgctgaccgtgacgctcagaacgcagaagctcggcaaatgcgtgttcagcagctaagaaagatgctcgatctcctggtacatgcgtcgatgtgccgctccggcagttgccagtatccccactgccgaaaagtaaagggactattccgtcacgggatgcagtgcaaaacccgtgcttcgggaggatgcgtcctctgcaagaagatgtggtacatgctccaactccacgcccgggcttgcaaagattcagagtgcaaagtgccacggtgcagggatctgaaggagcatctcagaaggttgcagcagcagtctgattcccggaggagggctgctgtgaatgagatgatgaggcagagagcggcggaagtggccgcaaactgagtagctgcctctgtacaggggtatatatctttgtggaaagaggataggaagtacgcagggcaacaagaaagattggggcggttgaatttgaagggggggattggttggtgaagacgaagcgcttcaacgtggatttcttatcctctgccccgtcgtcctccaaagagctcaagaaggcacaccattactgatgttaggcagtgctaaccagccacaccctgctcacgttgtctcctcaacccttgggggtgtggtgaattctttgatttgacctggtggtgctagctgggctgaagtgagctgatctcctcgtcgccgggtgtctctggacagtgccagccgtgtagttctgctgagacatttggttagccgctgatcttccccctcaccactctcctctcgtctcggtccaggatagataggagggtataggttaataaaagaaaaaaaagggtaaatagggacgggcgtttatttgtttatttctgcccccttctcccatccattttgtaggactcaaccttgataaaagtgtaaagcaaagtaatctctccatgtcttctcttgttccagtgctgctccatagatcgttgttgaaagtgcaggtggcccaggagggacagatttctgtgtggtatctcggaagcatgaatcatgtggactatctataggattcatgcttccaggtagtgtgatgctttgtgcccacattcctggcaaaggagatttttttttgggaaacagactac

SEQ ID NO: 9762 - DNA, 828 bp, Zea Mays
cgagactcgagtgccctctctgcctataaatcgaaccctaaccctttttcgtacctgtttgtgtccttagggtttagggttctctgctcattcgttcgccacctcgccccaagacgtctcgctagggtttcgccacagccgccgccatgcctcgccgcaagcttaggtccgcggctcacgcccggctccacatgctgctccagtgaggaacccaccacagcctgcgcgctaggctcgtcctccagctcctgttcgtgatggtggtggtggctccattcttggaggaattgggtccaccattgcttaaggtatgccatttggtacgagtagtgccatggcacacagggctgttgatgctgtaatgggtctccggactgttcggcatgagattgttatctcagaagctgctgctgctgcccctcctgctccagtgatgaacgctaatgcttgcagcatccattctaaggctttccaagattgtcttaacaactatggcagtgagatcagcaagtgccagttctaccttgacatgttgaacgagtgccgccgtggtgttgtctgcctgagcttttgctccaattgggattattcatggattctcttttcactcccatgtatctcattaataagacaccgtgaaacttttaaccctctccacgaatgcaccatggcatcacgggttcatcttgttgaatctgtggttacgttctctttatcctgtgttgttggaacagacttctgtctcttctggtgatcataaatatttaaatgaaccagttgtgttggaaaatgttgttttcttttgtctctagactggaaagcggagtt

SEQ ID NO: 9763 - DNA, 1491 bp, Zea Mays
ctaactggactacaagtaacaaataatgtgcctcttgtctttattcatcccttcttagattgattcctacagttaactgctattttcatcatttttgctggtggaagatgtggttgagcttgctttacagtattttggttttgttagcttgtgttgcatctctctctctacatttattatgtgttgatttttgagttaaaactttgtttatgataaaccatgttgctttctttggttaattttttttgcttaatgcttattcccccactgtactgtcaggaaggtccgcggctcacgcccggctccacatgctgctccagtgaggaacccaccacagcctggtaaagtgattcacgcagacaataagtatctttagaactgacattggcatggtaatcatgcctcttttgactctgcagtattctattgtggacatgtgtttcaattatgtaactttagttatatttttgtataactgtttgctcagttgttgagaatgtgttcggtttgttactataacaatgttgatgacataaatatactgttaagtttatattggaatttgtggtacaagtctgaagttgttgattgtgtttgaagcagagtcaatggcatttcggtttatatagagaattacagttccttgttttttggtagaactggaacctgtttcagttctgttcctaatgcttacacatgggtttgtgctacaagtatagtattagtattacagagctcattgttttggaatcttgattgctttggaatcagaatcgtttatgtttagctcatattagtattagtattacagctcattgtgtttatataggagttttaatctgttctatttctgttcctaagtgtcttctgacttttctttttggcagcgcgctaggctcgtcctccagctcctgttcgtgatggtggtggtggctccattcttggaggaattgggtccaccattgcttaaggtatgccatttggtacgagtagtgccatggcacacagggctgttgatgctgtaatgggtctccggactgttcggcatgagattgttatctcagaagctgctgctgctgcccctcctgctccagtgatgaacgctaatgcttgcagcatccattctaaggctttccaagattgtcttaacaactatggcagtgagatcagcaagtgccagttctaccttgacatgttgaacgagtgccgccgtggtgttgtctgcctgagcttttgctccaattgggattattcatggattctcttttcactcccatgtatctcattaataagacaccgtgaaacttttaaccctctccacgaatgcaccatggcatcacgggttcatcttgttgaatctgtggttacgttctctttatcctgtgttgttggaacagacttctgtctcttctggtgatcataaatatttaaatgaaccagttgtgttggaaaatgttgttttcttttgtctctagactggaaagcggagtt

SEQ ID NO: 9764 - DNA, 2456 bp, Zea Mays
cggcgaccgggacgggacatatagtggcacgctcaatccaggatagtagatttctgctgtggggcaaatgattttagccgtcttatgaaagaaaaactcgacaaagttcagaagaagtgccatttcaagaattatgatcttatccaaccacagaatcgcttctgctttgaaaagagggattggatgactgtgcagccaaacgagctgcctcatggatcccaactaattatgggtcttaatcctccttttggagtcaaagcaagtcttgcgaacaaatttattgacaaagcattgacattcaagcctaagctcattgtactaattgtccctaaagaaactaaaaggttagatcagaggagaacaccttatgatttgatttgggaggacagtgagtgtctttctggcaagtccttctatttgcctggttctgtggatcttaatgataaaatagttgaagggtggaatgcatctgcgccacccctctatttgtggagtcatcctggttggacaaagaagcacatgcaagtggctgaagagcatggtcatacttgtatggggaagatagcttgccatgttgaagagagtaatctatcagatgacctgtccgtgaggaaacaatctgatgctacaaacaaactgaactcgagatcagggaaagagactccattcaatgacagaatgtccaatctacttgatgatggttctgctaggaagcaagcaagatctgaagaagagaagagaactctagggaagatagaacaccatgtgaaaaaggctaatataccagataacctcccagtgaagaaagaacctgaagcttccagcaaagtcatgtcgcattctggaaaagatagaaagattggcagatacaacaggaggagacatgacaacaggagcagcaaggggacacctgatcacacagagagcctcccccctgaaaagcaagtggaagttgcatatgaggaaacaagagttattcctagcaaaaagattgctcataatgaaaaaaagagcgcgcagtacaactacgagcaaactgcagcagggatgccaaacatgaggtctagaggaggggattctgacatgagtatctcacccccagtcagttgcaatgctcgaagcaaacccatgagctattccctgacgagaccaattgaacacttggatacgaatgctcaccttttggcagaagaacctagtgactctgtgctcaatagggttccaaatcatgacagttatttggcaatcaaagaggaatactgtgatggatttaagaggaaaaatgatcctatcttcagtcacattgatgatagctcaaggatgaggggctccagcatcgaagaagtgaccaagccgtatattactgctccaaacagtgatccgtggtctaaaggagatggcagcttttacaggcatccgagctcagaagatttaaacgctaatgctgatgtgcttatgccaggatacagtgcaagatatggacaaattggtggtgacagtaacccacaagctagtatggtcccactagcaacagattcaagactgcatggtggaacggttgctgataattacctctcggcaagatactcccttggatcttcaggtgctcgcgttagccaaccagctccaactgttcccccttttgggctctcaggtgcaagttcacaacgaggctcagtaatggacaggtattcgtatgggctttcgggtccgactggaacacagcgctcagttattgacaggtatgcgccgtccctcgatggaacgaacacaacaagatcgaggagctccttgcctgagcagtacccgttcggacaacctggctcttccggtggcgggtggcctcatcactgatcgctggaacttggtcctcagatttgaccagcaaaagtgcaaccgatttcttgagtccggtggagcctacaacctatctacggcctaactttttggatcctactagtcgtttcttcctggcgccttcgacgaagacatcacctgtgtctaccaatacagaagtgtagacttcaattcctacaaatacagaagtgtaggcttcaatcctattgtttgctctggatttctgtttatgagcgtatttacaagagtatgtttggtctatgttagtatattaggaatacaattccaaaaccgttgtaccgtgccaaagtttaatactatacgtttgggtctgtcgatgagaaaaaaggacgagtgggtgagaagatgctgccctccgcagaactcgatcaggccggttcctctgcgcgtcctgctatgagaggctaacctgagcccgacagaaccggcttggtcgatttgggacctggtaggccggtatttttttattgaagtgtaactttctaaattaggtcttgttggtttgcgttggattgcgtccggaatcgtttcaagtttatataaattagagaagcaatccggttagaaatcgtttcgat

SEQ ID NO: 9765 - DNA, 1266 bp, Zea Mays
ctacagaccacaagttagccgaccccgactgtcattcgcgagcaccgccgccgctcgccagaatgacacttcgggtgatcctctcccgcctgcgcctcacccctctcatccacgacggccaccacctgcgacgctctctatccgccgccgctgccaaactacctgacgagttgcctcctggcgcgccggcgccaacctccgactccaggctcttcgtcgcagggctgtcgtggtccgtggacgagcgctccctcacggacgccttctcctccttcggcaccgtcaccgaagatggtgcacagtgtaggtcttcggctaaatgccgtggaggccgtgagccactccatcgcccccaggcctgcagcctgttcgacgaaattcctgttagggacgtggtcacctgctcagctgcaatttaccgacatgcgaggagcgggctgttccatgagtcagctgagctgtttgttggcatgatgagggcagttagaataatgtatgacaaaaactctggaaggtcaagaggctttggatttgttcatttctcaaatgataatgaagctaagtgtgccaaggatgctatggatgggaagcatggaccggtattaattctacaggtaatgctagggcggccattgcgaataagttttgcccttggaagagttcgtggcgcatcagttattgttcctcgactttctacggtgaaatgagcagaagcattggtcgtggcatactggcatggaccgatggacatatcaggagggttgcgaagtacccatataggctagtgtttttaatcttgcaaggtagggatcttagtcgaaggcgcctggcaatggcgtgaagggcagcgtggcaaagaagatgatggctatgtttgtcgccccaatttgctcgatgttgaagcatttcacgaggtgcattgtagctttgcagccacctcgtgtgaggccgccttttcgaatgtctcgtttgatgtgtgtgagtgagagagagagactcttcttgaattgattcatgtcaaatgtatccagtaggggcttttcgccccctcctgtttcataaaaaaaaatcatgtaaactgtaaatttgtggtggcaaccgtcactacgcactagtacaacgcagttaaactgtcttcgattcttcatgtcgaagtgaagcatagctacatccgatttttaggatgcagggataacctcctttctctttctggcggcacagcaaggggcggctgcctgcctttgttgcgtagtcgtgtcgtctagg

SEQ ID NO: 9766 - DNA, 2199 bp, Zea Mays
tggcggtggtggtgtggtgctgtcccccctgctcctgctcctgcctccggggcgcggcgccttcccgtctcccttcctcctcctctcccaccgctcggcctcctccaccacacgcgctcggcggtgccctccccggcgcggcgccgaaatgcaggtggggcctcgtcggcttcccgcggctgcgacgggccggagcagctaacgccgcggcctggggctgtgatctggggccgcgccgcattgccgactgcctgccgccgggctcgcgcgcgcagttcctgcctgccggtggcgaggggaggcaagatgcggcatctcgctctcctcgcgcttcttctcgctcccgttctcggatccacaggcaccactctgtccccttctccggccgccactgattctcctgcaaaccaaggacaggcttctagtcctcctcaatctgcatttgctcttggtccagtagctgttccaactgcgccgaccactccatcggcgagtccttccccggagaaagccgcggctgtaagtcctgctgctcccacggagccacgaattgccccggctccagtggctcctcctaaagtccctccttatccaccccctgcatcgccccctccggcaaatggcattccaccatacccaccttcaggaaggtttcctgctattcctcctgccacttcagtcccacctccagccacatcacctgttattgcacaagcaccacagcgacgagcagatcctccaagtagagattataagaacggaaacgcagtgccgccagcaaatacttaccctcctacaaatctcaagaagcatcatgttccacatgcatcccctccaaagggatccactggtcaaactgtcccaggtcacaaatcaccagttacaggatctgcgcctgcaacaagtcctttgccccagaacacaaacatgccttcaatcccgaagaatgcttcatcagtgccacatgcccatccctcaccaccaagtatagctccagaattggcacccactggtagatctcatgctcagggatggaaatccagtaatcccaataacaaaacaaatagattacatgccccatcttatccaccgcctcgtgctcaagggcccgaggtctcacgaaccccaagacagactgggactaaaaactatactcaccatgcgcctccaccattccctcaaggacaccctagctttcctgtacactccccatccccttcaccagcctcatcgaggggtcctgcgaacgcgaagaaaagaaatcatatttctcctactcttccttcaatccctcccctaccagagccaaaagcaccgtcagcgcatcctatttggacattacctccaccaccacctaattcagattgcaattccttatcatgcccagagcctctaacagatccacctgcgggagcaccatgtgcatgtgtgctaccaatcagagttggaattcgtctaagcgttgacctttactcattttttccattggtctctgattttgctgaagaggtagcttcaggggtaaacatggcacagaggcaggtccgtgtaatgggtgcgaacgttgcaggtgatcaacctgacaaaacaatggttcttgttgatctagttccagtgcaagtgaagttcgacaatgctacagcattttcagcatttgaaagcttgtggagcaaaaaagtttctttaaaaccatcagtctttgggaactatgagattctctatgttgtatatccagggcttcctccttcaccaccttcagggcaaggtgttggggatggggcgtttggcaacaacagaaatgcaagggccgtgaagccccttggggtcgatctctttgattcgtagcagaataacagtaacttttctccaatgaagtagtgccactgttgaaattcatcatgaacttgtagtctataagcaagttttttttatttggtatcctttccaaggaaaattccattgcttatttgaaatgccagccaacagtgcttgcaatgacttttcagttaaaaggctttcgtttcagtttctgcatcgtgttatgtgcccttgctagaataatatgcacagtttaggcagtactagttttcgttctgaccagtgttttaaaggtgtcgcctaggcgtccaggcgtctcagtcgcctagctaaatcagcaagagggcagaggggaagaggaaggggcggtgccgaatcggg

SEQ ID NO: 9767 - DNA, 2528 bp, Zea Mays
tggtgctgtcccccctgctcctgctcctgcctccggggcgcggcgccttcccgtctcccttcctcctcctctcccaccgctcggcctcctccaccacacgcgctcggcggtgccctccccggcgcggcgccgaaatgcaggtggggcctcgtcggcttcccgcggctgcgacgggccggagcagctaacgccgcggcctggggctgtgatctggggccgcgccgcattgccgactgcctgccgccgggctcgcgcgcgcagttcctgcctgccggtggcgaggggaggcaagatgcggcatctcgctctcctcgcgcttcttctcgctcccgttctcggatccacaggcaccactctgtccccttctccggccgccactgattctcctgcaaaccaaggacaggcttctagtcctcctcaatctgcatttgctcttggtccagtagctgttccaactgcgccgaccactccatcggcgagtccttccccggagaaagccgcggctgtaagtcctgctgctcccacggagccacgaattgccccggctccagtggctcctcctaaagagtatagtgcacctcctccagttgaggttgcacccactgatcccaccgatgaggttcctccaccagtagctccaccacaagctgcagttggaaatcccactccaattcttcctgggacacctgcattgctaccttatgttcaggctcctgctccatctgtcgttctcaagcctaatccaccagtcgtggtgtcacctccacctgcgaataatcaaccaagtaggccggttgggtctgtccctccttatccaccccctgcatcgccccctccggcaaatggcattccaccatacccaccttcaggaaggtttcctgctattcctcctgccacttcaggaaacgcagtgccgccagcaaatacttaccctcctacaaatctcaagaagcatcatgttccacatgcatcccctccaaagggatccactggtcaaactgtcccaggtcacaaatcaccagttacaggatctgcgcctgcaacaagtcctttgccccagaacacaaacatgccttcaatcccgaagaatgcttcatcagtgccacatgcccatccctcaccaccaagtatagctccagaattggcacccactggtagatctcatgctcagggatggaaatccagtaatcccaataacaaaacaaatagattacatgccccatcttatccaccgcctcgtgctcaagggcccgaggtctcacgaaccccaagacagactgggactaaaaactatactcaccatgcgcctccaccattccctcaagaactgctggattccacaggaaatcatatttctcctactcttccttcaatccctcccctaccagagccaaaagcaccgtcagcgcatcctatttggacattacctccaccaccacctaattcagattgcaattccttatcatgcccagagcctctaacagatccacctgcgggagcaccatgtgcatgtgtgctaccaatcagagttggaattcgtctaagcgttgacctttactcattttttccattggtctctgattttgctgaagaggtagcttcaggggtaaacatggcacagaggcaggtccgtgtaatgggtgcgaacgttgcaggtgatcaacctgacaaaacaatggttcttgttgatctagttccagtgcaagtgaagttcgacaatgctacagcattttcagcatttgaaagcttgtggagcaaaaaagtttctttaaaaccatcagtctttgggaactatgagattctctatgttgtatatccagggcttcctccttcaccaccttcagggcaaggtgttggggatggggcgtttggcaacaacagaaatgcaagggccgtgaagccccttggggtcgatgtaagaagtcccaagagaaaagtgaatggcagcctcattgctattgttgttttgtctactgttatagcattgattatttgctgtctggctgcatggtcgctaatcctcagattcaggggtccgagccacacagctcggggatttccacatactgcacttccaaaattttctaggtcatctggtacgtgtaactaacctgctaattttctgataattgcaccttgatgtgatgtaattggactagctctttgattcgtagcagaataacagtaacttttctccaatgaagtagtgccactgttgaaattcatcatgaacttgtagtctataagcaagttttttttatttggtatcctttccaaggaaaattccattgcttatttgaaatgccagccaacagtgcttgcaatgacttttcagttaaaaggctttcgtttcagtttctgcatcgtgttatgtgcccttgctagaataatatgcacagtttaggcagtactagttttcgttctgaccagtgttttaaaggtgtcgcctaggcgtccaggcgtctcagtcgcctagctaaatcagcaagagggcagaggggaagaggaaggggcggtgccgaatcggg

SEQ ID NO: 9768 - DNA, 1821 bp, Zea Mays
gctccttgctgtgtgatcgatagatgtgtgtatatatgcacatacatgcatggttaattaagttgcaacgacgacgacgaccatggagactgtgttcaagtggagagcaagaacaggaggcggagtctcgctgatccatctcctcgtccggtgttttgcagtgtcagctgccatcttgctgctggcagatgggaggcatgctgatgccgtagatcccgccgcacccgtggagatacagcagacaggcagcagcagcgaggtggccgacgagcagcagtggcggatggtgaggaccagggggaaccagttcgtcgtcggcgacgacgacgaccacaggccgttttacgtgaacggcttcaacacgtactggctgatgatcctcgccgtcgacccgtccaccaggggcaaggtcacggaggtgttccagcaggcggcggcggccggcctcacggtgtgccgcacctgggccttcaacgacggcggctggagggcgcttcagaagtcgccgtctgtctacgaccaggatgtcttcaaggcgctggatttcgtggtgagcgaggcgaggaagtacaggatcaggcttatactgtcactgatcaacaactgggacagctacggcggcaaggcgcagtacgtcaaatgggccggggacgacgccgccgccgacggcggccgcctcaacatcaccgcctccgttgacgatgacttcttttccgaccaaaccgtgaaggtctacttcaagaaccacgtcaagaacatgctgacgagggtgaacacgtacaccagtgtgatgtacaaggacgacccgaccatcttcgcgtgggagctcatgaatgagccgcgctgcacgtcggatccagccgggaacaagctgcaggagtggatccaagagatggcgttccatgtgaagtccatcgacccggaccacctgctggaagttggcggcttggcgcagagggcttctacgggccctcgtcgccgtcacggcttccggccaacccgaacgcctatgctggccaggtcggcaccgacttcatccgcaaccaccgcgtcctgggcgtcgacttcgcctccgtccacatctacccagacacctggatgccgggcgcgactctggaggcacggctctggttcgtggactcgtggatggaggcgcacatcgccgacgccgacggcacgctgggcatgccggtggtgttcacggagttcggggcgtccaccaccaaggcccggagcggctgcttcaacgcgaccacgagagaccagttcatccaggcggtgtacgcgcggctcctcaactccacgcggcgtggcggcgccggagcgggggctttgctctggcagatgctcccgctggggaccgactacatggacgatggctacggcgtcgtgcttcccagggcggcggccactgcccggatcatctcggcgcactccagggacctggccattttcaactcgaggtgcgcctggagctgccgctgggggtgcaggaggcgggggcacaagtcggaggatcctgatgttgatgatgacctgccgctcgtcgaggataaacaacgagaagcatagaattaatactactaatgagagataaatggccgtgcgttgctacggagcaaaaatatttaaaaatgttgatagaaaaggcatatagataactctatttcatcatacaattgatacaaaagtagcagttaaattgccaatgacatgtgatgctaagcatcaccactctaggagaccactctaggagatgtccaaatctcagaattacctcgtctcaaataccggaaggtgtagactggattatagcctttt

SEQ ID NO: 9769 - DNA, 961 bp, Zea Mays
atggtatggaagggtaaaaaattgcatctgagaatggattcgaacatttacgacaaaaaaaagtgggcatcattattatattgcagtgtgaagtccaccattgagaggtacaagaaggccaacagtgacacctccaactctggcacagttgcagaagtcaatgctcagcactaccagcaggagtcctccaagctgcgccaggcgatcgatagcttgcaaaacgcaaacaggaccatagtgggagattcaatccacaccatgggcctcagggagcttaagcagatggagggcaagctggagaaggccataaacaagattagagctagaaaggagatggatctgcagactgacaacatgtacctgaggagcaagatcgccgagaataataatgaaacggggcagccagcgatgaacatgattggagtgccgtcgacgagcgagtacgatcacatggcctcttttgttgactcgagaaactttcttcaggtgaacatgcagcagcagcagcctcagcactactcccatcagctgcaaccaacgaccctccaactcggatgatgaaattaagaatcttcggccaacaatccatgcacgcaagcacgcagtaaatcatgtgtgtccaactcagataaaaaaatctactctagcgtttgtataattattaataatcgtgactagtaaactgttatatatatatgtatagccatgtgtgtggtggcgcctacatatatgtcatgtggctgtacggcgagtttttttttcacaagcgtttgcagcagcatttggtgttgctcatcgatcaattaatcgcaagaaattaaacttgtcaccactgtgggtgtacgtgttaatgcagttgttgtatctgttaattgtaccctccatcagataaacgcgggtgcgcgtatgcatacttatttatgtgtatgattatttgtgtggtttatatcgccagtacgtg

SEQ ID NO: 9770 - DNA, 1384 bp, Zea Mays
gggtgctgctaactgcatcaccggcctcacctcacataccttcccctcccttcaccaccaccacctttaatacctcaccctcctctcctcttccccttcccggcctgctcctccccggccctcacatcctctttcagttccctctctggatctcttcctgaagagaggcactgccacaccaccacgccacccatgctcaacatgatgaccgatctgagctgcgggccgtcgtccaaggcgaaaggagggcagccggcggcggcgccgggctccggcggcgacaggcaggggaggggcaagatcgagatcaagcgcatcgagaacacgacgaaccggcaggtcaccttctgcaagcgccgcaacggcctgctcaagaaggcgtacgagctctcggtgctctgcgacgccgaggtcgcgctcgtcgtcttctccagccgcggccgcctctacgagtacgccaacaacagtgtgaagtccaccattgagaggtacaagaaggccaacagtgacacctccaactctggcacagttgcagaagtcaatgctcagcactaccagcaggagtcctccaagctgcgccaggcgatcgatagcttgcaaaacgcaaacaggaccatagtgggagattcaatccacaccatgggcctcagggagcttaagcagatggagggcaagctggagaaggccataaacaagattagagctagaaagaatgagctcttgtatgctgaagttgaatatatgcaaagaagggagatggatctgcagactgacaacatgtacctgaggagcaagatcgccgagaataataatgaaacggggcagccagcgatgaacatgattggagtgccgtcgacgagcgagtacgatcacatggcctcttttgttgactcgagaaactttcttcaggtgaacatgcagcagcagcagcctcagcactactcccatcagctgcaaccaacgaccctccaactcggatgatgaaattaagaatcttcggccaacaatccatgcacgcaagcacgcagtaaatcatgtgtgtccaactcagataaaaaaatctactctagcgtttgtataattattaataatcgtgactagtaaactgttatatatatatgtatagccatgtgtgtggtggcgcctacatatatgtcatgtggctgtacggcgagtttttttttcacaagcgtttgcagcagcatttggtgttgctcatcgatcaattaatcgcaagaaattaaacttgtcaccactgtgggtgtacgtgttaatgcagttgttgtatctgttaattgtaccctccatcagataaacgcgggtgcgcgtatgcatacttatttatgtgtatgattatttgtgtggtttatatcgccagtacgtg

SEQ ID NO: 9771 - DNA, 1725 bp, Zea Mays
agaatttttctatggacacacgaagagtccgcaaaaaataatcaactcgttttttttctttctccgctcctccgagtgaccgagtccaaggcttcgttctgctctccggctctcccgcatccaccccgtctcatccccaatccgaccacctcatccctcgcctccatggccctacccctcgcgtcaccggcgggggcatgagccggtgactgctcacgcggcctcgtctgtctgcgcacgcgcgcggggtcggcgagtgagcattgcggcggtccgcgatcgcccgtgggggagcatggcgtcggcggcggggtcggccggcggggccggcgcggggtctggcgggctgaagacctacttcaagacccccgaggggcggcacaagctgcagtatgagaagacgcactcccccgccgtcgtgcactacagccacagcggcaagaccgtctcccagatgacagtggcatatttgaaggagaagccagcaggccagggttccacgccttcaacaccaagtgctggtagtgggatgcggtctgcagctgcaagacttctcggcactgggaatgggagccgggcacttagcttcgggagcaatggtaccagcagggctgtctcaggaagcagccgcatgggtggaggaattggtgtgtcgactagtgcaagtggatcgcaaggcatggcaaactatgatggaaagggcgcgtacatcatatttaatactgcagatacactcttcatcagtgatctcaactcacatgacaaaaggccaaggatgggcacgatctgcttgttggggtgttctcaggagatgtctattcaatgtcactgaggcagcagctgcaagatcctggaaagaagcccgtttcatatcagcattttgttaatagagacaaagataaagacaaagatccaagtcaaggtggcgctgccagcagtcggagcacttgtgttgcatgggttccagagcgtgaaggaatttttgttgttagtcatgctgatgggaatctgtacgtgtatgacaaatgcaaggatggaaatactgattggacatttccaactgtaaaggatcaaagtcaggtgctgatttcacatgcaaagtcgagtaagagcaatccaattgcaaggtggcacatctgtcaaggtgcaatcaatgacatttccttttcaccggatggtgcttacttggcaactgttgggcgtgatggccatttaagagtatttgactttgctaaagaacaactaatatttggtgggaaaagttactacggtgcactgttgtgttgctcttggagtgcggatggcaaatatttgttatcaggtggtgaagatgatcttgtgcaagtatggagcatggatgatagaaagatagttgcatggggtgaagggcataattcatgggttagtgcagtttcttttgatccgtattggtccccaccaaattctgatgaaacggaagaaaatgtcatgtatcgctttgggtcaattggacaggatacccaactgcttctctgggatctggcattggaagagattgctgtccctctacgccatccgtctggtggctcaccgacattcagtagtggaagcccatctgcacagtgggataatgcgtgccctccagccggtgttctacagccttctccacggatgcgagatgtgccaaagctctcacctctcgttgcacaccgggtacatgtagatcccctatccggcctggaattc

SEQ ID NO: 9772 - DNA, 1774 bp, Zea Mays
agaatttttctatggacacacgaagagtccgcaaaaaataatcaactcgttttttttctttctccgctcctccgagtgaccgagtccaaggcttcgttctgctctccggctctcccgcatccaccccgtctcatccccaatccgaccacctcatccctcgcctccatggccctacccctcgcgtcaccggcgggggcatgagccggtgactgctcacgcggcctcgtctgtctgcgcacgcgcgcggggtcggcgagtgagcattgcggcggtccgcgatcgcccgtgggggagcatggcgtcggcggcggggtcggccggcggggccggcgcggggtctggcgggctgaagacctacttcaagacccccgaggggcggcacaagctgcagtatgagaagacgcactcccccgccgtcgtgcactacagccacagcggcaagaccgtctcccagatgacagtggcatatttgaaggagaagccagcaggccagggttccacgccttcaacaccaagtgctggtagtgggatgcggtctgcagctgcaagacttctcggcactgggaatgggagccgggcacttagcttcgggagcaatggtaccagcagggctgtctcaggaagcagccgcatgggtggaggaattggtgtgtcgactagtgcaagtggatcgcaaggcatggcaaactatgatggaaagggcgcgtacatcatatttaatactgcagatacactcttcatcagtgatctcaactcacatgacaaatccatccacttcagtagctcaaacccgctttgccatgcatttgacccagaggccaaggatgggcacgatctgcttgttggggtgttctcaggagatgtctattcaatgtcactgaggcagcagctgcaagatcctggaaagaagcccgtttcatatcagcattttgttaatagagacaaagataaagacaaagatccaagtcaaggtggcgctgccagcagtcggagcacttgtgttgcatgggttccagagcgtgaaggaatttttgttgttagtcatgctgatgggaatctgtacgtgtatgacaaatgcaaggatggaaatactgattggacatttccaactgtaaaggatcaaagtcaggtgctgatttcacatgcaaagtcgagtaagagcaatccaattgcaaggtggcacatctgtcaaggtgcaatcaatgacatttccttttcaccggatggtgcttacttggcaactgttgggcgtgatggccatttaagagtatttgactttgctaaagaacaactaatatttggtgggaaaagttactacggtgcactgttgtgttgctcttggagtgcggatggcaaatatttgttatcaggtggtgaagatgatcttgtgcaagtatggagcatggatgatagaaagatagttgcatggggtgaagggcataattcatgggttagtgcagtttcttttgatccgtattggtccccaccaaattctgatgaaacggaagaaaatgtcatgtatcgctttgggtcaattggacaggatacccaactgcttctctgggatctggcattggaagagattgctgtccctctacgccatccgtctggtggctcaccgacattcagtagtggaagcccatctgcacagtgggataatgcgtgccctccagccggtgttctacagccttctccacggatgcgagatgtgccaaagctctcacctctcgttgcacaccgggtacatgtagatcccctatccggcctggaattc

SEQ ID NO: 9773 - DNA, 1894 bp, Zea Mays
ggaaaagccggcgcgctcagagcaggcaaacaaaaccccactgccggcccgcgtccggggttccgggcgaaccacttcactgcagcccgcccggagccgcgccgcgagaggagggagggaatcagtgaatggcggatggcagcggggaatcggagtcgacggcgctggagttcacgccgacgtggatcgtggcggcggtctgctccctcatcgtggtcatctccctcgcagccgagaggtgcctgcattacctcggcaagacgttcaaggggaagaaccagaaggcgctcttcgaggctctcctcaaggtcaaagaagagctgatgcttctggggttcatctcgctgctgctgacggtgttccaaggagtgatgcagaggacgtgcattcctccggggtggaccatctacatgctcccatgccgtagcgccaaggagcaggccgagctgagccccacggaggcgcacggccatgctgccggaatcttaggcctcacccgccggcgtttgcttgccgagggcgggcctaggacccagcgttgccagaagaagggagaagttcctttgttgtcagttgaagcactgcatcagttgcatatcttcattttcattctggccattgcacacgtgattttctgtgtcctgactatgcttctaggaagcgtgaggattcgtcaatggaaacactgggaggatgagattcagaagggtgctacagacaatgggcctaggaaggtgacctatgtgcatcaatctgaatttatcagggaacattccaagggcattggcagagataccacaatgttgagctggctgcattcttttctcaagcagttttatgggtcggttactaaatcagactacactacaatgcgacttggcttcatcacgacacattgtaggtcaaacccaaaatttgatttccacaggtacatgatgcgagctttggaggctgactttaagaaggtggttggcataagctggtacttgtggatatttgttgtggtattcatgttgctgaacatcaatggttggcacacatacttttggatctctttcattccccttctgcttctgttggccgttggcaccaagctagagcatgtcataactcagttggctcaagaggtcgccgagaagcactccgcagtagagggcgacttggtggtcaatccgtcggatgaccatttctggtttggccggccaaagatcgtcctgtacctgatccacttcatcctcttccagaacgcgtttgagatcgcattcttcttctggattctgactacctacggtttcaactcctgcatcatggaccacgtccccttcattgtgccgaggctcgttgtcggggccatcatccagctcctctgtagctacagcaccctgcctctatggggactttcttcaagaaggagatcttcgatgagcacgtgcagcagagccttctgggctgggcgcagaaggccaagaagaggaaagcgctcaggaacaatggcaatggcagcaatggcgccgcggccgggtcgtcacatccatctgcgactgcgaggctcgaactgatgagacgagctgtcgctcttgaagaaggcagtgccggtggcaacgggagtgaggctagtgcggccgagctacacgacacgggcccgaagctctgaacgctgtagaaaacgcccggcagagcgtcagaagatgcagtgtttctgtacgcgagccatatgtcactatgtcgtgtggctgtttagccaggtggtgtagtgtgatactgcgtatcatgatttgtatgcttttctggattgagcttgaagcgtgttatggagtggggagctttgtgtagtgttgtgctcatggaattggaggcgatgtttttaggccggatcagagacgatccaggcgcg

SEQ ID NO: 9774 - DNA, 2943 bp, Zea Mays
acaaccttgaagaccaactggtgcttcattgcggctgccactcagtgaggaggagcagagagtgaatgcgcagagcgctatctcttgtaatgaatcaaagagggaggtcacagttctgcacagcctcttcaagcaagcagacaagacatttaccttcgacaaggtatttggaccacaatctcagcaaaggtcgatatataaccatgccgttgcaccattagtgactgaagtccttgaaggctataactgcactgtcttcgtgtttgggcagactggaaccggaaagacatataccatggagggagagatgagacagaaggttagtgaactaccggatactgccggtgtcattcctagagcagtgtgccatatctttgaaatacttacagcacggaaggctgattatagcatgaaggtaaccttcttagagctgtataatgaagatataacagacctattgtctttagaggaccaaagcagattccctgaaggtagacaaaaaaggcctataactcttatggaagatggcaaaggcggtgcggtaataagaggtcttgaagagattgttgtctatagtcctagcgacatatacagccttttggaacatgggtcagctaggagacgcactgctgacactgcactaaataagcaaagcagccgatcacatgctgttttttctataaacatccaagtcaaagaaacaacagtaggaaatgaggaactcattaagtatgggaggttaaaccttgtagacttggcaggatcagaaaatattgctcgatcaggggcaagagagagcaagagaaactggagaaatgaataagagcctactaactctgggacgtgtcatcaatgcacttgtggagcattcagttcatgtgccatacagggatagtaagctcaccagactgctaagagaatcattaggaggcaaagccaaaacatgcatcatagcaacggtgtctccatctgcccattccctggaagaaacgctggtcacacttgattatgctgctcgtgctaaaagcataagaaacaagccagaggcaaataaaaaaacatgcaaaactgttgtgctcaaggagctctaccaagaaatggaaagaatgaaacaagatgtcaaagctgcaagggaaaagaatggaatctacatctctcacgaaaggtttgcccaagacgaaacaaaaagaaagacaatgaaggaaaaaatagaacatttggagctcagtcttgaaaagcagaacaaagtaaatcttgaaagcttgaagggcaagttcatagatcttgaagaagctcattgcagagctcacatgtccctgagggagaaggacttcattatatcaaatttacttcattctgagcacttaattattgaacgtgcaaaggatatgcggaacaccttggagaatgcaaccgaagatatcagtgtacttctgaataaacaagaaaggcaatcaaaaactgaagctgaaaacaaaaggttgctatctggttttcgggctgaattggatcgtagtcttggagttctgcatgctacagtcgttggatcagtatgtgaacagagtaaaattttggagtctataaatgaacaaacaaagttgtactttttagccagaaatgagtcagaaaaccaattggaaagaagaattgcaagagccaaagatatgtatgtctccggggtccaatgcatgaaggagctcgctaataccatgagacagcagtctatcatagattccgagcagatgaggcagaacatatctactaatgcaaatgctattggcaattttctagaagtgatgttttcagaagctgaacaagttctaaatgatgttctgaaatctacttcagatctcaaggaactattagccttttctgcagaactacaaaacactggattgagaaggaatcttgcttctgttcaagcaatgtcaaagcaatcaattgatttctttgaagatataaggatacatgtgtctcagctcatgacacttatggagcagaatcaaatggaaaggtcctccaagcttgttaaatttgagaatgagtttaaggaaacttgtgttaaagacgagcaagctgctctgaataagattgctgcaattttatcagagttgaccgccaagaaaactacaatggtttcatcatatatgggacagcttaatgagaggtatagtgaagatcagaagaacctgaaactggagatatccaacctacaacaggtttcagataatggcaaaaatgagtctgtggcttgtgttggagtgatagagagtcagttccaggaggatatgtcatcacatactaaatcaaatgatcaaatggaaggcatcttaaaacaatactcggagaaaggtagtcattttgtatcttactggtcacatatacaatcatctttgcatgatcttgttaagagctcaatcatggagactgacgattttattgaggaaagcagaaacaaaaatgaaaatatattccaggaagggcttctgttttcttcacagaatgatgcagagtttcatggcattacatctgacgtgctgactgtttcaaagagtaacacattacctttgtgataaatttattttcctaaagcatgcattttccttatgtttcctttgtgcattttcagattccctcttactggatcatgaaacttgcaagatggtagagactaacactaccattttctcggatcatctggaactgctgaatgaaaagcacagcgaaggcgtggaatctacaagaaacatgatgagtgattgtcttgaaaaggattacatggagatcacatgaggaaagcacagcacagagaatagagtgatacgcagaacggctcataaatcattttgggaaagagaaaggtgagaggtaaggatatgtgatgcagaacaacacagaggagcagggccttctgagggaagatcacgtttcatcgaccagcga

SEQ ID NO: 9775 - DNA, 3556 bp, Zea Mays
cttaattcaaatttcttcccaacggaaaacatcgcgggctccctactccgctttccccaatccacgcccttccgaagagcggcgaatccgccccagaacctcgcgatttccctcaaaccagttctcggatcagagcgtcgtgggtgtcgccgggggcatggcgcagacgccgaaccccagtaggaggtcgtgggtcggcccggcgccgatgccattcctcacgccgcggccggagcggcggcaccttgagatgcggtgggcggacggagtgtcccaaagcgctgctcgccgtagcggcgtcggcgccgttgccagggatggatgcgagagggatcaggaggtgaacgttcaggtcatgctgcggtgcaggccactcagtgaggaggagcagagagtgaatgcgcagagcgctatctcttgtaatgaatcaaagagggaggtcacagttctgcacagcctcttcaagcaagcagacaagacatttaccttcgacaagactggaaccggaaagacatataccatggagggagagatgagacagaaggttagtgaactaccggatactgccggtgtcattcctagagcagtgtgccatatctttgaaatacttacagcacggaaggctgattatagcatgaaggtaaccttcttagagctgtataatgaagatataacagacctattgtctttagaggaccaaagcagattccctgaaggtagacaaaaaaggcctataactcttatggaagatggcaaaggcggtgcggtaataagaggtcttgaagagattgttgtctatagtcctagcgacatatacagccttttggaacatgggtcagctaggagacgcactgctgacactgcactaaataagcaaagcagccgatcacatgctgttttttctataaacatccaagtcaaagaaacaacagtaggaaatgaggaactcattaagtatgggaggttaaaccttgtagacttggcaggatcagaaaatattgctcgatcaggggcaagagagggtagagcaagagaaactggagaaatgaataagagcctactaactctgggacgtgtcatcaatgcacttgtggagcattcagttcatgtgccatacagggatagtaagctcaccagactgctaagagaatcattaggaggcaaagccaaaacatgcatcatagcaacggtgtctccatctgcccattccctggaagaaacgctggtcacacttgattatgctgctcgtgctaaaagcataagaaacaagccagaggcaaataaaaaaacatgcaaaactgttgtgctcaaggagctctaccaagaaatggaaagaatgaaacaagatgtcaaagctgcaagggaaaagaatggaatctacatctctcacgaaaggtttgcccaagacgaaacaaaaagaaagacaatgaaggaaaaaatagaacatttggagctcagtcttgaaaagcagaacaaagaagttcaaaaattcaaagccttgtacctagcagaacaggaatgccactgggactttgaaagtcagaacaacgatttgaaggtaaatcttgaaagcttgaagggcaagttcatagatcttgaagaagctcattgcagagctcacatgtccctgagggagaaggacttcattatatcaaatttacttcattctgagcacttaattattgaacgtgcaaaggatatgcggaacaccttggagaatgcaaccgaagatatcagtgtacttctgaataaacaagaaaggcaatcaaaaactgaagctgaaaacaaaaggttgctatctggttttcgggctgaattggatcgtagtcttggagttctgcatgctacagtcgttggatcagtatgtgaacagagtaaaattttggagtctataaatgaacaaacaaagttgtactttttagccagaaatgagtttctagaagtgatgttttcagaagctgaacaagttctaaatgatgttctgaaatctacttcagatctcaaggaactattagccttttctgcagaactacaaaacactggattgagaaggaatcttgcttctgttcaagcaatgtcaaagcaatcaattgatttctttgaagatataaggatacatgtgtctcagctcatgacacttatggagcagaatcaaatggaaaggtcctccaagcttgttaaatttgagaatgagtttaaggaaacttgtgttaaagacgagcaagctgctctgaataagattgctgcaattttatcagagttgaccgccaagaaaactacaatggtttcatcatatatgggacagcttaatgagaggtatagtgaagatcagaagaacctgaaactggagatatccaacctacaacaggtttcagataatggcaaaaatgagtctgtggcttgtgttggagtgatagagagtcagttccaggaggatatgtcatcacatactaaatcaaatgatcaaatggaaggcatcttaaaacaatactcggagaaaggtagtcattttgtatcttactggtcacatatacaatcatctttgcatgatcttgttaagagctcaatcatggagactgacgattttattgaggaaagcagaaacaaaaatgaaaatatattccaggaagggcttctgttttcttcacagaatgatgcagagtttcatggcattacatctgacgtgctgactgtttcaaagaattccctcttactggatcatgaaacttgcaagatggtagagactaacactaccattttctcggatcatctggaactgctgaatgaaaagcacagcgaaggcgtggaatctacaagaaacatgatgagtgattgtcttgaaaaggattacatggctaatagtccggttcgaaaccatccacgggaactactgaccagtgcaaacagcttggaatcaattgacaaactaagagcttctctgccagatctggtggcaaagttcaggctcgagaacaagttgaatgaaatggataaggggaagcaatactcggatcaaaggacacgtactccaagaagtcctttgacgcctgtcaaccagtaacctgagtggagaatgcgccaaattctgggatgctcaaatgttgtaaagatggcaagatatcttgccgatatgttaccaccttaatttagcgtgctcgtcagacgttaggatgctgcatgcaaagattctgattagggttagataagaaatccagcaatattggatttcaatttgtatcatgtaaaatcaacataatattctcacttatgccttccatttctgatcagtcatttgagtaaagtagcatgcaatgtcgaatttgtttctcgtccctgaatgtgtacatggtaagttcaaaaccataataagtgctattaaaagcttgctaacatggagatcacatgaggaaagcacagcacagagaatagagtgatacgcagaacggctcataaatcattttgggaaagagaaaggtgagaggtaaggatatgtgatgcagaacaacacagaggagcagggccttctgagggaagatcacgtttcatcgaccagcga

SEQ ID NO: 9776 - DNA, 5273 bp, Zea Mays
cttaattcaaatttcttcccaacggaaaacatcgcgggctccctactccgctttccccaatccacgcccttccgaagagcggcgaatccgccccagaacctcgcgatttccctcaaaccagttctcggatcagagcgtcgtgggtgtcgccgggggcatggcgcagacgccgaaccccagtaggaggtcgtgggtcggcccggcgccgatgccattcctcacgccgcggccggagcggcggcaccttgagatgcggtgggcggacggagtgtcccaaagcgctgctcgccgtagcggcgtcggcgccgttgccagggatggatgcgagagggatcaggaggtgaacgttcaggtcatgctgcggtgcaggccactcagtgaggaggagcagagagtgaatgcgcagagcgctatctcttgtaatgaatcaaagagggaggtcacagttctgcacagcctcttcaagcaagcagacaagacatttaccttcgacaaggtatttggaccacaatctcagcaaaggtcgatatataaccatgccgttgcaccattagtgactgaagtccttgaaggctataactgcactgtcttcgtgtttgggcagactggaaccggaaagacatataccatggagggagagatgagacagaaggttagtgaactaccggatactgccggtgtcattcctagagcagtgtgccatatctttgaaatacttacagcacggaaggctgattatagcatgaaggtaaccttcttagagctgtataatgaagatataacagacctattgtctttagaggaccaaagcagattccctgaaggtagacaaaaaaggcctataactcttatggaagatggcaaaggcggtgcggtaataagaggtcttgaagagattgttgtctatagtcctagcgacatatacagccttttggaacatgggtcagctaggagacgcactgctgacactgcactaaataagcaaagcagccgatcacatgctgttttttctataaacatccaagtcaaagaaacaacagtaggaaatgaggaactcattaagtatgggaggttaaaccttgtagacttggcaggatcagaaaatattgctcgatcaggggcaagagagggtagagcaagagaaactggagaaatgaataagagcctactaactctgggacgtgtcatcaatgcacttgtggagcattcagttcatgtgccatacagggatagtaagctcaccagactgctaagagaatcattaggaggcaaagccaaaacatgcatcatagcaacggtgtctccatctgcccattccctggaagaaacgctggtcacacttgattatgctgctcgtgctaaaagcataagaaacaagccagaggcaaataaaaaaacatgcaaaactgttgtgctcaaggagctctaccaagaaatggaaagaatgaaacaagatgtcaaagctgcaagggaaaagaatggaatctacatctctcacgaaaggtttgcccaagacgaaacaaaaagaaagacaatgaaggaaaaaatagaacatttggagctcagtcttgaaaagcagaacaaagaagttcaaaaattcaaagccttgtacctagcagaacaggaatgccactgggactttgaaagtcagaacaacgatttgaaggtaaatcttgaaagcttgaagggcaagttcatagatcttgaagaagctcattgcagagctcacatgtccctgagggagaaggacttcattatatcaaatttacttcattctgagcacttaattattgaacgtgcaaaggatatgcggaacaccttggagaatgcaaccgaagatatcagtgtacttctgaataaacaagaaaggcaatcaaaaactgaagctgaaaacaaaaggttgctatctggttttcgggctgaattggatcgtagtcttggagttctgcatgctacagtcgttggatcagtatgtgaacagagtaaaattttggagtctataaatgaacaaacaaagttgtactttttagccagaaatgagtcagaaaaccaattggaaagaagaattgcaagagccaaagatatgtatgtctccggggtccaatgcatgaaggagctcgctaataccatgagacagcagtctatcatagattccgagcagatgaggcagaacatatctactaatgcaaatgctattggcaattttctagaagtgatgttttcagaagctgaacaagttctaaatgatgttctgaaatctacttcagatctcaaggaactattagccttttctgcagaactacaaaacactggattgagaaggaatcttgcttctgttcaagcaatgtcaaagcaatcaattgatttctttgaagatataaggatacatgtgtctcagctcatgacacttatggagcagaatcaaatggaaaggtcctccaagcttgttaaatttgagaatgagtttaaggaaacttgtgttaaagacgagcaagctgctctgaataagattgctgcaattttatcagagttgaccgccaagaaaactacaatggtttcatcatatatgggacagcttaatgagaggtatagtgaagatcagaagaacctgaaactggagatatccaacctacaacaggtttcagataatggcaaaaatgagtctgtggcttgtgttggagtgatagagagtcagttccaggaggatatgtcatcacatactaaatcaaatgatcaaatggaaggcatcttaaaacaatactcggagaaaggtagtcattttgtatcttactggtcacatatacaatcatctttgcatgatcttgttaagagctcaatcatggagactgacgattttattgaggaaagcagaaacaaaaatgaaaatatattccaggaagggcttctgttttcttcacagaatgatgcagagtttcatggcattacatctgacgtgctgactgtttcaaagaattccctcttactggatcatgaaacttgcaagatggtagagactaacactaccattttctcggatcatctggaactgctgaatgaaaagcacagcgaaggcgtggaatctacaagaaacatgatgagtgattgtcttgaaaaggattacatggctaatagtccggttcgaaaccatccacgggaactactgaccagtgcaaacagcttggaatcaattgacaaactaagagcttctctgccagatctggtggcaaagttcaggctcgagaacaagttgaatgaaatggataaggggaagcaatactcggatcaaaggacacgtgtacatggtaagttcaaaaccataataagtgctattgagcgcagagttctggaggagcaacttggctgggccagactggagcggcaaaagatcctcgctttgtctgcggaggctgacgatgcaatctggcatctggccacgctcgcacggaggaggatgcaagaaagggacgaggccaggaaccaggcgaggatgctgctcgcggacctccaggcaaggaacgcccggatgaaggcggcggttcccggagcatcgtgctccagagtcgcgcggcctgacgcgttcgccgccaccggctacgagcacatccaggcccaggcccaggcccaggcccaggcactcgctcctgccgcgttcgggccgcgggggcagcgtgcccgtgcgggaactggctactactgcgttgcgtcgtccagcggcttcggccacaggagcatcgactcgtctctggacacctgcgccgttcagccgtcgctgcttggcttcgcttcctcgagctcgagccaggagcatttcgaccctgacatgttcttggtggacgtcgcagaatcgccgcaggatgtcgttccggttccggccaccgcagactcaagccaggggagaagctccggctccggctccggcacttatggtcatagtttggcgagcaaaaggccttgcagtgaaaggaagtaataaatcatcagctcaagctgcagcacgtcctgccacgggccatggccatgctgcctaaatcctaggccggaaaaatcaaccaattagttaagaaaggaaactaacaaacaactatcaattagttaaaaaagggaactaattggaaaaaaacaaataaacctagctgcattatgcaacaggcttactagcattgaataattgtggccgttgttgtatatcgcttatcatggtgtcatgaaattatgtaacctggaaattttgtttttttggcataaaaatcactgtattcagaacaccagtgctctgtccaagacaaagaagcaagagtgctgaaatgagaggataatgagcatgctgacttggctgccttggcttccacccacacactcgataggggaaaagcgagcccttccacggttccaccacccactcgatagtggaaaagtgagctcgagcgtgtccagcagctatggataactgacgatgggggtaacaagcttcacagaactctccctcgagctcagcgctaccctgaacaactgaagccgaaatggcgagcctgcagaacctggtctgctccgtatccaaacaactggctgtgccaaattgcgcggcgactaccaaactgaacagggctcctccctcagctgtggcggcgagctcgatccaaggatctttggacgacaccaaggtcacgaagagacggctagctttgcttggtgctggagcgttagccactggcctactgaggacaagctctgctgcgttcgctgaagaggtgccgaagaattacaagtcgtacgtggacgcgaaagacgggtactcgtacctttatccagctgaatggagggatttcgacttcttgggtcatgattctgcgttcaaagaccgcaacctggcccttcagtgtgttcgtgtggggttcattcctaccgagaaaacagacatccgcgacctaggaccgatggatgaggccatcttcaacctggtaaacaacgtctacgctgccccgaaccaaataccgtcgatttacgacatgcaagagcgcaccgtggacggcaagaactactggacgtttgagtacgatctggaggctccgggctacagcgtttctgcgtttgcgacggtcgccattggaaacgttcggcttaccgcctcactgatcatgagctggacttcccgcggatggcgctttctgcagaacacgttgatggacgtgccctgctccttcgacatatagatcctgttcgtgcggtcctttgtttcttttttttcttttctcttttttctccacaaccttgcg

SEQ ID NO: 9777 - DNA, 2550 bp, Zea Mays
gacgttttaccgtgtaacatcgccgtcccttttccaccatctactatagaaccaaacgacaactgacgccacttcgagtcgcgcccggcgtccccaactccaccgacgccgagcacaaccgttgtttccggctggtcctccactggccgctcctcagtcagtcccggattctcccttgggtctggagtggaatggaggttaatccgatcatggggtgatttcctcttttaactggattttcttcctcgtgtaggatcagcgcagccggagctcaaaggtgcctgtggagtttattacatcaagaattttgggttcgacataatccccatgtcccccaataagtccggccatgcttcaggccgtgacgcggttttctggtccgatagaatgaacgaatatcttattgattcgctgcttcaccagcaagccattgggaacaggagaacctccttggtgaagataatcggtttaggtggtgcccagagagcagaagattcaatgccgacccaaatgtttggagggagttgatcgagagaaaaccagaagcaaagaaatggatgatgaagacgattgaccattatgatagcttaatggatctatttggtaagaatagggagaaacgtcaagacgttgagaactcaaaaggtacctcgaagaaaaaggcgcgaacagaaccgccaaaggagatacttcaacgtactccattaaatcggaaggggtcagctcttgccgaaagttcagataagacggtggacaaatgtgagatccatgatgagataaaaacaaatgtggaacttgatttgtcagaatcgtgcagaactgataatggcattgttgccatacctgttcgtgcctattcatacggtaaaggtttgccctatgctcctgaaaattggccacgtcatggagacatatggcactggaaagttggaagcagggcttctggagcaggccattgggctgacaggtatattatgccgccatcccgttttcgtggcgctgctcctaagaagttaggatttgcaagtagaggatttgcaagtaggttacaagttgaggaattcgttaagagagaatttccggatgttgatcctagcacattcttttctatgtttatctggaagatccctgctgaaggatacaggatccaaaaaggcacccgacaagtgaggatccatgaacctgaacctgtggtggctgatccgggtggtctctgcaaggctaggaatagcttgtgcaatcttcaaagggaaggttttgttgaatcatcaccagcacgggtttgtaatatctgctgcaaagagcctggtttctgtcgtgagtgctgctgccttctctgtaacaggaccgttgattattctcttggaagttacagctgcataaaatgtgaggcagttgtggaagagaacttaatatgtgggcattttgcacaccttgaatgtgctcttcgatgttacatggctggaactgttggaggaagttttggcttggatgtccaatatttatgcaggctctgtgataacaaaaccaacttaatgacacatgtggagaaactcatggaaacatgccaatctcttgaatctagggaccaaatcaaacctatgctgaatttgggattatgcctcttgcgtggatcaaaacaaatgagagcaagaaacttggagaaccatatgagatcagcaatggaaaagctggaatgtggatttgattttgttgaagtctggaaattggaaggtgacgagggcaggacaacactcaatgcaggagagaattccccaaccaccaatggtgtgactgtgcttggggctcggcaagttcctgaagcgggtgcacttacagggcatcctgatctgatagatccactggttgataatgacttcgagacggttatagaaaaccttccagtgttcattactggagatcagaatgccgcgtctgctaaatttgaggatgagatagatcttgctcttcaagaactgaaaaaatctcaggaagcggaatatagcgtggcggagcagaagctttacgcccagaaagaccacatcctctgtctgtacaggcagcttgacgctgaaagggctgaacttgcagatcccatgcccttgtctgatgcttcaaattatggtgcgatgctcgctaatgttctaagccgcgtggaccaagtcaagcgtgaggaggagaaatttaggtctatgctgaaagttgctggcggatttgcgaaagcaccacaaagcgtcaccagggagatgttcggattacctgctgataagtagttgtaatagcagacttgcttggaacttaactatctgtagtttaccatagaaccaaacttggctgtgttgttatagctgtatgagctgtacatcctaccgacgggttaccccataaagactggtttggatgaaaccagcaagtgctgcggatgcgcaggttctctatggacctgcttgtactaactactaagattcgttaaatgtgacattctaaatggaccgaacctggacctccacattttccttaccaggcgataattatgttacactcgtctaa

SEQ ID NO: 9778 - DNA, 543 bp, Zea Mays
cctaggcccacggccaccagcccaccacgacgctcccagtttcaccttctccagtcctctctgctggactctcggcagattccgctccagcgcgcaccgtcgcccaccgtcgcctttcaaaaagctagagggttcctcgagagggagaagcgtacccggcagctccgctccgtcagtccgtccgcccccaagaatgtcagacgaggccaggcgcgggcccgcgggcgccgcgcaggtggtgcttcgggcctcctccgaggaccgcaagccggtgggctcggggtctccgccgccggcagcgaccgcgactgcggttgcgcacaagatccagctcaagagtgccgacatgaaggaggagatgcggcaggaggccttcgaaattgctcgcatcgcattcgagaagcacagtatggagaaggacatcgcggagtacataaagaaggagttcgacaagaaccacggccccacctggcactgcatcgtcggccgcaacttcggtcgtgtcaggcatatgttaacaatttgagaccagcgaaattctgc

SEQ ID NO: 9779 - DNA, 2560 bp, Zea Mays
gaaaggaattctgccttcttctctcatcttcctgctcaacatcagtagcagctttagctgtagcagcgccaccggccaccgccacgccatggccaccacgttgcacaagccccttggggcgatcaccgttgacgacctcgccgcggcggcgcctgggtcggacgccaccgcgctccacgcagcgctccggcgcgcgctcgactcgcacggacccaccgaagtgtggggcgagctctgccggtccgtgctctgtccgtctgtccccttcgccgtccaccggatgctctactacggttgcttcgccgggttcccgtcccccacgccgccggcctggacgcccgaccccaaggagtctgtcttgaccaatgtcggccgtgtcctcgaggcgcgtggtaggaacttgatcggcgacgcgtacaaggatcccatcaccagcttcccagacctccacaagttctccaacgagaacccagaggcgtactggaagatggtatttgaggatatgggtatccaattcagcgtagagccatcctgcatctggagagagaacactgcatatcctggtggcgagtggctaccaggcgccgagctcaacgctgctgttaattgcttgactgctaaacccgggaggagctccgacggtccggccattgtatggagggatgaagggaaggactctgatcctcttaacttcatgtctttggaggacttgaggaagaaagtttgcctagtggccaatgcaattgatgccctggaactgccgaagggatctgcaattgctattgacatgcctatggatgtcaatgctgttgtgatctaccttgcgatcgtgttggcgggatatgtggttgtctcaattgcagacagttttgctgcacctgcaatatcaatgaggttgaagttatcagaagcgaaggcaatttttactcaggattacatccttcgtgatgacaaagaactaccattgtacagtagagttgtggaggctaaggcccctatggcaattgtgattcctgtaagggggtctttgctaataaagggactacgtgttgatgacctttcctggcaagatttccttggaagggttaattataccgaggctgaaaattacactgctgttaaccaacctgcctatgcattcaccaatattctattttcatcagggaccacaggggagcccaaagcaattccatggacacatataacacccctaaaggcagctgccgatggatggtgtcacatggatattcgtaaaggagatgttgttgcttggccaacgaatcttggttggatgatgggcccttggcttgtttatgcctccttgctgaatggagcttccatggctctgtataatggctccccaaatagttcaggctttgcgaagtttgtacaggatgctaaggtaacaatgcttggactggtacccagcatcgttcgtacttggaagaatacggactgtacagctggactagactggtcctccatccgatgctttagctcctctggggaggcatccagtgtggatgattatttatggctgatgggaagagctggttacaagccagtaatcgagtactgtggaggcacagagattggtggtggatttgttactggatcgatgctacaacctcaagcgttgtctgcattcagcacacctgccatgggttgtaacctgttcattcttgatagcagtgggaatcctttgccacaagactctgtcggcattggtgaacttgcacttgatccaactttatttggatcatcaacaacacttctaaacgctgatcatcaggaggtttacttcaacggaatgccagaatggcacgggaaaatcctccgcaggcatggagatgaatttgagcgtacttctgacgggtattatagagctcatgggcgtgcagatgatacaatgaaccttggtggaattaagttccattgagatcgagaggatctgcaacagagtacatgacgccatccttgaaacagcagctatcggggttccacctgtagggggtggccccgaacaactaaccatagccgtcgtgttgaaggaccagagctctcaaatagaggacttgaaccagctgaaactagcatgcaacatggctctgaagaaactgaaccctctcttcaaggtttcctccgtcgtcatcgtcccgtccctccctaggaccgcctctaacaaggtcatgaggagagtccttcgcaaggagttcagccaggccgcccaggcaaagcattcaaaaatataggtagttattagaaataattagtgttttctgctgcaaatgcacctgcagaaagagtaaaacaccaaactgggcatatcgggaagtcctgttgtttgccaccaaaacggataaatgagatgtacttagatttcgggaaataagggagctgtattcctgccaacgttcagcactcacttgatgtgctgcactaataaaacactaatgcaatcacttgcattagatcacagtctgaactctaagggcttgttcgtttacgtcggattgcacctggaatcgttccagctaatcaaagtttatataaattagag

SEQ ID NO: 9780 - DNA, 1811 bp, Zea Mays
ctcgttcacctcccaccgccccaccaatccgcctctgctcgctcgcccgctcgcgggctcgtcgtccgccagacgccccagaccgccgcctccaaaagtcccagcaccgtgccaccgtctgctcgcgcgctcctcctccgtgcgcaaccgcatcacgcggcggcatggttgactgcccgcggctgcttctgccggcccctcgcgtcgctgccgctcaatacacgcgctgcgccgctggatgttggtcgaaccagggacgcgctcccttctccgtttctttcagccacctccgccgctggtggagctacgtttctgacttgggtcaacacagtgcgatcctcgtcctctggggccggaagccagtcaagcgttgcggatgaaccagaggctgcagaatgggccttgcaggatttctacattttgcggaaggatgttgagttggctcttgagcgtgtcaatgaagtcaggcagtctgccggtttgcaacagctcgaggaggatatcgcttcgcttgagaacaagtccagtgatagttccttatgggatgatccttccaaggcacaggggatacttgtttctctgacagaggtcaaagacaaagtgaagcttctcaacgatttcaagttacagattgaagaagcagagactattgtgaagcttacagaagaattagattctatagatactggtcttcttgaggaggcctcaaagattataaaggcattaaataaggcattagacaactttgagatgacacagcttctttctggaccatatgataaggaaggtgctgtaattaatatttctgctggcgctggtggcactgacgctcaggattgggctgacatgttactaaggatgtatgtaagatggggagagaagcagcgttataagacacgagtagttgagaaatcacctggtgaagaggccggtataaaatcagcaactgttgaactagagggaagatatgcttatggctatctctctggcgagaaagggacacacaggattgtccgtcaatcaccatttaatgctaaagggcttcggcagacaagctttgctggtgttgaggttatgcctcttctaccagaggaatccatggctgtggacatacctgaagaggacctggagataagcttcacaagagctggaggtaaaggaggccagaacgtgaacaaggtggaaacggctgttcgcatggttcatattccaactggaattgcagttcgttgctcagaggagaggagccagctggccaacaaaataaaggccctcagccggctcaaagcgaagctgctggtgatcgccctggagcagcgtgcatcagaaatcaagcagatccgtggagacattgtgaaggcagagtgggggcagcagatacgcaactacgtcttccacccctacaagctcgtcaaggatgtcaggacagggtgtgagacgtcggacatcactggcgtaatggatggagagctagatccctttatcagagcataccttaagtacaagctaactgcggcagctaccagctgattttgttggggagcatagcgatgagtgatacttacatccattgtattatgttgtagtatgagtttttcatctctctctctctcttgatttagtataatttcatagcactagcaatctagcattgtatttattgatctaggaatcgaagtggaaacatgggttttgcttcgagttctacaataagagtttgatcgaattgcatgacttgataaagacctcttgctagttccataaattgtattgaaatgaatatacgggttcttgttggtatgagatgtttg

SEQ ID NO: 9781 - DNA, 4297 bp, Zea Mays
taaatatcagaacgattactttggttaaggtctaatacaaaactaatgcaagcattctttatcacgcctctgctctcgccgccccctacgttgctccattgtttcctttccttcacctgcatcgcacagcgctcccacccttcggccgctctcgcgtcgggcagggctcgggagtcgggactcctcgcacgcattggagacttggaggccgtcgggactccatatcggcattgacgtcctccgccacgattgtcctgttcacgattgtgtccctttatcccaccggtgcaatcgcgggtggttttgtgtttagggtttaacagtaacactccagtgcggattgcctccaaggtgggatcttggcttttcatcccgttcgctctagttctttgcactttttttgtttgcatcttcttttaaagattctgatagcggtaatgcttatacttaatgaagattcgaatcatttgcattatatataacttttatctgttgcgctttgaaattaggttttttcgcttccctttttactcccaataaaacttgcattatttctaccttttatttattgcactcttaaattgagttttttcgcttccctttttactccccgtaaaatcgtcgttcttgcattctactactacttcattttctctctattaatgtgcatttatttgcaccatcgatgatcgattattactttgggttttagtcctccctcctgtttggctctctgagttctttccggaggttgattggtgtcacgagtcacgtgaacagcatcgcctatctgatcatcgtgtgaattgtgatattctatggatctcagattgatctgtgacgccgatgacctgagtaccgggcgaactccacacatccacaccggctgtggggacgacaaggttgcaagattcaaccaattattctgtatgagtattgttgctaggaagcatgtgagaaggctatcgttgtcatcagtacatggagattttttgggacaaacatcacaaagtcattcatgctccgagaagtatgagtggagaaacttaatctttcatcaaagtgataaagcaacaagggatcaatgtgatcatgttgcaacccggcacttacctctgcatatgcctcgcaggttggggccatcacctggtcatggacattcctctgagatttatggccctggagatggagtaggtggatgccatctatcttgctgttcttatggtggacaccgtggtaaatatcatgcttgccacaaccattcatcggaatgggccaggcacaacatttcacctgaacctggtcctatcagatcttactggataacgaaaaggacttcctccgatcatgtttctcattgtgcaaaaggatctgacagacagatacgcccagcaggaggttataggaagaattattctgctaaccaggggagtggcagtcagaacagaccgtatcatgatgatagatatctaccaactaaattcctggatgaccgttttcctgagatagatgctgcaaaacatcagtcttacttatgcgattttcaatcttcaagtaagcatattcctgttcacccctcacatggtcaatcatgtcaaagggatgaagtagcaaaagctcaccccaagagaccagttaatcgatttcgtcccatccaccataagcaacttgagcgctgtcccaatgaagattttcatgattgctttgatagcagtcagaaattcagaaatgcttataatgacaaggtagtaaaaaggaaatttataaaacaagatttccttggaaacacttacaatggtgcttgtgttggtaaatatgatagaaacagttgcaggaaaaggaatgcagatcattttggtggagagaaaaccaggaagaatgacgcaaataaggacaggtctaaaaggcttcgctgcccccttgagcaggaccaacggcaacaggttgagtgcaacgagatgagaaatgatagtcgggagggaaatgttgaaatgaccaggttagtgtgtcaagatggagcaaaacggaacttcaaccaaaagaagaatgctacagctcctgcttctagtgactcaacaaagtgtgatgggaaaaatatattaagtcccaagtgcagcaaaactattgcttcatcacacacaccaaatttgagcgaaggaagtaatgacatggatccaaaatctgacaactacgttgatggttgcactgaaagaggtatactgcagcatattccagtcacccatacagagaggaatatacaactgaaaatatcagataattttactcagtctgaggcgtttcgccgagattgtttaatcctgtggagagaaagacaattaagaaaggatagtgctgctaaggctgataacattgtgaaaactgaccaacaacagactgcacaaagaagcaagatgtcaactggaagaagagtggggagtggaggatctgctgcgtcttcttgctcaaaaagcgataataaagacgactctgctccagagtgttctgaccaatttagtggtgcaacatcatctgataaactacaaaagtttggtgaaggaagagctaacaaaaagttagagcagaccatcaaattccccagtaacagtaaatgcaacaaaaggcctcaagacgcaacagctgagaaagtactgaagtgtagtctcaagcttctgtcagaagcagatcctcttgaaattgcacaacctaaaggaaaggaaaaacttgttgacaggaggcaggtatcaaccgaacatcaagatgccaagacacatagtagtttgaatggttgttctgacacttgtaaggtggatcaagcagctatttcacactgtcataatagtgcacatcagaatatttttcaacaggagaaaaatagtgctgtttcggatgcaagaagggaagagaaaccaggtgtaaaatgtgaaaagaaagcagcaggccatggtgccaaactggctgaacaatctactggtctgtatagtgacccaatatcactggacaaagagactgttgttagttgttcaaagcatggcacttcgaaggtaaatgcactaaaggttccagatcatgagattgagagtacttcactcgatgggtcaatgctgcctcgaggaactgtagtagacatgtgcctaaggaagtccatcaaccggtctagtgaaagttactgcatagatttcaaagattgtttagatggaaatgattgtagagacagccaacaagaaaccacgcatgacaatgttttaaggaagaagcaagaatgttccctgttgccagagactaaagatgagttgaacgggaaagctagaaaggaggattgtgaaccccaagcccgtagggttgagatcgaatcaaatcaacggataacaacagaggattgtgcctctgatacaatactttctggctctgctaaacaagatgaccggatccgatgttcttcaataccagacttaaattgcttgcctagtatgagcagcgatgaggattttatggcaccacctgaggaaccggtttgccaggtaagtgtagacagtttcaaacctcagagcatttctaagagtctttcagcttcattaactggacacactccaaagagagaactgttcaagcaagtagaggggaaacagtgcgatcgagctgaggaaaccaaccaaatcgccagggaagtttgcaaagacggtacctctgaagcagcaactcagttgcagatctcggaatcaaatactggtcctccgcaactaagaacagccgaagaaagtagcaccccaatgaacgcactcaagagcgccttgtacgaattcgtcaaaggctgtgtaagacctctgtgggaagacgggctgctgtcccgcgaggtccacaaatttgtcgtgaagaaggccgtggataaagtgctagacgtctgggctcactcgacggagataaacgtcccaagaatcttgtccgatgaagctgaaggtataaggacccttgttaaggactacctaaagatatacgtgggaagtgaagcccttaggaaaagcatccccacaagttcttgagcaaggtgaaacacgatgtagatgtttccccattttctgtaccttcgtagtctctttcgtagtttgtgtaggtagctctgcacaggtagtcaggtaggatgtgaagtttacaaggtgatggatattgacagattgaacgctgacaaagtttaaccatcttggaaccctgtcctagtagttggttgggaaaaaaatgcttttttgctctgtgagtgcgcatctgtttactcggctttcggccggtgatgcgtcactttttc

SEQ ID NO: 9782 - DNA, 3856 bp, Zea Mays
cccaagatgtggtttctattctatcgccgtcattgcgctctcctcccgttgtaaacccaaagaccttcgtcgcacggacccgtccttgctaattgctcactccatcggcgccgggtcatcctcgtggccccgtgccgcaccgcgaaaccaaaatctcgcaatcctaacctaccccagcgacctagcgccgtcgtcgctcgacctcccctcgccgcgccgggccccccagagggtctcaggccatagcgaggagccggggttccgctccgacccgaatccgagcctcccccaggacgcagcgggtctcgtttccgtactcgtagcaggaagtttcgcgcgagggattgattgtcgagctagagatgtacgggcagggagggagcttcaatccacactatcgccatggcccgcctccgccccagcagcaagctggggtaactgggtccttcccccagcaacctgtgccaccgcctcggccaccttacccacagcaccctggagtgcggcctccggctgggccgtaccagcatggcgtgctgccacatcagaaccagccatacccctttgcgcagcatggtcggatgcaccagatgccaatgcttccgccacagcagagaggttatgggtcgatgccaatgccagggtcgctgcctccgcaacaagctatgcatcaggcccctccacagtatccgcccctccctccacctccacctcggccgcctggctttgttcatgataatgtgctgcctccatctctgcctcctcctcctcctccttctccaccaccaccaccaccaccaccaccaccagaagcagcagcagcagcatcatattctcctcctcacacacttgttgttgcacagtcatgcggcgcagaggcagaagcaaaagaaggtgcatctgaaggtggtcgttttgccaaaactctggaagcagctactcagctaattgtttctgatgactcagatatggacatggatggggatgaggactctccatcaaagcagccccttaccccagaaacttctttgcctgtgactgttgaatgtactggaaatgttaatgtgtcaaagttcagtgatgtttcaactgaggacaatgctaaaactgcggatgcaactgaggacaatgctaaaactgcgcatgcaactgaggacggtgggagcacattccaactgatacaaggttatggctccgatgacagtgcaaatgaggctgatgctggtcctggcagtgctaatacccttgtgacattgcctgaagataacctgcatggtcatttaagtgatagtaatactgagtttgattatcagaaacatgttaatgcaaaaggaaatgtgaatacccctcatggcactgagcaaaatggtaaggctgaaaattatcatctcaaggttgagagcaacccagtgaagcatggcacagatgtacttgggcatctggccaaagaagatacaagtggcagtgaaattgagggaggtcaaagtagtaaaaggcatgggaggatacaaaagaaacgaacccggagcatctcacctcagggtagaagtggtagtccagtgggggcaaacaagagcagtccatcccaaagttcttcacctggaaagcagagcaggccaccatttgctaagcgtctccattctgctgatgatggtaatgattcagaaggtagagttgttcagcaagagggcctgtcattgacatcaaaattggatagttcttctaatgatttaattggtaaagtgggagatgctgctgcggttggtgttgcccttgggcagcattgtcacagtgacaatttaatttctgagcattcacaactaatggctgctggtgctactcataagatgcaaatgccatgccccccatctgagtctctatcagacttaaatgtgtcttcatcagcaggtggcccaattcttacgaaccaacctgctgcaggtgtcccatatgtgtctgtagaaactaccaagagctccatgacatctaaacatctccagtctcatcctcagagtttgagtcctcctgaacacatgccatcctcaaatatgattcagctaccaggacagccatcatttgcaacatcagaattccctcaaatgcagttccaccataaagttgttgcaccagcaaatgaattcttgcagaaccagatgagaagctaccctccacaagatgtgtctcatcctagaccattcgatttccatcatcatactctcccaccagcagttccttctaaccagcagccttctaccattcctgttgagaatgctccagtacctcatcataacagatggccagagtattctggtggtgttggtctatcctattcatctcatcggcctccatatggtcagcatcaacctcctgggaatcttgattcaggaagtaacttggtttatccctctttccagagatatccatcaaatctaccagtcagtaacaatattggtcccttatctgatgccgatttgactaaatcgtctatcaaaccccactacaatccatttgcatctacctttgataaaacagatccaagtctagatattgggcctcctgtaagccctaatgcagttggttctgtttccacaacagcagaacacatgaatacactgtctccttttggtcgatccagagcacatgcccatggaaattctgcagaacctgtgcccaatagacaaaagttactccatcaggagtttgcttctggtgctccgtatgatccattagttgacagtattgaaccatcaagcagttcaatcaacaaggtagatcttcgtaaagagaagaactggagtgctgctgataggcgtgatgcatcgaaatttatgaacctagaagtggacagtgaaaatatgcatggactgggggttgttgctgagtcagaagttgagggacttggagaggtggcagcagatactgagacaggtgtggtggagaatgcaagtcctgagttcttgggtggtaaagattggaactcagatatccctgttgattttgacaatgaccaaacattggacaaaaataagaagggtaaagattccagatcaatgaagctttttaagagtgctattgcagattttgttaaggaagttcttaaaccatcatggaggcagggtaacatgagcaaagaggctttcaaaactattgtcaggaaaacagttgataaggtttccggttcagttcctagcagtcatattccaaaaacacctgccaagattaaacattatgtacaatcctcccaaaggaaggtgaccaaattagtaatggggtatgtcgacaagtatgtgaagccatagagtaatgtggcattgtgctgaatcagaactgtcatggttccagagtctgtgctgcattctactaaatgaggctgcaaatttggtaatctttctgatgaaacggttgttccacagtaaggtagtttgctctagttctgcaggaaatgctgtattttattggagtgacatgtctagatgtgcttccagtattgataatttgctgcctgatttcttgtaccctgtaaggtatgtccttgttcttttgttaatgtgatatttccattcttctccagcatgggctaatagggtaatcaattgcagggtgcgatatttgtgcgaacatgctgctgaaagaactttgtttcttaatggtgattatgcatactgagagctgtaaggcttactgctgaatgaactttgtttctgaatggtgaatatgcatactgagagctgtgttaacttggctatcttagctctacagaaattgaaaaaggcacacttgatgcctttgcacattttcgaaagggcttttgaaagtcttggcaactatggttcttcctctagtcggcacatgtgtc

SEQ ID NO: 9783 - DNA, 3159 bp, Zea Mays
ccgcacgtgggtaacggatgggggctgcgcgggcggctgatgaaggccgcactgacggcgaacgagggcaagcacattggccgcgggaagtgtagaacggcggcaatcttcaagacaaagaagaggaattcttggggctgctgatttgagggaacacttgaagtctgataaatctcctccaaaagaatctgagtctggtggtggtggtatccatgggccatgtgctgaatttggacatcagcgcaatgccttggaccaaggaactaaagttggtgatggtgaaaatgttaacccagaaaacctctctctgtactacaaggatccaaaagggtgcatccaaggtccttttcctggatatgacatcattggttggtttgaagctggatattttggtattgatttgctagttcgtgttgccagtgctccctgtgattctcctttcttattacttggggatgtcatgccacacttacgggcaaaggtaagggtgcctccaggcttcagcaataccaaaccaagaagtatgacagatgcctcacatctaggatcagtgtatcttggaacatctgattatggatccataaacaagaatggctgtgtaactgaagcagaaaattactttttggaggctccagtgtctagtaaaatccagaatcctagagcagcaactaatgttgttactggaggtatgaatgaatggaggtttgtttccggtgagaaagtgaatagtataaaccatcttgaagtacagaaggtgcagttagagacagaaaatacctttcaaatagaaggtgatgtcatatcagttggagagtcacaaaagaaagaatcagtacagtcaacttcacactcaacattcttcccgcaaatggttgacccatcgagtgaagccctccaacctcagaatattaacctgctctcaatgctgcttcctgcagaaaaaggacaagcaccgactgctacttctggattgtcacttcggtcaaataatgctgactctggaaatctgcatgctggtatgtgtggtatagatgttactcaagagatactaaatgtgcaccaaaatctgcataattctcagcaaataggtattgatgctcaacagcattacgttttaacacagaatcaaccaactttagcttgtttgaactctcaaatcacacagccagaaaagtttctcggtggaatatatcatgatcctcagttaaacatcaaccaacaacagtatctgctatcagagctacacttgcaacccctgattcctggagtccctgaacctcaatcctctctattgaacaacatgctacagctcaggcagcaggagcaacagcaacaatacatttctcagtccatacctcatgatcgttccatgcagcagctttatgattcttcccatgggacaatacatacttcattgtcatctggtgaccgtatgaagctttgtcttcaaagaacagaagagattcttgatcttgctctgaagttacctggtcatggtaagcataatctacaactacatgcaagtgtgaaattgagagacacaggaaatattggtttgtcggaaagttgcgctactgccctaccactgccccatgaaatgatgggtcatgcagcttggaaagaatgttctgctagtctcacacagggctctgcagttgttgatgctctttcacaaaaagaaagtattgtagactcaccatctaagaaaactccaagttatggttctaacgattatagcaagatgactgtttttgaagttacaggttttcctcaaccatttcaaggtcttcagaaaccgaaaagtgtagcatctcatatctcaaatgaagttcatgaaatggatatttcctctgtccatcctcattcatggaaacctactccaggtgttagggctaaatcagtgttggaaattcaagcagaggaacgattggaaactcagagggaaatagccctggaaaatacaaaggtaactacaacaacagcttccgggctatctattcattgggttgatttggttgaaacttctgggcaacagtttggagatcaggctagacctatgtgtgataaaaaaaatgacaatatatcacagagtaacagaagtcatttacatgatttatcggcaagagaggaactgataaagtcaaatgctaaagctggtgttatcataaacagtgctgatgatacatcttttcctcctctggcaccttctattactcagtctgatgctcatattcatgatggtgctgatttcattgagttcaagggcacaagaaagataagtaacagggggaagaaacccaaaggttctgcagttaaaaccccagcatcacatgcaaatgttatacctggaccagctactgatcctgcacaggtacgcgaaccatgttctctgagaaatattcaggtggaagaagaacaggaatcagctaatcttcagcaactagtaccagcatcatcccatgcaaaagggcctatggaccagcatattcatgggaacaattcatcctggcaaggttctgaatcacctccatcgaggggtaacgaattcctcaaaatgacttctcatgtttccagtcactccactcctaattcagaagagtatctgttttgggagcctcgtgagcatgcaaagcaagataagccgagactccaatcacctccgagttccgtggtcaatacaaggtctactgcattggacattcataagaaggggaagaaaggtacaaagctgagcacgtcagctttggggttcaaggttcagagcacccgtatcatgatgggtgagatcgcgcatgttgacgagtagatgtccagactgaatttttatcatggtaggcgagcttcctgaagaatgaagatgatgacagtttggcggctgaagtgacgagaattcaaattgagcaactggcaaaggttttggttttcagcaggcttggttgtaacttgaaaatcgtataatgtttgttgctgggcggattttgtgcgaagcattgagcctggaaggttcaagattcaggtctaatttgcagtatggaatattcgagtgcttgcttgtgaccgtttcctgaaacagtcatctggtgtatagtttcctggaatctgatgggatcgtttgtcattaaaataatttacgtgcatatcaacattaacatttgccca

SEQ ID NO: 9784 - DNA, 1978 bp, Zea Mays
tttctcagcaccttcttgtgccgttcttcacccgtcgtctcctttccgcagcaaccatcagcgtccaacctcctctctcaccctctccgtttgcaacaaccgcccaacgccaggtgcccagatcggcgtcccttccagccattttccgcgtccttcgccggtgtcgaagcacccatcagcagtgtacctgcttcagttaatagttatctgatatctacccttggccaaagcaagctatctattgtgcctgtgatttttgttgggagctgtcatagttcagtttttggtaggaacggtcacagctctactcaactgaaggcatggctgtaaaatctagtagaagttcagatgaaagctatatagagcctctcctatgctggaagaaggaattcagatcatctgtaattaaaattgttgattcgtccttaaactcgagtttgatgtctgccgacagtatttgttcaattcctgcttcagaatatggtttctattttaataaacgaatgaagatggatgaggaatatgatcaccttctgacaaatggaaatatgaaagatagtagcacggcaaacttcacaaccactggatatgtctcatctccagagcgcaacatggatggtcaatcatgtatggttagttcaactacagaatttttagcaggatcacattctaatgttaatactggtcagccatcatcctcatcaagtgcaccatcttatatcagtcagagtattaaagaagcttgggagtgttcattgcctgatacaaatactccaaaaccattaacagagttaatatcagcgagggacctttgcatctccatcctcaaaaggaaaatatgttccgccaaagactcagaactaagcagaacatcaagtactatagaccgtgatgataatctaaacaatcctttatttgaatgcacaaaatgcggtctgatggaagatccatccaaaatgttaatttgtgattgttgtgaaggagcatttcatttattgtgttgcaatccacatgtcaagaaaataccagaggaagagtggtattgtttggcatgtaaaagaaagaaacctaagagacaacgtggaaagtttgcaaatcccaaagttgaatcatccaagggcattcaaagaccccgccgaggtcttggtcctattcgagatatgttactggattctgaatcatatgaaagtggggttcggattggtactaagtttcaagcagaagttccaaaatggtctggtcctatttctagttcgaggataagaaaaccagtatcggtaactggatccagtgccgggaagttctagacacaggagttgtttgtggcaaatggcggagggcaccattgtttgttgttcaatcaagtgactgggactgttcgtgctcagttgtttgggatcctatccatgctgattgtgctgttccacaggaattggagaccgttaaagttcacgagcaactgaagtacataaataagctgaagaatcgtctaggtgacagcaatcagaaacgctgaaaaacggtactcttgctgtcctgcaccagtgctgtccacagatgggtgtcgataccgtgtaccaattttcctcggatgcctcggatgaagtgagagccagtagatatgaaatccgtgtctacgcatgacatcttgacacataaaaatgctccttccagtcaaccggcatacgttatacgagtttcagtgtcgtgtgtaaataagagaaagaaaaggcattttaaaaacaaaagccatagcaaaagcaaaaaaaggaggaggagaagaaaatactcgatgctgctggagaactacaactcggtgagatggaaacagaaaggtctgggttgtatcatgaggtgtaaactggggtggtgggcgtgtggccgtgtttgtgtgtgtgtttacagttttgtcacctccgctgcttgaattatgatgaccgaagaatggatcacaatgctatagtttgatttcttttac

SEQ ID NO: 9785 - DNA, 2033 bp, Zea Mays
tttctcagcaccttcttgtgccgttcttcacccgtcgtctcctttccgcagcaaccatcagcgtccaacctcctctctcaccctctccgtttgcaacaaccgcccaacgccaggtgcccagatcggcgtcccttccagccattttccgcgtccttcgccggtgtcgaagcacccatcagtgtacctgcttcagttaatagttatctgatatctacccttggccaaagcaagctatctattgtgcctgtgatttttgttgggagctgtcatagttcagtttttggtaggaacggtcacagctctactcaactgaaggcatggctgtaaaatctagtagaagttcagatgaaagctatatagagcctctcctatgctggaagaaggaattcagatcatctgtaattaaaattgttgattcgtccttaaactcgagtttgatgtctgccgacagtatttgttcaattcctgcttcagaatatggtttctattttaataaacgaatgaagatggatgaggaatatgatcaccttctgacaaatggaaatatgaaagatagtagcacggcaaacttcacaaccactggatatgtctcatctccagagcgcaacatggatggtcaatcatgtatggttagttcaactacagaatttttagcaggatcacattctaatgttaatactggtcagccatcatcctcatcaagtgcaccatcttatatcagtcagagtattaaagaagcttgggagtgttcattgcctgatacaaatactccaaaaccattaacagagttaatatcagcgagggacctttgcatctccatcctcaaaaggaaaatatgttccgccaaagactcagaactaagcagaacatcaagtactatagaccgtgatgataatctaaacaatcctttatttgaatgcacaaaatgcggtctgatggaagatccatccaaaatgttaatttgtgattgttgtgaaggagcatttcatttattgtgttgcaatccacatgtcaagaaaataccagaggaagagtggtattgtttggcatgtaaaagaaagaaacctaagagacaacgtggaaagtttgcaaatcccaaagttgaatcatccaagggcattcaaagaccccgccgaggtcttggtcctattcgagatatgttactggattctgaatcatatgaaagtggggttcggattggtactaagtttcaagcagaagttccaaaatggtctggtcctatttctagagaagatgagtttgctgagcccactgaacttgatcgtagtaaaacgacaatgctgagtttcgaggataagaaaaccagtatcggtaactggatccagtgccgggaagttctagacacaggagttgtttgtggcaaatggcggagggcaccattgtttgttgttcaatcaagtgactgggactgttcgtgctcagttgtttgggatcctatccatgctgattgtgctgttccacaggaattggagaccgttaaagttcacgagcaactgaagtacataaataagctgaagaatcgtctaggtgacagcaatcagaaacgctgaaaaacggtactcttgctgtcctgcaccagtgctgtccacagatgggtgtcgataccgtgtaccaattttcctcggatgcctcggatgaagtgagagccagtagatatgaaatccgtgtctacgcatgacatcttgacacataaaaatgctccttccagtcaaccggcatacgttatacgagtttcagtgtcgtgtgtaaataagagaaagaaaaggcattttaaaaacaaaagccatagcaaaagcaaaaaaaggaggaggagaagaaaatactcgatgctgctggagaactacaactcggtgagatggaaacagaaaggtctgggttgtatcatgaggtgtaaactggggtggtgggcgtgtggccgtgtttgtgtgtgtgtttacagttttgtcacctccgctgcttgaattatgatgaccgaagaatggatcacaatgctatagtttgatttcttttac

SEQ ID NO: 9786 - DNA, 2036 bp, Zea Mays
tttctcagcaccttcttgtgccgttcttcacccgtcgtctcctttccgcagcaaccatcagcgtccaacctcctctctcaccctctccgtttgcaacaaccgcccaacgccaggtgcccagatcggcgtcccttccagccattttccgcgtccttcgccggtgtcgaagcacccatcagtgtacctgcttcagttaatagttatctgatatctacccttggccaaagcaagctatctattgtgcctgtgatttttgttgggagctgtcatagttcagtttttggtaggaacggtcacagctctactcaactgaaggcatggctgtaaaatctagtagaagttcagatgaaagctatatagagcctctcctatgctggaagaaggaattcagatcatctgtaattaaaattgttgattcgtccttaaactcgagtttgatgtctgccgacagtatttgttcaattcctgcttcagaatatggtttctattttaataaacgaatgaagatggatgaggaatatgatcaccttctgacaaatggaaatatgaaagatagtagcacggcaaacttcacaaccactggatatgtctcatctccagagcgcaacatggatggtcaatcatgtatggttagttcaactacagaatttttagcaggatcacattctaatgttaatactggtcagccatcatcctcatcaagtgcaccatcttatatcagtcagagtattaaagaagcttgggagtgttcattgcctgatacaaatactccaaaaccattaacagagttaatatcagcgagggacctttgcatctccatcctcaaaaggaaaatatgttccgccaaagactcagaactaagcagaacatcaagtactatagaccgtgatgataatctaaacaatcctttatttgaatgcacaaaatgcggtctgatggaagatccatccaaaatgttaatttgtgattgttgtgaaggagcatttcatttattgtgttgcaatccacatgtcaagaaaataccagaggaagagtggtattgtttggcatgtaaaagaaagaaacctaagagacaacgtggaaagtttgcaaatcccaaagttgaatcatccaagggcattcaaagaccccgccgaggtcttggtcctattcgagatatgttactggattctgaatcatatgaaagtggggttcggattggtactaagtttcaagcagaagttccaaaatggtctggtcctatttctagtagagaagatgagtttgctgagcccactgaacttgatcgtagtaaaacgacaatgctgagtttcgaggataagaaaaccagtatcggtaactggatccagtgccgggaagttctagacacaggagttgtttgtggcaaatggcggagggcaccattgtttgttgttcaatcaagtgactgggactgttcgtgctcagttgtttgggatcctatccatgctgattgtgctgttccacaggaattggagaccgttaaagttcacgagcaactgaagtacataaataagctgaagaatcgtctaggtgacagcaatcagaaacgctgaaaaacggtactcttgctgtcctgcaccagtgctgtccacagatgggtgtcgataccgtgtaccaattttcctcggatgcctcggatgaagtgagagccagtagatatgaaatccgtgtctacgcatgacatcttgacacataaaaatgctccttccagtcaaccggcatacgttatacgagtttcagtgtcgtgtgtaaataagagaaagaaaaggcattttaaaaacaaaagccatagcaaaagcaaaaaaaggaggaggagaagaaaatactcgatgctgctggagaactacaactcggtgagatggaaacagaaaggtctgggttgtatcatgaggtgtaaactggggtggtgggcgtgtggccgtgtttgtgtgtgtgtttacagttttgtcacctccgctgcttgaattatgatgaccgaagaatggatcacaatgctatagtttgatttcttttac

SEQ ID NO: 9787 - DNA, 3222 bp, Zea Mays
accacaaagccccccacccgaccatggaccaccagtccaccgcaaggcacactcctgtctccaccctgctccgctctttgctcccgctcccgctcccgctcgcctacgctacttgccgttcatcgccggccacagcctctgcccccgccgcttagagttcgcctccgtcgctgctgcaggagctagggtttccggcgccgggcgccggggtatgagcatccgccgccgccgccctgcaggatctaaggtttcgacgactccgctcactgatggagggtggtagaagggcgagcgagtccctctcggcatacacccatggaccatgacgatactgattttcagagccaaaattttcaactagctggtgtaggaagtagcaaattcccatcaggtttgcgaccatttgcactgccaaaacttgatatcgaggaccaactacaaggccatcttcgatttgataatttgatagattcagaagcatttttcagcgtacaagggcacgagaatagctggattgaggttctgtccactggaagcagtgttgttgattttagctctagcgcagctgaatcttgctcgatatctaaaactaataatgtctggtcagaggcaacgtccacagaatctgtcgaaatgctattgaaatcagtgggaggaaatgagacaactggtaacatggacagtaatgctcaccttcagttaattggtatggacagtcaaactgatcaatcgagtgttcatcctaaatctagtacctccccgacagatagtactgtagtgccaactgagaaagatcagtcttggagcactcattctagaatgactgctgacctttcaaacactgagtctcagcttgaacattttgtgcctttcttactggacaagaaagctgcgcaggcagcagattctgttgctgagaagtgccttacaggtgagaagttgtcctcttcaaacaacacaccaggaagctgcccaactgttggcaactattttggggcaggccatgatgataattctttggacaaatttaatgtaccctcagctgaagtagattcaaagaaattgaataatgaatctttcccagagttggctcccctgcagaacatatatactgattcatatcacttcaagaaagatattaaagaatctgaggctgttgttactcctcaagattcgaagttttgccatatcaatgaaaataaagttgaaggtggactacaagaactgcaaaatttgtcatgtgctggtcagtccttgggcgctgtaaacttgtccagtccaccaagcaatgaaactctattgtcaaaaagttctgatggattactagaagccatcacaaatccagttaagatgctgcacaggagcgatgatacttgccataaagtgaacatcactcttcaaccatcttttttagcagtgcaacatggaactgaaggcctgaaaagttcagttcacaggagcaatgagcttgttgttaaggagtttagtattggttcaaattctcttatctctcaccaatctgaggcagacccaagaaattctaatccacatcctgtcagttctgtgtctcccaaaagtaaaattaccgatgccacttgtgttcctgaagaaacaaacaacactgaaacgaatagtacaaacacctgctatacatatgatgaatcaaaacatgtagtgctggagtacaatcaaggttctgttgacaagctaaaaagtggtgacatgggagaaaaggcaactggggaggaaataccagcagtttcagggagcattgagcaaatgatagaaaattatcatgaagaaaatgctactggtacatccaacaataaggttggcctttccgacagtattgcacctgaaaactgtgcagctgacactttgaatgcttcagaggaaccaaacagtccttcgttaaatcatgagaggtcatttgaggaacacgaattgcctgctttaggagaggagcctaaaagcacaaatttactcctttctacttctgggtttcaagagaaaatttcagcatcagtgatcagttctagcagtggtgtcatgcctaccattgttactgacaacgttgctacttctgaggataataatggttgttcaataggtgtttcttctgttgattcttctgttttactagacgaaaaggatttgagaacgtccacagtgaataatgaggagccattcaaggaaggcactaaatctgctttaggagatcaagaaaacgatggtatttctcctggctctgaacaaggaggggaaatgccagctgtgcccatggattcaaacattgccgtttatagtgatactgtttctgctacagaaaaggagaaatacaaggaccatcctaattctttgggtagtttgaccacaggaggaacccaggataaatcaggtaaccatccagatgctctttcactgaaatgccagactggtagatcttcaatacatacagatcttatagatccaaccacggcacctatgttaggtatcccaactggaaaggtggctgaaaagatagtaaaaactccactgaatgcaagtgatgatttgaatgcacatatgcaagacatagtgttaaatcatggtacggattgtagtcctggtactgtgacatcccaaggaaaggaaggctcaagcttgctggaacctggtaatggtatctgcactggggttacatgcggatccccttcagtgattagttgcgctgaatcgtttccccaaggtggtggaaatggcagcaatgatttacttgatcacacactatgtgggcaatctgaggatcctaaagaccgtggggcctcagctgatgctactcagagatcaaaacaatgctgtaccagaaacatgaaatctgctcctggttctgaggagactagtgcagcaggaggtgatagaagcttttcatttgagacggtcacagaaaatcttcaagctggaagttctttgaaggatactagtgatgatagtaagaaaacatctactatagatgcttgtaaagaacaactatcagaaaggaaagtggctgaaagttctgggggcagccccccagacaactctaatataggcggcagcattaagagcagaagttcgccaccgcagcagcatccaatccctgagtgttctgtttcttctgcagatttagtgaattttccattcacagaggcacagcatttgcagctacgcgcacaaatatttgtttatggagctcttatgtga

SEQ ID NO: 9788 - DNA, 2701 bp, Zea Mays
tcctttcttcgtgcgcactccactttcgccggcgtcgccatggacgccaacgtcgtgcagcgctgcctcgaggccggcggccgcgacttcctcttccaccatacctcttcccctccctctccgacctccgcctctgccgctgcatcctcctccatcctccaatctctccccctccacgtgtccttcgaccgcgggtattacctcctcgtcaaggcgatccaggagctgcgtgcgcgcaaggacggccacgtcgttaccgtcggcatcggcggacccactggctcgggcaagaccagcttggctgagaaggtggcgtcggtgctagggtgcgtcgtgatcgtctccatggaggactaccgcacggcacctggtgtcgacgacggcatcagcgacgtcaatgccgtcgatttcgacgcacttgctcgcaacctccaggatcttgtgaagggtaaagatacaatggtgccactagttgattttcaagagaagaaacgcaccggatggagggaactgagaatttcttcatctggagtggtgattgtcgatggtgcgtatgctctgcattcaacactacgatcattgcttgatatccgagttgctgtggttggcggcgttcattttagcctgctttctaaagttcagcatgatattggagattcttgctcattggactatctaatcgacagtatatttccattgtttagaaagcatattgagccagacctgcatcatgcccaaattaggattgataacagctttgtctgctcatttcgagaaccgtactacaagctgaagtgcaaaaatgagtcatcagatggcaagaagttatattcttttgaacaaaataaagtggaaactgagaactttattgagatgtaccttaggccgccttttgcttctgaagaaatgaagattgatgattggattaaggttaggcaatgtggaataagatactatctatctctcggagaccaaaggattgttgacaagtacttcataatccgtccaaaagctgagtttgaggttggacgaacaactcttggaggattgttggccttggggtacaatgttgttgttagctttaagcgtacatgcacatctgtcaatatagatcaattactgatagctgcagagaccattgacactctaaatgagacctttttggtattaaaaggtccaagcagaaagattgttgcagcagaggcttcaaagcttggtataaagggaccatggatcacaaaatcatacttagaaatgatcttggagagcaaaggggttccacgacttaatacaccaccaccggtatcaagcaaactgctaactgaaagtcaagaaaagaaaattgctgcacctaaacctattcgtgtttctgctgaaaacattacaaatcttgatgacttgatgcaaccgtggacgagatccccgcccaagaagttggaacaagaacacgtattggcaaaatggcagtttatctcagattcttcttcaagaagtaacatccagctggctcctctgccagattcttatgacctggataggggccttctcctatcagttcaagcaattcaggcattgttggagaacagaggataccctatcattgttgggattggtggtcctagtggatcgggaaagacaagtttagctcagaagatggcaaatataattggctgtgaagttgtaagcttggaaagttattacaagcctgaacaagtgagagattataagtatgatgattatagctcattggatattgctttgctcactgaggtcatctttgaaggtgtgtacactttacatcctgctataaggaaatttctggatttgtggattgcagttgttggtggagttcattcacaccttattgcaagaatacagagagacaagaatcgtgctggcttttctatttctcagactgaaatcatgaccactgtgtttccactgtttcagcaatacattgaaccacatcttgtccatgctcatcttaagattcaaaacgattttgatcctgtgctctctcctgaaagctcactttttgtgttaaaaagtaaaaaacaggtatcctgccaagatatactgaaggtactagatgctagtaaagtctgcagttctgtccagaactttactgatgtgtacttacggcttcctggcataccatcaaatgcccagctgaccgaaggtgagtgtatccgggtcagaatttgtgaaggaagatttgcattgttgatacgagagcctataagggaaggaaattttattatccagccaaaggttgattttgatattagtgccagtactgttgcagggcttcttaagcttggttaccaagctgttgcatatattgaagcttctgcggtgatttaccaagatggaaaggttattatgttccttaaccagtgtagctcttttttttatttagagaaaaggatgcatacttgcctaccactaaatggacaaagtcttttttatttttgtaaaagtctccctactcctgtgctattatgccattattgcttgcttgtacaaagatttatcctttagtattattgctgagtatgcatgattaaggcttaaataacttaggaattgtgaattttgctggcacatttccaggtttggtttattatttgaatgcctttaatcctttattaagaggaaggttttaatgttttatcaaagcatcattacgtttttatcctgt

SEQ ID NO: 9789 - DNA, 680 bp, Zea Mays
cgtttgtttctcaaatacaagatgatactcaggctgtgactcttgtttctactcactccacgccactgactggcaggcgattatgtgattcatgaaccttcttgccatggcgacgatgtctgcagcgtctcatcgctgctgtgcttcttccttgagagctttaaccgtgttatttgtgttggcagctcctgtttcagatgtagaggggcgacatcatcgtcatgtctgtccttatttctcctgcggtggtttaagcaatatatcgtatccattccgtcggcaaggtgatccatctgggtgcggtgtccaatcgtgtgagctggtttgcacggatacagacgccacaattcgcatcggcagtggaacatacaagtctgcagccttcatgcggttacctagccatgactcctttgggtagtccaggcatgccggtgcccaagaatacaagctatccagatgttgttaagttcatgaggaatggatttgcccttggatttactgtttcgattcctgaccccaacatcagagaatgtttcgctgagtttatgcgtactttccttaaggatccaagaagtagtacaggcatcaaggaactgattgtggacattcttagggtcgtcgacatattcttggcttgtgttatctatcaacttcaatcaactaataataatggtgtcaca

SEQ ID NO: 9790 - DNA, 1776 bp, Zea Mays
atggcgacgatgtctgcagcgtctcatcgctgctgtgcttcttccttgagagctttaaccgtgttatttgtgttggcagctcctgtttcagatgtagaggggcgacatcatcgtcatgtctgtccttatttctcctgcggtggtttaagcaatatatcgtatccattccgtcggcaaggtgatccatctgggtgcggtgtccaatcgtgtgagctggtttgcacggatacagacgccacaattcgcatcggcagtggaacatacaagccaatagagaacaacgatatatatgagccggtgtcttgcttgagcagttcttctttcatctacatggtaactgacttcttgtatgatggctatgttcctgctgatagtctgcagccttcatgcggttacctagccatgactcctttgggtagtccaggcatgccggtgcccaagaatacaagctatccagatgttgttaagttcatgaggaatggatttgcccttggatttactgtttcgattcctgaccccaacatcagagaatgtttcgctgagtttatgcggttcgtattaatgccgctggcagtattcatcttcctagtctataaatactggaaaacaaggataacagtagatgcagtcgagaagttcttgcaaatgcagcagatgctcgttccaatgagatatgcatacacaaacatcattgctatcaccggccatttcagagacaagctcggacaaggtggttacggttctgtatacaagggggtgctacagccaggtgaagttcatgttgctatcaagatgttgggcaactccaactgtaatggagacgagttcatcagtgaggtcgccaccattggcaagatccaccatgtcaatattgtgcgcctcatcgggttttgctccgaggaaaatagcagggcacttatctacgagttcatgccccatggatctctcgataagtacatcttctcgtcggagaagagtttctcgtgggacaaactcaatgagatcgctctgggcattgctagaggtctcaactacttgcatcatgggtgtgatatgcagattgtacacttcgacatcaagccacacaacatccttctcgacaacaactttgttccaaaagttgctgattttgggcttgccaagctgttcccaaaagatgacaatttcgtgccactgagcgctatgcggggaacgattggctatatagctccagagatggtatctcgaagctttggtgttatctctagcaaatccgatgtgtacagctttgggatgctactattggagatgacgggcgggcgaaggaacgcagatcctcatgcaggaagctccagtcaagcatactacccatccttggtgtacagccagctgagccaaggagatgcgaacgagatcagtgaaggtgttgatatgcacgagttagagaagaagctatgtatcattgggctttggtgcatacagatgaagccgcaagatcggccgacgatgagcgaggtcatagagatgtttgaagctggtgtcgatggcatccaaatgcctccaaggccattcttttgtgatgacgagggtgatagttcttactctgcaatctctaaactggatacaatagaagagtagtagttgtagtaaaatacacttgtgtctatgtgatcttaatgtattagactactaataatgcaaggttgtcgtaagctaaggtactggttgtatacttttattgagagtgtggtaatgtgttttgatataaaatacctccatgaacctttttttacaaag

SEQ ID NO: 9791 - DNA, 2096 bp, Zea Mays
gaaccttcttgccatggcgacgatgtctgcagcgtctcatcgctgctgtgcttcttccttgagagctttaaccgtgttatttgtgttggcagctcctgtttcagatgtagaggggcgacatcatcgtcatgtctgtccttatttctcctgcggtggtttaagcaatatatcgtatccattccgtcggcaaggtgatccatctgggtgcggtgtccaatcgtgtgagctggtttgcacggatacagacgccacaattcgcatcggcagtggaacatacaagccaatagagaacaacgatatatatgagccggtgtcttgcttgagcagttcttctttcatctacatggtaactgacttcttgtatgatggctatgttcctgctgatagtctgcagccttcatgcggttacctagccatgactcctttgggtagtccaggcatgccggtgcccaagaatacaagctatccagatgttgttaagttcatgaggaatggatttgcccttggatttactgtttcgattcctgaccccaacatcagagaatgtttcgctgagtttatgcggtgagtatctgatcatcctatttcctcctatgcatgactttctcatctaaaaagcgtctgttacattcgctatgtaattcttttctatgctatggcatggcatggtcttgcagtactttccttaaggatccaagaagtagtacaggcatcaaggaactgattgtggacattcttagggtcgtcgacatattcttggcttgtgttatctatcaacttcaatcaactaataataatggtgtcacaactgttctcatcggcatcattgaaacgatacaatatgttagcggggtcctgaaatatacagcgggttcgtattaatgccgctggcagtattcatcttcctagtctataaatactggaaaacaaggataacagtagatgcagtcgagaagttcttgcaaatgcagcagatgctcgttccaatgagatatgcatacacaaacatcattgctatcaccggccatttcagagacaagctcggacaaggtggttacggttctgtatacaagggggtgctacagccaggtgaagttcatgttgctatcaagatgttgggcaactccaactgtaatggagacgagttcatcagtgaggtcgccaccattggcaagatccaccatgtcaatattgtgcgcctcatcgggttttgctccgaggaaaatagcagggcacttatctacgagttcatgccccatggatctctcgataagtacatcttctcgtcggagaagagtttctcgtgggacaaactcaatgagatcgctctgggcattgctagaggtctcaactacttgcatcatgggtgtgatatgcagattgtacacttcgacatcaagccacacaacatccttctcgacaacaactttgttccaaaagttgctgattttgggcttgccaagctgttcccaaaagatgacaatttcgtgccactgagcgctatgcggggaacgattggctatatagctccagagatggtatctcgaagctttggtgttatctctagcaaatccgatgtgtacagctttgggatgctactattggagatgacgggcgggcgaaggaacgcagatcctcatgcaggaagctccagtcaagcatactacccatccttggtgtacagccagctgagccaaggagatgcgaacgagatcagtgaaggtgttgatatgcacgagttagagaagaagctatgtatcattgggctttggtgcatacagatgaagccgcaagatcggccgacgatgagcgaggtcatagagatgtttgaagctggtgtcgatggcatccaaatgcctccaaggccattcttttgtgatgacgagggtgatagttcttactctgcaatctctaaactggatacaatagaagagtagtagttgtagtaaaatacacttgtgtctatgtgatcttaatgtattagactactaataatgcaaggttgtcgtaagctaaggtactggttgtatacttttattgagagtgtggtaatgtgttttgatataaaatacctccatgaacctttttttacaaag

SEQ ID NO: 9792 - DNA, 773 bp, Zea Mays
ccgcacatttgagtgcattccaacatgaccgtccctcactccctcttttgtcaaccgacgaagcgccagaacaggttcgaggctctctgggcctactcgtcatggtggagctgtcgtccatgtcgcggaaggaaaggaggaaaccccgccaaaacccccgccgcgtcttccttccttccactcccgtcctcccgacccctgtccgcctcgcttgcaaaatgcaaaccctagttcgttcgtctctccctgcttcatcgtgggcgggtgcaggcagctgttgaagtggggattgacattgatgatggctctactcttttgaagctggcatcaaaagttgattccatcatagaatctcttgagaatgataagcagaaggtcggggttggcgctgagatttcaagggaggctctgaaccatctgcttaatttgatttcaaagaagatgattgtgttaactgcagtgctgtctgtgaacttggcataccttctcgtcgatggttgcggcttagctgtatataagatctgaaaactatctttgcaatcaatcagtggttctgccagtggcggcttgaagtatggatatagtgctggtaagtacgaggacttgatcgcttcgctggtggaactattggccccactaagatatcggcgcttgggtttctgggacacgctgcaccgctactgctgttgggggcgtggttgttgagtaagccagtggccagcgctgcatgcactctggtgcctagctagcctctgcagacctgcaagcttttt

SEQ ID NO: 9793 - DNA, 1800 bp, Zea Mays
gggagcgcacagtataaacgagcgaacaccaagtcacgaaccttccgcttccccttcccctcaccgtgctgcgctgtttacgcccgcgtccccttccgtttccgttccattcgcctatcgtaccccctctccgtctctcgtcatcgtcggcccgtcgcagccacctccatcggcctccgatccctccacgagcctccggtcgaatccgaggagcaggatccgcggcggcgggcggcggtcgcccggcgatggcgcaccgtatggacaacgagtacgactacctcttcaagatcgtgctcatcggcgactccggcgtcggcaagtccaacatcctctcccgattcacccgcaacgagttctgcctcgagtccaagtccaccatcggcgtcgagttcgccacccgcaccctgcagcttatcccacacgctaaagctggagccgggctactatggcaaagccatctttcccgtgaaggtgcgggcgtcagcggagaaggtggccggctcatctgcatggtccggaggccaagcatcggatggccgaggagtgcctaagtcgagctgaaggctgtaccggaggccacaacccgttcttgatgatcttcaactatctgtgcatgtcttgaactggagcaagctcggggtttcacagatgcagacttatgggtacgacaaactgatgttcgccggtcagctggtgaagtgcaaccttattgcatcgttcattgtcatgagggagggtgcttggctgctcgcgccgctcgtcggcagcatcaccaagcagcacaacaacttcgcctgcaggatgtgcgagcacggagcacctcgtatgatacatgtgcacgcgagcatgaagatgaaggaaccctgctgctacatctaggttgaagggaaaaccatcaaagcccaaatatgggatactgctgggcaagagaggtaccgtgcaatcacaagtgcgtactacagaggagctgtgggtgcacttctagtctacgacatcacgaagaagcagacattcgaaaacatacagaggtggcttcgtgagctccgcgaccacgccgactccaacattgtgatcatgatggttggtaacaagtccgacctgaaccacctgaggtcggttgcagaggaagacgggcaggcattggcagagaaggaaggcctatccttcctcgagacatccgccctcgaagcgctcaatgtcgagaaggcgttccagaccgtcctctctgatattcaccaaatcataagcaagaaggcacttgcagcccaagaggcagcaggcagtgggcctccaggtcaaggaaccaccatcaacatcgcagacccatctgccaacacgaagagagggtgctgctcttcataagtaggtgcaaacaaagacatgctgctgcttctgcgaaaagaaaaccccccggtggatcatacaacacttttgttatgtagttgaccccttttggcctgtaactctggtgggttgtaatcacaattcatactcctgcaaagaaattctcctctcgggtagatacgatgtgtagtttcgagattttggtagaggccaatgtttggctggcagacttcgggtggagtccagcctcgtgttttctttcaatgttcttctacctcggtagtcttctgctggaaaaaaaaacatgatcagatacgttcttgtatttctacctgagtttgttgtattgtctccggtatattatatatacactaaaaactttgattcctgtgctacaacatgtatccgtgttgcttgtttgcgtcatggccgatgattgatttgagtctgtgg

SEQ ID NO: 9794 - DNA, 1882 bp, Zea Mays
ccttcccctcaccgtgctgcgctgtttacgcccgcgtccccttccgtttccgttccattcgcctatcgtaccccctctccgtctctcgtcatcgtcggcccgtcgcagccacctccatcggcctccgatccctccacgagcctccggtcgaatccgaggatccgcggcggcgggcggcggtcgcccggcgatggcgcaccgtatggacaacgagtacgactacctcttcaagatcgtgctcatcggcgactccggcgtcggcaagtccaacatcctctcccgattcacccgcaacgagttctgcctcgagtccaagtccaccatcggcgtcgagttcgccacccgcaccctgcagtgtaaactgggccttatgtgatgccgatcgagtgatcagcgtgctgctctcagctggcgtgcccatgaggtcatgtcctatctatttaaaatttatccatgccccgtcgatgccgacactaggatctgctccttcgccagcttatcccacacgctaaagctggagccgggctactatggcaaagccatctttcccgtgaaggtgcgggcgtcagcggagaaggtggccggctcatctgcatggtccggaggccaagcatcggatggccgaggagtgcctaagtcgagctgaaggctgtaccggaggccacaacccgttcttgatgatcttcaactatctgtgcatgtcttgaactggagcaagctcggggtttcacagatgcagacttatgggtacgacaaactgatgttcgccggtcagctggtgaagtgcaaccttattgcatcgttcattgtcatgagggagggtgcttggctgctcgcgccgctcgtcggcagcatcaccaagcagcacaacaacttcgcctgcaggatgtgcgagcacggagcacctcgtatgatacatgtgcacgcgagcatgaagatgaaggaaccctgctgctacatctaggttgaagggaaaaccatcaaagcccaaatatgggatactgctgggcaagagaggtaccgtgcaatcacaagtgcgtactacagaggagctgtgggtgcacttctagtctacgacatcacgaagaagcagacattcgaaaacatacagaggtggcttcgtgagctccgcgaccacgccgactccaacattgtgatcatgatggttggtaacaagtccgacctgaaccacctgaggtcggttgcagaggaagacgggcaggcattggcagagaaggaaggcctatccttcctcgagacatccgccctcgaagcgctcaatgtcgagaaggcgttccagaccgtcctctctgatattcaccaaatcataagcaagaaggcacttgcagcccaagaggcagcaggcagtgggcctccaggtcaaggaaccaccatcaacatcgcagacccatctgccaacacgaagagagggtgctgctcttcataagtaggtgcaaacaaagacatgctgctgcttctgcgaaaagaaaaccccccggtggatcatacaacacttttgttatgtagttgaccccttttggcctgtaactctggtgggttgtaatcacaattcatactcctgcaaagaaattctcctctcgggtagatacgatgtgtagtttcgagattttggtagaggccaatgtttggctggcagacttcgggtggagtccagcctcgtgttttctttcaatgttcttctacctcggtagtcttctgctggaaaaaaaaacatgatcagatacgttcttgtatttctacctgagtttgttgtattgtctccggtatattatatatacactaaaaactttgattcctgtgctacaacatgtatccgtgttgcttgtttgcgtcatggccgatgattgatttgagtctgtgg

SEQ ID NO: 9795 - DNA, 1888 bp, Zea Mays
caaccgagtccaccgccgtccgccgcagcctctaggccagggccagctaatttctcgcaggccgcgaacatgacactcacagccagttctagagcctgcaagattctcgtcctatcgccatctgttgcgtgctcgcacctcgccgcgcccccaagggctcacgctcgtgacgcgtcccacgcccccaccgcctcacgagcacgcccccccgtcgactcgcccgctccatcgcccccacgcacccgctgccggccaaaagccaattcgaatctccccgctgcgcggcggggcctctgcttccgcaatgcgggcctccgtcgaggaggcgggcgcgctcctggcgcggagcgactcagccggccgccgccgccgctccccgccgccggtgcagaccgcgtccccgaggcccggtagcctcaggcgccagtcgtcgtcgttccgcgaggacgtcgggcacgccgcctccgagacttacctcgtctcgcgcctcaccttcaccctcctccagtacctcgggttaggttaccgatggatgtcacaacttctttcactcacaatctatgcaattgtacttatgccaggatttatacaagttggatattactatttcttttcgagccaagtgcgtagaagtgtagtctatggagaccaacccagaaacaggttggatctatacataccagaagataatagtaggccctgtccagtggtggcctttgtgactggtggagcatggattattggttacaaggcatggggtgctcttctaggacgacgattggcagagcgaggaataatagttgcttgcattgattacagaaatttcccacaaggtacaataggggacatggttcatgatgcttctcaggggatttcttttgtgtgcaacaacatcgccagccatggaggagatcctaatcagatctacttgataggtcagtcagcaggtgcacatattgcagcgtgtgccctcatggagcaagcagtaaaagaatctggtgggaatcctgtttcttggagtcttacccaaatcaaagcatacttcggtttatctggaggatacaatatgcataatttggttgaccatttccacgagcgtggtcttaatcgctcaatattcctcagcataatggaaggagaggaatcattgtcacgttattctcctgaaattgttgcaaagacgtcaagtgctgaaaccatagctcttctgcctcttgttgttcttatgcatggaactgaagattattcaataccatcatcttccaggttgatgtttttcttttggatggataatctattgattgacccatcatgtaacaaatacagccttctcaattcatgttaccagctactctatcttctatgcgcagtcaaacttttgttgacgtcctccaacaagctggtgctcaagcaaggttactattgtacgaagggaaaacacatacagatatctttgtacaggaccctctaaggggtggaagagatccattggttgaagacgtgttgtctattattcatgctgatgatgcaaatgcatgtcaaaagattgctttagcaccaactcctaggagattagttttcgagtggcaattaaagttggcacgcaaaattagtccattctagcagtatgaaccatggagaagcttggagctatggattttgcaccttcatgaggaaagggtgctcgtctgctcggggagccgttgagctggattggatcaggtcaaggacatgtactgccaagatgaggagcatgaaggatgccgcgatgagttcgtgagaggtctaggccgtcatctcccagtcaactatggttgtggaggatcgttgtcttcagatcatataattatatagctaatttgtacagaactcatattatataataaag

SEQ ID NO: 9796 - DNA, 2427 bp, Zea Mays
tattaatgaggcgtgatgattgacttatctcacagactcacacacaagtgcacaactgaagtatgccattgtcgacaaattccatggctctaacaaacttgtgctcatgcccaagcagcagagctcatcagctgcagcttctatgcttctgcttggccctctcactgcatgtcccttatcatgccaattctctctccttcagctacagcttcttcaaccctgatgacttcaggccggaggacgacgcgcaggtcgtcgatggcaggatcgagctgctcggcgacgagttcagagggcgtgccagggggcgggtgtggcacaagcagccggtgcagctatgggacggcaccaccggcgaggctgccagcttcaccgcgaacttcagcttcagcatcgagtcagtggctggcaagggcgcggcaagcgctgggcacggcatgacgttcttcctcgcgccgtacacgccaaacttgccgcaggagtcctacgacggctgcctcggtctgttcgatgagagccaggcgcttaactactccaagttcaacgcgtccggcgactcgaggttcgtcgccgtggagttcgacatccgcaaggacatctgggacccgagcagccagcacatcggcatcgacatcaacagcatggactcccgcggcgactacacggtcttgccagacggcagcctcgtcgacgccggcgtgatgtccgcgacagtcgtctacgacaaccgcacgcgcagtcttcgcgtcaccctgatggtcggaagcgtcacttacacgtccgtagccaccgtggacttgagaagcttgctgccggagaaagtcgcagttggtttctcggcggcgacaggcgacgagtacaacgcaaaccacacggtgctttcgttctctttcgcctcgacgttggcaaccaagaacagcacctccatgcctgtgactgtgacctcgtccaccaagaaggccaccctgcaactcggcgctggagcggccgccgcagcgttgctggttttcctgctcgtcgccaccgtggcgctgctactagttcggcggtcaagcagaaggggcaagaaaccatacgatgacgagcagctaaccacagacggcgacgactccctcgacgccgtcgatgacagccacttcgagtccagcacggggccaaaacctatcccgtacgcccaactcgcggcggcgacgaaggacttcgcggcggagggaaaactggggcagggcgggtcggggtcggtgtaccgcggccacctgaaagagtccggcctcgatgtcgccatcaaggtgttctctcggggggcgtccatggagggacggaaggagtaccgggccgaggtcaccgtcatcagccggctgcggcatcggaacctggtgcagctcatcggctggtgccatggccggaggcggctccagctggtctacgaattggtcagcaatggcagcctcgatgaccacctctacagcacagagataccagataattcttggattgtcttccgccgtgctgtaccttcaccaagagtgggaccagtgtgtcgtccatggcgacatcaaaccgagcaacatcatgctggacgagtccttcaacgccaagctcggcgacttcgggctggcacggctcatcgaccacggaatgagcctgcagaccatgactgccgtcgctggcacgccagggtacctggacccggagtgcgtcatcaccggcaaggcctcccccgagtccgacgtgtacagcttcggcatcgtgctgcttgaggtcgcctgcgggcgccggccgatggcgccgccagcgagcacgggcgagggcaaggacggccaggtgttccggttggtggagtgggcttgggacatgcgcggccggggcgccgctctagacgccgcggacgagcggcttggtggagccttcgacccgtgggagatggaacgcgtggtctccgtcgggctctggtgcgcgcacccggacccaaagatgcgaccgcggatccgccaggctgccgaggcactgcggtcgagaagcttcaggatgccgctcctgccgcccaagatgccggtcgccgtgtacctgcagccgttcggtccctccaccctgcacttcagcgacaccaccacctccgtcgggtcttctgttaccgtgccgtacacttcgaccacgagccgtgcgacgacggcgacggggacggggatgtctaactccagctcgccgccggcggtcactcaacacttgagcccaagagcataggtcaaatgtacaactgtacggcgtacgtcggtatgtgtgtagtgtaattttgttaaaacaaaatacacttaaaagctaggcaaaatttcctaatgtatttttgagaattatgtgcactcatcgcatgagactttcaattgtcctgctacacctagcttttaaaagaataaaatatgattatgg

SEQ ID NO: 9797 - DNA, 1991 bp, Zea Mays
atgccgccccctcccttctcccattacacccgcaagtggatcgagagccatttctctcttctcaaggaggaaatttcaagccccatagctgctcatattctcaacttctacgatggcggccttggtgacgacctcttcgaagcggcgactaccgcctccggtccatttcatgccaccgatgacgatgtttcttcgtctaccactaccacccctcctatctgcggctacagcgacgacgctccggctgctgctggtgccacggcctactccccattgccatccttggacgccactctcacggccctccttgagcaagagcaacaccacggccttgacaccggggaccttccgcagatcaatggcctttcagaagtagcatactacccaaccgccaccgatgaggccagcatagggcaattcaaccagatggggcttccggataccttagctgaacagatgcttccgatgcagatgaacagcagtgcatccgccttgatgccactcacttcggactacgatgagtgcttcacagcggcgttagctgaagggttcatgggtctggatggagccatgtatcatccgcaaactggagcaattcttccaggctgcgatgcagaagcatcacagcaggggttcttcaacagtgccagcagcaatggtctggtgatgattggcgagtaccagaagatgatggagggtgaaggactgacaacaacatatgacgacacagattccatgaaaggggcatttaatactaatgcagagatgcaggtaggaggaaatgatcagcacctggtaaacggatgcaatgggaacccagaactatcaggattggaagactccacattcaaggttgtccgcttgtcacccgaagagaagaaggaaaagatccataggtatagaaagaaacggaacgagagaaatttcaacaaaaaaataaagtacgcatgcagaaaaaccttggcagatagcaggccccgtgtccggggaaggttcgcgaagaatgatgagctctgtgaagcagcagcgcaatcaggctccctgaattatggacattatgaacaaactgtaagtttttaattaaactacacaatcttatcaaacagtctggcataactagaagatatggcgatattaaatgttacgggaatgtaacttgatgcatatggagacaaatcgtaagattgtaatagatgaaaaaattaggccatgattttaagtccctgccccattacaatgatggaaaacatgaatgttcttatgtattttcattgttattaaacaaaagcctgacatatttctatgcgtagttaacaagaactcttacctttttcaggaccatatgaaagaagaagccatgctggacacatctgacattcttgcgcatctaagtgaattaaattcctacaactacaagtataaatgcaccatcgaatcatggatgtgattctcaagtctcaaccacacaaactaagacccagtgtcttaattcaagttgtgcaacattgagcacagttttttttcatttcctttaaaataaacttacagcattagaagctcaatttcaggtcgagaacttagttcagctaatgtagatttaatgtatgtgtgaatctgctcacttgtttaccattgtcacaagtgaatgtggtagttagtctccagaagagtggtttgtgtatataactatgccatttatagaaataaaagttctgaggatctcttcaatatttctttgtcacagagtctagatttggcctgctcagcaaattccaaggatagcaacgatacatcaacataatcataataacatggttacagagcacagtaataagtaaagttaatatattggaatgtcacctaggtgccttgtagcctgtgcccctatgtgcagaaagatcaagagtcagaaccaacaatgaacaatgaataaccgtagcaaaaatgtttaaaactatactcaagagctcagtaaggttcatggtcttgct

SEQ ID NO: 9798 - DNA, 2550 bp, Zea Mays
cgggtcatgtgactgggtccgtaggaagtgcgggcgtgagggacgaggccgagcggtgtgaggaaatagaaccgggagactggagcggaggcgggaggaggaggagggagaggggatcgagaggaacgcgcgcgaacagaagagaggaaggaagaggaggtggcaggctcggttccgcgcgcgccgacgtgagattccgggccgcacgtgcccgcagtgtgatagatatcatcttgaggtcttcataagtcagcaacctagagcagaaaatgtcagctccggaattcaggacttcttaccagcaatcccctgagaatgtcggtcaactcaaggtctgccaatgtgggtcgggcgactccaattttcagatcacaaataaatccgacggtggcgaaaattcaccaacaacttgtccaaactgtcaggtccttaagagtggaaatttactgctttcatctaaaggtgttatttcttgctgggattggctggacagtatggaaaaagcgttggtttattcttacaaggacatcattagtgttcttcaggagcgatcctaatgttccccctcccagaggaagtgaaccaattgttacacttggtggaattgacttgaataacactgcaagtatgatagtcaaagaagaaaggaaacttataacagtcgtgtttcctgatggccgtgacggacgcactttcacccttaaggcagaaactacagaagacctaaatgagtggagaagtgcattggagaatgctctggctcaggcacccagtgttgtgaatacagcgggacaacttccagtagtcagcactgacataacagaacctgttgaagctgctgttgaacaattgcattcttcgagagatgccatcttctccaattccggcaccatgttgcactgccctggaactgacaagacaaaaagactcgatgctatgaatagagtgatatatgaagtattcccagaaccaaatcgtcaattgttgcagaggatattgaagacggttcgtactcttcagatgcttataccgagtctgacattgacaaggaatattctacagacaatgacatccctgaagattatgatggctcctctggttctggtgaagatgttgaagaagatttgaatgatgatactgaacactcttatggcatgaaggtcgaatgtgatagtaacattaggattgataatgcaaatgataagggctcatattacgaagcttgaaaacaagaagactcatctccaatctaaacttacggaggaggagaaagaaaatacagtcctccaggcaaatttagaaaaacgaaaagaagcattacacaagcgccgtgtagcacttgaaaaagaagtggaaaatttacgagaccagctactgaaggagagaagtttgagggcttctctggagtctgggctaatgaatatgcgaagaggacaagtgtccttcccctcaacgatagacaccaagactaaggctgatcttgaggaagttgctgccgttgaagctgatattatgaacttgaagcaaaaggtttctgatcttcggggacaactcaacaaccaagttcagttgagttccacctcgttatgtgaatcatgcaacaacaagcgatccataaatgcagacaagcttgtcgaaggtgaacaaaacgctgccctttctccacagattgcctcagtcgaagcaccacctattgtagggtcttattctgtacctgacatgttctgggctacaaaccaaatggttcagaagatgttgtattcaaagggtgagattgcgaaggatggccaagacggatcacttacatcaagatggaactttgcacagagaccacactcaaatagtccagtcatgagcagggttcaaggttccgatgcctattcaagtactaaaaccgaggaatctggaggcgcaccttcctctgcattagcgaagctgactacccgactcaactttttgaaagaaagaagggccttgcttgccagtgagatgcaaaacttagatctgggccgctcccaggcccagaggcatacagctcctccgaaagctgagactccaactgagaagtagaatcgttttactgcatcgttgttaggccacaagctcaggtaggattgcaggcagtaacagaaaacttcgattcgacaatgcacagagactatctagctatagagtaacttgatttgtacatcgcacaggcattcatgtcttcaccctgatgattcatatgtcaagttttttagcgacaccgacgaacaacctggtttgtactattttatctccaaataaacaatactcctactctgggacaaagccaaagtgcgtttgcaaattatttgtcggtctgtctggtactctggtttgtacatcaacttcacttacgatcaagctaagtaaaaataccgtaccatgtgtatctatgccttcagtgtaacctaatagcaattccagtaaaacttggcagtcccagtgccaaaaagagcgaccagtatacctgcttgaacatcgtgctccgttaagttggcagttccagtgccaaaaagagcgacc

SEQ ID NO: 9799 - DNA, 2710 bp, Zea Mays
cgggcgtgagggacgaggccgagcggtgtgaggaaatagaaccgggagactggagcggaggcgggaggaggaggagggagaggggatcgagaggaacgcgcgcgaacagaagagaggaaggaagaggaggtggcaggctcggttccgcgcgcgccgacgtgagattccgggccgcacgtgcccgcagatatcatcttgaggtcttcataagtcagcaacctagagcagaaaatgtcagctccggaattcaggacttcttaccagcaatcccctgagaatgtcggtcaactcaaggtctgccaatgtgggtcgggcgactccaattttcagatcacaaataaatccgacggtggcgaaaattcaccaacaacttgtccaaactgtcaggtccttaagagtggaaatttactgctttcatctaaagggattggctggacagtatggaaaaagcgttggtttattcttacaaggacatcattagtgttcttcaggagcgatcctaatgttccccctcccagaggaagtgaaccaattgttacacttggtggaattgacttgaataacactgcaagtatgatagtcaaagaagaaaggaaacttataacagtcgtgtttcctgatggccgtgacggacgcactttcacccttaaggcagaaactacagaagacctaaatgagtggagaagtgcattggagaatgctctggctcaggcacccagtgttgtgaatacagcgggacaacttccagtagtcagcactgacataacagaacctgttgaagctgctgttgaacaatcagagaataagtctgtaattggcagaccagcagaatttgcacttgtcgatgctgatggcactacagcattcctgcagaaggccttaaagttcatcgaagattatggtgttaaggtcgaaggaattcttcgtcagtctgctgatgttgaagaagtcaaacgcagggttcaggattacgaaaagggaaagaatgagttctccccagaagaggatgcacatgttatcggtgactgtattaagtgcattcttcgagagatgccatcttctccaattccggcaccatgttgcactgccctggaactgacaagacaaaaagactcgatgctatgaatagagtgatatatgaagtattcccagaaccaaatcgtcaattgttgcagaggatattgaagacggttcgtactcttcagatgcttataccgagtctgacattgacaaggaatattctacagacaatgacatccctgaagattatgatggctcctctggttctggtgaagatgttgaagaagatttgaatgatgatactgaacactcttatggcatgaaggtcgaatgtgatagtaacattaggattgataatgcaaatgataaggcaagaaaaggcttgccaacagaggaggatggctgttccagtgataacgacaacttctgaactagggctcatattacgaagcttgaaaacaagaagactcatctccaatctaaacttacggaggaggagaaagaaaatacagtcctccaggcaaatttagaaaaacgaaaagaagcattacacaagcgccgtgtagcacttgaaaaagaagtggaaaatttacgagaccagctactgaaggagagaagtttgagggcttctctggagtctgggctaatgaatatgcgaagaggacaagtgtccttcccctcaacgatagacaccaagactaaggctgatcttgaggaagttgctgccgttgaagctgatattatgaacttgaagcaaaaggtttctgatcttcggggacaactcaacaaccaagttcagttgagttccacctcgttatgtgaatcatgcaacaacaagcgatccataaatgcagacaagcttgtcgaaggtgaacaaaacgctgccctttctccacagattgcctcagtcgaagcaccacctattgtagggtcttattctgtacctgacatgttctgggctacaaaccaaatggttcagaagatgttgtattcaaagggtgagattgcgaaggatggccaagacggatcacttacatcaagatggaactttgcacagagaccacactcaaatagtccagtcatgagcagggttcaaggttccgatgcctattcaagtactaaaaccgaggaatctggaggcgcaccttcctctgcattagcgaagctgactacccgactcaactttttgaaagaaagaagggccttgcttgccagtgagatgcaaaacttagatctgggccgctcccaggcccagaggcatacagctcctccgaaagctgagactccaactgagaagtagaatcgttttactgcatcgttgttaggccacaagctcaggcattcatgtcttcaccctgatgattcatatgtcaagttttttagcgacaccgacgaacaacctggtttgtactattttatctccaaataaacaatactcctactctgggacaaagccaaagtgcgtttgcaaattatttgtcggtctgtctggtactctggtttgtacatcaacttcacttacgatcaagctaagtaaaaataccgtaccatgtgtatctatgccttcagtgtaacctaatagcaattccagtaaaacttggcagtcccagtgccaaaaagagcgaccagtatacctgcttgaacatcgtgctccgttaagttggcagttccagtgccaaaaagagcgacc

SEQ ID NO: 9800 - DNA, 2719 bp, Zea Mays
atggaattaagtggaggtgatgctgatatcttgcaattaagaggtccttaagagtggaaatttactgctttcatctaaagggattggctggacagtatggaaaaagcgttggtttattcttacaaggacatcattagtgttcttcaggagcgatcctaatgttccccctcccagaggaagtgaaccaattgttacacttggtggaattgacttgaataacactgcaagtatgatagtcaaagaagaaaggaaacttataacagtcgtgtttcctgatggccgtgacggacgcactttcacccttaaggcagaaactacagaagacctaaatgagtggagaagtgcattggagaatgctctggctcaggcacccagtgttgtgaatacagcgggacaacttccagtagtcagcactgacataacagaacctgttgaagctgctgttgaacaatagaataagtctgtaattggcagaccagcagaatttgcacttgtcgatgctgatggcactacagcattcctgcagaaggccttaaagttcatcgaagattatggaaagaatgagttctccccagaagaggatgcacatgttatcggtgactgtattaagtgcattcttcgagagatgccatcttctccaattccggcaccatgttgcactgccctggttagagcttaccgaactgacaagacaaaaagactcgatgctatgaatagagtgatatatgaagtattcccagaaccaaatcgtcaattgttgcagaggattctcaaaatgatgcagattgttggatcacacaaagctgtaaataggatgtcttcatctgctttggcagcttgcatggcaccgcttcttctccgtcctcttcttcttggtgaatgtgaaattgatagtgaattcagtatggctggggatggttcattccagttgcttcaagctgctgctgctgccaaccatgcccaagctattgttattattatgcttgaggaatatgatcagatatttgatgtacctgcttttccctggacgtgcttttctttgcaagcttgttctatttgaacccatactgtattgttatggattttaatccaacaattacctgtttaggatattgaagacggttcgtactcttcagatgcttataccgagtctgacattgacaaggaatattctacagacaatgacatccctgaagattatgatggctcctctggttctggtgaagatgttgaagaagatttgaatgatgatactgaacactcttatggcatgaaggtcgaatgtgatagtaacattaggattgataatgcaaatgataaggcaagaaaaggcttgccaacagaggaggatggctgttccagtgataacgacaaggctcatattacgaagcttgaaaacaagaagactcatctccaatctaaacttacggaggaggagaaagaaaatacagtcctccaggcaaatttagaaaaacgaaaagaagcattacacaagcgccgtgtagcacttgaaaaagaagtggaaaatttacgagaccagctactgaaggagagaagtttgagggcttctctggagtctgggctaatgaatatgcgaagaggacaagtgtccttcccctcaacgatagacaccaagactaaggctgatcttgaggaagttgctgccgttgaagctgatattatgaacttgaagcaaaaggtttctgatcttcggggacaactcaacaaccaagttcagttgagttccacctcgttatgtgaatcatgcaacaacaagcgatccataaatgcagacaagcttgtcgaaggtgaacaaaacgctgccctttctccacagattgcctcagtcgaagcaccacctattgtagggtcttattctgtacctgacatgttctgggctacaaaccaaatggttcagaagatgttgtattcaaagggtgagattgcgaaggatggccaagacggatcacttacatcaagatggaactttgcacagagaccacactcaaatagtccagtcatgagcagggttcaaggttccgatgcctattcaagtactaaaaccgaggaatctggaggcgcaccttcctctgcattagcgaagctgactacccgactcaactttttgaaagaaagaagggccttgcttgccagtgagatgcaaaacttagatctgggccgctcccaggcccagaggcatacagctcctccgaaagctgagactccaactgagaagtagaatcgttttactgcatcgttgttaggccacaagctcaggtaggattgcaggcagtaacagaaaacttcgattcgacaatgcacagagactatctagctatagagtaacttgatttgtacatcgcacaggcattcatgtcttcaccctgatgattcatatgtcaagttttttagcgacaccgacgaacaacctggtttgtactattttatctccaaataaacaatactcctactctgggacaaagccaaagtgcgtttgcaaattatttgtcggtctgtctggtactctggtttgtacatcaacttcacttacgatcaagctaagtaaaaataccgtaccatgtgtatctatgccttcagtgtaacctaatagcaattccagtaaaacttggcagtcccagtgccaaaaagagcgaccagtatacctgcttgaacatcgtgctccgttaagttggcagttccagtgccaaaaagagcgacc

SEQ ID NO: 9801 - DNA, 3409 bp, Zea Mays
atggacagaaagccagccggtaaaaatagcttcaggcaacaggagaagcagaaaaaaaatgagaggttggactggaatgacctggtcctggctgggccttttgtccttcattcacattcccaaactgctccatcactttataccgccgtctcatctcgtgctcgtggtgtccgtgttcctcctcttggcggggccggccagaaaagcttgctggacggttggctccggaaaccggatgcgtctcaggtcaggcgcctgatttttacttgggttcccatggttcgtttccacagcgcaaaccacctcccagcttttagtcagtatagtctgctggagcccatggaggtgcagctggcgacggagcaaccgggggacccgttcctgccgctgcggtgggagagcacgggcgaccagtggtggtacgccacgcccatcgactgggcggcggccaacggccactacgacctcgtccgggagctcctgcgcctggaccccaacctcctcgtcaagctcacctcgctccgccgcatccgccgcctcgagtccgtctgggacgacgacgcgcgcctcgacgccgccgccaggaaccgcgccgccgtcgcccgccgcctgctgctcgactgcgagcccgataacgacaagcagcccccatcccgcggaggcggaggcgacgccgccaaccgcctcctccgcgccggctacggcggatggctcctctacacggcggccgcggccggggacgagaggttcgcgcgggagctgctcgcggcgcagccgctgctcgtcttcggcgagggggagtacggcgtcaccgacatcctgtacgccggcgcgaggagcggacgccccgaggtgttccgcctcctgttcgacgcggtgctgtccgcggcgccggcgtgcccggtcgggggtgacgacggcgagtttaggcgcgagatgatgaaccgcgccgtgcacgccgcggcgaggggaggcagccttgccgtgctcagggacctcctgcgcggctgctccgacgccgcggcatacagggacgcgcagggatcaacgatcttgcacgccgcggctgcaaagggccaagttgagtcatggctagagcttcatggaatatgaactatgagaaggttcttgttgacatcttgcacgagcacaatcatgtgaagtaccggggccagaatggttgggcaccagaaggttggcgttctatgacacaaatgttcaatgagaagtgcccgttggctaagtttacaaaggcacagatccaggaaaaagaaaaggaacttaaggcaaactataaggtgctgaaggaagcccgcaagcaaagtggtgttggatggaatgaggccatgggtatgatcattgctgaaccaccaatatgggcaaatataattgttagtaatccaaaggtcaagaaatttcagtcaaggccattccctttgtataatcagttgtcagcactctatgatggcagttgtgccaccggtgatctcaattttacatcaactcagcaacatacatcatcccgacaacaattacatattcaagctgaagttgaagctgaagctatgagctctttcaggattgatgatgacctcggggttaaccctgatttgaaccaaatctcttcaaatttgcatgggttgggatcttcaagtacccgtgttgagattggtggacatgaccgcaccccggcatcttcagaacagcgagcggagagtcatggaaggaagcgtaagcaaagtcagattgctggggttcttgaggaatatttggattacaaaaggcaacataatgataagttgcttgatgtggtaaatcagattgatcaacaagctgagggatgtaacaagaaggaagaatattgtattggaaagtgtgttcgtgtgttagagtcgatggaagatataactgaagaggagatggcagcggcaatgggtgtgtttaagtgcgaggagaacagagaaatatttctgaacagccagaggccacgtgtccgattgttgtggcttagaaacgagatccacaagcagatgtccaccaatctcaatattttcagatgtccaccaagcctttagtttcctgcttgttgttgctgctggccttacttattctatgcatttctggaattctgtctggctggtagcctccaagatctcttcgatctcgctgaaaaacgtcacttccttttgacaatttgttattggccagtaccttaacaaaccaattatcactgggcttgcgagctctagatccttttctataaactgtgtcacacagtaggtcaaccgcttatttccttatcccacttttcttgtttcttcttgtttattctacactgcactacaaccatctataatttccttatcccacttttcttgtttcttcttgcctaatttctcactcaagttactactgcccgcagattcttgcttaatttctgatttggttaatagtatatatttcttctgttgttgcagggaggcaatggatggagctctgcgacaataaatacaagatgttcaaaagaacgttattgttgtgttaacattttgggcataccaagtacttttttttgttatgagtctgtcaaacatatgttaaatttgtcactaatttcttatgagctatttctgtggtcaaagaaagttgtttatttaagtggcatgaatcaaaaaatcttaggagacttctgtttgattttgtttatttttaaaagaaagttgcttcagcgtacaaattttgaggggcatattgttgtttttgcgtacaaatttctgtttgattttgttgatttttattttttctattttacttgtgatttgatgatgatcacacttctagcagctgccgatgtgtggctccagagggcagcagggcagctgacccatggggcaccaaaggatgtcagggcagcgcagccccgctgggcaatgcccacccagggaattcgtatgacaggaatttgccccctccggtgctagctcccctgtgttttattggccccggtcaccaaaggatgtcttaggtgccgtggaagcccctgaacctgaactgtccgtcggcgtcgaggcggccccgcgcgtcggacatccactcgctcctgaggtcgatgagcctctggccggcgtcgttgacggtgccgtcggcgttgacgagcgcggcgtcctgcctccacatgtggccctgcatgaacccccagagcacgacgccctgcaccgccgggtgcgcgaacgcctcgcgcaggaccacctcgaggtcgtcggcgcggagcgcgtcgtcgggctcgcagacgtcgacctccgtgaaccagacgggcaggccggtggcggcgtagaccgtgtcgagcgcgtcgcagatgacctcgccgacggggtgggtgacgtggccctgcatcccgacgccgccgacc

SEQ ID NO: 9802 - DNA, 597 bp, Zea Mays
cttcctctcccctaggagatctctgtttcccatctgcacttccgagttccaggcttccaaccgctgtggaattttggctaccatcccactttcgctttgggtgaaagataaagaaaaagaactttggctaatgagggtcgtcgcaggaattcagtgagaacacaaagaatgtgctcttgtcatgtgcattcatacacttggaaaagaaggagttcatcaagcagtttgctgagatttcatcaataaaccaacgaattttgttattcggtccagcaggttctgagatttatcaggaaacattggtaaaggcacttgcgaaacattttggtgctagacttcttgtcgtggattcacttttgctaccttggagaggaaggataaggacacaaagaaaagaagtaaaaagaggataaaggtatactctagcttatgacctgctgcctatttgtgaaattgttgcgatttatctagtgtatatatatttagttatgataactctgttctaggtactttgcttacttaaaatttgtttgatgccctcaccaattagaaaccgggactgataaacatgtccaaacagagcatgttgtctcatat

SEQ ID NO: 9803 - DNA, 889 bp, Zea Mays
ggagatctctgtttcccatctgcacttccgagttccaggcttccaaccgctgtggaattttggctaccatcccactttcgctttgggtgaaagataaagaaaaagaactttggctaatgagggtcgtcgcaggaattcagtgagaacacaaagaatgtgctcttgtcatgtgcattcatacacttggaaaagaaggagttcatcaagcagtttgctgagatttcatcaataaaccaacgaattttgttattcggtccagcaggttctgagatttatcaggaaacattggtaaaggcacttgcgaaacattttggtgctagacttcttgtcgtggattcacttttgctaccttggatccctgatggtaatgatcttggtggtttgtgcgaggaagatcatggcttcttctgctctgctgaatcacttcgcccagacttttctgctggtgaagaagttgagaggctagctatgaccgagctaatagaggtcatttcagaagagaacaaatctggacctctgattgtgttacttaaggatgtagagaaatcattcattggagttaccgagtcactttcatcttcacggagcaaatttgaatcgcttccatctggtgttcttattataggatcccacactcagatggacagccgcaaagaaaagagaggaaggataaggacacaaagaaaagaagtaaaaagaggataaaggtatactctagcttatgacctgctgcctatttgtgaaattgttgcgatttatctagtgtatatatatttagttatgataactctgttctaggtactttgcttacttaaaatttgtttgatgccctcaccaattagaaaccgggactgataaacatgtccaaacagagcatgttgtctcatat

SEQ ID NO: 9804 - DNA, 973 bp, Zea Mays
  misc_feature (973)..(973): n is a, c, g, or t
aacaaatccaactcgccgcacgcgactgagatgagcgcgccgccgcacgtttcttacaccgcgctcccgccaccacctcctgctcccactgccacctccttctcgcagctcccgcctctgcccgacgtcgtcggtggatgccgcgtcaaggctggcgctaaaccacctgggcccggcgcaaatccaccagatccattcgcagctcttattgtccctactcttgtgagagtcgcgaggacgagctttccccctcttgagatccgatgtctaatccatttttcaagttatccctgccctcagcatgcggttcctaaaacctccctccaatcaagtacatgcaaaagttcgcgaagataaccgattttacccttactttaagaattgcctaggttcaatatatggaacccacgttccaatatcaatgtcacctaatcaagctgcaccattcaggaatagaaaagggacacttagtcaaaatgtgatgttcgtttgtgattttgatctcagagtcacttatttgtcagctggatgggaaggatcagcaacagattcaatggttctcagatctgcaatgaccaattctataggaaagttctaactagtagatggtggttatgccaatacagcttcctttcttgcgccttatcgtggggttaggtaccacttgaaagagtttcttggaatgaaaaaagatgcatgatcattgctgaaccaacgatatgggacaacattatcactacatttcttagagctaagaagttccgcaagaagtcttttcctctcaaccactacaaaattctgatgaaggagagaaatttaaaaccatagaagtggaagatgaagatactaatgaaccacaagtagatgcgagaatagaacaagatgaagatatagtaattgttgaaagggttgaacagaggttacctaaaaggtcagatgcaccaattgtcaatcaagagaaggagacaaagan

SEQ ID NO: 9805 - DNA, 3113 bp, Zea Mays
gacgcaccaccaagcccctgcccccgcaaccccgctgcaccgcgcccgatctctgtcgtcgacaccgccgcctccggcgaggccctttccgctcttgaggtttccacaggtgtctctcagcctccgcaccctgcctcgtgggtttccccgggctcccctgccccaaaccctaaccctagctcctggcgtggggccgtgcaggttcattccctgctcaatcgggcgccccatttggctccctctgccccccacagacccgtagggttgcatttcaggtatgtagaatgccgtgccgtgctgtatgtgggaggtccgagtggtcagtgcgggggggctgcgctggctgctgctgaattgttctgcatttgggttttggcgggcgtggggtggtacatgcactcgtccgctccacgtaatagtcgctgagccagagttaactagtaacgtgcatgagcttaaagcacgtgttgccacttttcagttttgggaaaatgtggctattgagctgtgctctatgggaggtattgctgaatgtggtgtgagcattgacactaaagcttcaccacgccgtgcagccatagagaaagctcaggaggagctcaggcaggaatatgatgtccgtgaagaacgaaggagagagcttgaatttcttgagaagggaggcaatcccttggatttcaaacttggccatgtagcttcccttagtgtacagtccacttctgtgacagaacagatagctgaacaaaatgtgataagtgaggccaaaggtagttctgcatttgctacgtcatctcatggagattctgttgaaagcaacgacaagccaggaaattcattgtgccgtgaaggcaatacagccgataatcttacgcttttggatggagatgccagcaacctgggtgtggataaaattgtgaaacatggaactaagagaactaattcagctcaagctgagcagttcctgcactgtgatggtcagaacaatgcaaaagaagaagattctgggttgttccgtcttggtccaaagagccaagcgtatgcacgacgtaggtcaaagcctatcagagaaaatgcatatagtctatctgttatgtacccaccaattcctccattaagttctcagcaaaaagatgtgacaggattaatcccagaaaccaagactgaggataatggtgtttcatccattggtgattcaaaaccgactagtcctaactctaaaaatatggtgacaaatgcatcattactgaatgataaggtggaaatggagacagaaaatgttcaagcaattcctgaaggcaatcaagcaccaaaaaacgagttatcaaacagcaacaatggtagtcctgctatggagatttcaccaaatagtgtgcctgataattctcgtcttactgtaagtgatcagatggctactgcatttgtttctgtggaatccccagatgctatttcaaaagtagctgcttcaaggatagtttgttctctcccatatatatccaatgaaatattgaaagaagcacaaactcttgagaaggcaggtaataacccatctatggtaagtgtggttgacgttcatgcatatggtatggataacaatggtgcagcaccttactctgctgtgaaaagtgctagtttgaatgaaaatgaagttgatccaattcatgcatatgctgccaaagctgttactgaacatccagaccaaaatgagaatcttgtaccagtgaatgcagatgaaatggctgatgaaggcttgaatgagatcctacctgatgacaaggatgacaagaaagattgtcaactggaagttagtagtgggcctgtcattttgaatgacagttctactcctgtctatcctgaatttagcaatttcttttatgcaaaagatggaacagaagtttctaacaatgcagtagattcaaaaaataacgcagaacagcatgcttcttctaatcagggaaaagggaacatggaggaatgtaaagattctgatggaaacaatgcaagtgaatcgagtgttgcccaaaagctagtgtctgttattgtgctccctgcttcagacacaggcgatgtgagtaactttgtagaaaatgatgttgagaaatctagcagagatcaggagaaggtagcaaagaaggaatatgaagattctgtcgtggcaaagaaggatcacgaagatgctatcctcagaagggcacggtatatagaggcaaatattaagagggctggtgaatggtctctctgcaatatttctctagagaagaagcagaagagccactgggattttgttctggaggagatggtctggatggcaaatgacttcacacaggagcgtttgtggaaaaatacagtcgcagcacagatgtcccattggatttcttctagaggtcgagcggcatttgaagaagcaagcattcagagaaagcagaaatctgttgctagagttctagccaatggtattatgaacttttggtgttcagtccatactttacgagctagtggtggtattcctaaaccaatgcaaatacagcaaccgaatgagctagaggaaaataagcttggtggggtcaaaaccagaaaagcggatgaggagtgtttggagcaagaaaagtcccgtcagtctcctattcagagctttgcacttaggcttcttgagtataacattaatgcatctgaatttctgccattagccgaagcaccatcaactcctgacaggctaaatgattttggcattttgaaagtacctgatcaactttcagaagcaaatctcttttatggcgtagcacccggtgcaatgcaggcatacagggagtctatggagcgtctccttatttataataacaagatgccagctggtcattcaggtcctggaagtccatggtcaagttttgaggatcaggctcttgttgtccttgtccatgatatgggtgaaaactgggaattggttagcgatgcccttaacagcatcatccaattgaagtgcatatacagacggcctaatgagtgtaaggaacgccataaacttctcacggataaaagttgtggcgacggtgctgacagcgctgatgactcaggctcatctcaacactatccttctgcattgcctgggattccaaagg

SEQ ID NO: 9806 - DNA, 592 bp, Zea Mays
aaacggccgaataaaacgccccgaaaggtgacgcaacataaagaggtgctacaggaaaaaggtgttgttagagccacataaagaggtgctccagaaactctaggtttttgtggagcagctccacggtggagtgtctcgagcagtcccaaacatgccctaagttcagatgtgaatatgactcccagtcactccgctagatgttttgatgtcaacgagcatacattccctctgctggatgactcccagttagtccctaccctctgctgccaccaagagtgtggctgcctattggtacatactgtagcaaggataaatagtttcgcaagtaaccctgcttgtatcctcatgtgggatattttgattattagtgatcaaggccctgtttgtttccttccaggattattagtgattaaggccctgtttgataaatagttctctagattatataatccacctaataatctatgatgtttgtttgcctcccaacttatttaagctggattatataatctcgagggtaaacaaacatggcttaattcaggtgcatttagggtttcttaatctacgtggaagtgtgtgctttcatatcctt

SEQ ID NO: 9807 - DNA, 2763 bp, Zea Mays
aatgcatgcaacttttgtttattttctcagacagcttcaagcttggttgctatgtgtgttcatctgagaaacctactgctgccgtagatgcgttggtgtttgatcctcccagtttgcgagaaagctctaacgcaaggcctgctccttgctgcacaggcaattcttctattgtccatgttgagctgtcggtgaagctgagattgctggttgctttgtactcaggctgtcgcattgccctctgtactattggtaagaagggattaaggcagcctggcagcaccagagtggagagatggttggacactgatgatgcgatgtgtacttctgtggcttctgagcaacagattcttgctgtcgggtgcagtagaggtgttgttgaattgtatgatctagcagaaaacacacgccatatacgaaccatttcgttgtatgattgggggtattcagtggaagataccggtcctgttgcctgtatatcttggacgcctgacaattgtgctcttgcagttgggtggaaatttaggggacttactgtatggtctgtgtctggatgtcgattgatgtgtactattcgtcaaactggttcaaattctgcctcatctcctatggtgaaacctagcgctctaaaatttgagcctcttatgggaggaacatcacacattcaatgggatgataatggatataagttatttgctgtcgaagaaagcttgtcagaaagggttcttgctttctcatttgccaaatgttgcccaaacagagggctttcaggcacaacatattcccaccaggttctttatggggaagatcgaatccttttggtgcaaccggatgatgccgatgaactgaagatattgcatcttaatgttccaaactggccagttctacatgtggtggcaagcaatgatgggatgtacttggcagttgctggctctcacggactagtgctatatgatttgcgaaataaaaggtggcgtttttttggtgatgttacacaagagcaaaagatccaatgcaaaggcctattgtggatgagaaaaattgttattgtgtgcaactatgttgaatcgtcaaacacgtatgagctcctctttttcccaagatatcatcttgattatagttctttactctaccggaaacaactgcttggaaggccaattgtcatggatgttttccaggattatatattagttacttacagtccattcgatgtacatatctaccatgtggtggtctcgggagaattatctcctgctagcaatccagttttaaagctttcaacattgcgagaactttcaatcatgagtccaaaaagcccacctgtttcaatgcgcttcattcctgaacaaaatgacaaaggagcgctgacagaagatactcatggattttctgatcttttgtcccagcaaccatcaagatgtttgatcttgcggaccaatggggagctttctgtgcttgacatggacgatggacatgaacacactctcacaaattcaattgaactcttttgggtcacctgttcgcagtttgaagagaagggtagtcttatcaaggaggtttcatggcttgattacggtcatcggggtatgcaggtgtggtacccatcacatggagcagatcgttttaagcaagaggattttttgcagttggacccggagcttgagtttgatcgtgaggtgtatcctcttggtcttcttccaaatgttggtgtggttgttggtgtttctcagagaatgtccttctcaactgcggagtttccatgctttgagccttcacctcaagcccaaacaatattgcattgtttattacgacatctccttcagagggacaagattgaagaggctttgctcttggcaaatttgtccgcagaaaaacctcatttctctcactgtttagagtggcttctgtttacagtatttgatgcagatatatcaaggccaagtgcttcaaaaaatcaggcttcacaaaaagttgattctcccaagaaatctcttcttgagaaaacttgtgacctactacggaattttcctgaatatatggatgttgtagtcagcgttgctaggaaaactgatggacgacactgggctgatctgttctctgcagctggacgatccacagagatgtttgaggaatgcttccaacagaggtggtacaggactgctgcttgctacatactggtcattgctaagctggagggccctgcagtcagtcagtattgtgcactccgtttgctacaagctacacttgatgagtctttgtatgagcttgcaggggagttggttcgcttcttactaagatctggaagagattttgagaatgccacttcagactctgagaagctatctccaagatttctaggctattttctgttccgttcaccttataagcggcaatcttctgatttgaaaagtaactcaacgaaagaacttagtccacatattgcttctgttatgaacattctagagcgccatgctagctatttgatgtctggcaaggagctttctaaactcgtcgcttttgtcaaggggactcaatttgatcttgtggaatatctacaacgagaaaggcaagggtctgctcgtctggagaattttgcttctgcactcgaactgattggacaaaagctccaaatggatacactgcaaagccgacttgatgcagagttccttctagctcatatgtgttcagtcaagtttaaggaatggatcgtggtgctagctactttgttgcggcgtacagaggtatctctaacatggtcacaatcat

SEQ ID NO: 9808 - DNA, 3790 bp, Zea Mays
ctgacccccatttcgttccttccagatctccccgcccccgcatctcgcccgccagctaccggcgagtgggcgcgcgcccgccgccgccgcgatgtacctggcgtacgggtggccgcagtcgatccctctggacccggacgactcggaccgcgtggtcctcctccgcgtgctcggccgcctcctcctcgccgtctgtccggcttcgcttcacctctggtccgccgcccaacaccgggtccgcctagcccgctccgatcgctccccggagtccctcgccacccatggccacaacgcgcacgccgcgtggagccccgacgccaggaccgtcgccgtcctgacctcttccttctacctctacgtttacaaggttcagcactcgggaaagcaactgatcgtcggtggcaagcaggtcccggggctttgcctggctagtatatccctaatcatcaccgagaaggttcctctcgccaatggcgttgctataacgagcaatttcgtgtgtgacagcaaaagcatgctcctcggactatccaatgggcatgtgcaggtcgtgtcctggaacgctgagttctcagacagcttcaagcttggttgctatgtgtgttcatctgagaaacctactgctgccgtagatgcgttggtgtttgatcctcccagtttgcgagaaagctctaacgcaaggcctgctccttgctgcacaggcaattcttctattgtccatgttgagctgtcggtgaagctgagattgctggttgctttgtactcaggctgtcgcattgccctctgtactattggtaagaagggattaaggcagcctggcagcaccagagtggagagatggttggacactgatgatgcgatgtgtacttctgtggcttctgagcaacagattcttgctgtcgggtgcagtagaggtgttgttgaattgtatgatctagcagaaaacacacgccatatacgaaccatttcgttgtatgattgggggtattcagtggaagataccggtcctgttgcctgtatatcttggacgcctgacaattgtgctcttgcagttgggtggaaatttaggggacttactgtatggtctgtgtctggatgtcgattgatgtgtactattcgtcaaactggttcaaattctgcctcatctcctatggtgaaacctagcgctctaaaatttgagcctcttatgggaggaacatcacacattcaatgggatgataatggatataagttatttgctgtcgaagaaagcttgtcagaaagggttcttgctttctcatttgccaaatgttgcccaaacagagggctttcaggcacaacatattcccaccaggttctttatggggaagatcgaatccttttggtgcaaccggatgatgccgatgaactgaagatattgcatcttaatgttccaatttcatacatttcccagaactggccagttctacatgtggtggcaagcaatgatgggatgtacttggcagttgctggctctcacggactagtgctatatgatttgcgaaataaaaggtggcgtttttttggtgatgttacacaagagcaaaagatccaatgcaaaggcctattgtggatgagaaaaattgttattgtgtgcaactatgttgaatcgtcaaacacgtatgagctcctctttttcccaagatatcatcttgattatagttctttactctaccggaaacaactgcttggaaggccaattgtcatggatgttttccaggattatatattagttacttacagtccattcgatgtacatatctaccatgtggtggtctcgggagaattatctcctgctagcaatccagttttaaagctttcaacattgcgagaactttcaatcatgagtccaaaaagcccacctgtttcaatgcgcttcattcctgaacaaaatgacaaaggagcgctgacagaagatactcatggattttctgatcttttgtcccagcaaccatcaagtttgaagagaagggtagtcttatcaaggaggtttcatggcttgattacggtcatcggggtatgcaggtgtggtacccatcacatggagcagatcgttttaagcaagaggattttttgcagttggacccggagcttgagtttgatcgtgaggtgtatcctcttggtcttcttccaaatgttggtgtggttgttggtgtttctcagagaatgtccttctcaactgcggagtttccatgctttgagccttcacctcaagcccaaacaatattgcattgtttattacgacatctccttcagagggacaagattgaagaggctttgctcttggcaaatttgtccgcagaaaaacctcatttctctcactgtttagagtggcttctgtttacagtatttgatgcagatatatcaaggccaagtgcttcaaaaaatcaggcttcacaaaaagttgattctcccaagaaatctcttcttgagaaaacttgtgacctactacggaattttcctgaatatatggatgttgtagtcagcgttgctaggaaaactgatggacgacactgggctgatctgttctctgcagctggacgatccacagagatgtttgaggaatgcttccaacagaggtggtacaggactgctgcttgctacatactggtcattgctaagctggagggccctgcagtcagtcagtattgtgcactccgtttgctacaagctacacttgatgagtctttgtatgagcttgcaggggagttggttcgcttcttactaagatctggaagagattttgagaatgccacttcagactctgagaagctatctccaagatttctaggctattttctgttccgttcaccttataagcggcaatcttctgatttgaaaagtaactcaacgaaagaacttagtccacatattgcttctgttatgaacattctagagcgccatgctagctatttgatgtctggcaaggagctttctaaactcgtcgcttttgtcaaggggactcaatttgatcttgtggaatatctacaacgagaaaggcaagggtctgctcgtctggagaattttgcttctgcactcgaactgattggacaaaagctccaaatggatacactgcaaagccgacttgatgcagagttccttctagctcatatgtgttcagtcaagtttaaggaatggatcgtggtgctagctactttgttgcggcgtacagaggttttggtggatctctttcagcatgatttgcgattgtggaaagcatatagcattactctacagtcacatgatgtattcagggaatatcttgaccttcttaatatcttggaggaacagctttcgtctgtctctgatcttacattgcagaatggaccattgtcatgaatgctggacggtgacactgattgaaaaaaacaactgaatacggcgttttagccttgagttaattaacacatacggcgggaccaggaatctgatgtaaatagattattcagggtgtttttctctttgagcaacaccccgaggtgctatggcagttttttgtacagtgatcagctaagcacctattgttgtatcattagtttgttgcagcggagttgagtctgcattcttcgccttactgtaaatatgtgctgcgcccttaacattgtaagccatataccattctgagcagcaagttcttttctctgttccatagaatcgtgtttaaagctagaagcctagaacatgtagatagtcttcacctgatgtttgtagactccgagatattattaaaactgacactatgatttcttaattgcattttttccatggcata

SEQ ID NO: 9809 - DNA, 3812 bp, Zea Mays
ctgacccccatttcgttccttccagatctccccgcccccgcatctcgcccgccagctaccggcgagtgggcgcgcgcccgccgccgccgcgatgtacctggcgtacgggtggccgcagtcgatccctctggacccggacgactcggaccgcgtggtcctcctccgcgtgctcggccgcctcctcctcgccgtctgtccggcttcgcttcacctctggtccgccgcccaacaccgggtccgcctagcccgctccgatcgctccccggagtccctcgccacccatggccacaacgcgcacgccgcgtggagccccgacgccaggaccgtcgccgtcctgacctcttccttctacctctacgtttacaaggttcagcactcgggaaagcaactgatcgtcggtggcaagcaggtcccggggctttgcctggctagtatatccctaatcatcaccgagaaggttcctctcgccaatggcgttgctataacgagcaatttcgtgtgtgacagcaaaagcatgctcctcggactatccaatgggcatgtgcaggtcgtgtcctggaacgctgagttctcagacagcttcaagcttggttgctatgtgtgttcatctgagaaacctactgctgccgtagatgcgttggtgtttgatcctcccagtttgcgagaaagctctaacgcaaggcctgctccttgctgcacaggcaattcttctattgtccatgttgagctgtcggtgaagctgagattgctggttgctttgtactcaggctgtcgcattgccctctgtactattggtaagaagggattaaggcagcctggcagcaccagagtggagagatggttggacactgatgatgcgatgtgtacttctgtggcttctgagcaacagattcttgctgtcgggtgcagtagaggtgttgttgaattgtatgatctagcagaaaacacacgccatatacgaaccatttcgttgtatgattgggggtattcagtggaagataccggtcctgttgcctgtatatcttggacgcctgacaattgtgctcttgcagttgggtggaaatttaggggacttactgtatggtctgtgtctggatgtcgattgatgtgtactattcgtcaaactggttcaaattctgcctcatctcctatggtgaaacctagcgctctaaaatttgagcctcttatgggaggaacatcacacattcaatgggatgataatggatataagttatttgctgtcgaagaaagcttgtcagaaagggttcttgctttctcatttgccaaatgttgcccaaacagagggctttcaggcacaacatattcccaccaggttctttatggggaagatcgaatccttttggtgcaaccggatgatgccgatgaactgaagatattgcatcttaatgttccaatttcatacatttcccagaactggccagttctacatgtggtggcaagcaatgatgggatgtacttggcagttgctggctctcacggactagtgctatatgatttgcgaaataaaaggtggcgtttttttggtgatgttacacaagagcaaaagatccaatgcaaaggcctattgtggatgagaaaaattgttattgtgtgcaactatgttgaatcgtcaaacacgtatgagctcctctttttcccaagatatcatcttgattatagttctttactctaccggaaacaactgcttggaaggccaattgtcatggatgttttccaggattatatattagttacttacagtccattcgatgtacatatctaccatgtggtggtctcgggagaattatctcctgctagcaatccagttttaaagctttcaacattgcgagaactttcaatcatgagtccaaaaagcccacctgtttcaatgcgcttcattcctgaacaaaatgacaaaggagcgctgacagaagatactcatggattttctgatcttttgtcccagcaaccatcaagtttgaagagaagggtagtcttatcaaggaggtttcatggcttgattacggtcatcggggtatgcaggtgtggtacccatcacatggagcagatcgttttaagcaagaggattttttgcagttggacccggagcttgagtttgatcgtgaggtgtatcctcttggtcttcttccaaatgttggtgtggttgttggtgtttctcagagaatgtccttctcaactgcggagtttccatgctttgagccttcacctcaagcccaaacaatattgcattgtttattacgacatctccttcagagggacaagattgaagaggctttgctcttggcaaatttgtccgcagaaaaacctcatttctctcactgtttagagtggcttctgtttacagtatttgatgcagatatatcaaggccaagtgcttcaaaaaatcaggcttcacaaaaagttgattctcccaagaaatctcttcttgagaaaacttgtgacctactacggaattttcctgaatatatggatgttgtagtcagcgttgctaggaaaactgatggacgacactgggctgatctgttctctgcagctggacgatccacagatatgaccaaactttcatgataggatgtttgaggaatgcttccaacagaggtggtacaggactgctgcttgctacatactggtcattgctaagctggagggccctgcagtcagtcagtattgtgcactccgtttgctacaagctacacttgatgagtctttgtatgagcttgcaggggagttggttcgcttcttactaagatctggaagagattttgagaatgccacttcagactctgagaagctatctccaagatttctaggctattttctgttccgttcaccttataagcggcaatcttctgatttgaaaagtaactcaacgaaagaacttagtccacatattgcttctgttatgaacattctagagcgccatgctagctatttgatgtctggcaaggagctttctaaactcgtcgcttttgtcaaggggactcaatttgatcttgtggaatatctacaacgagaaaggcaagggtctgctcgtctggagaattttgcttctgcactcgaactgattggacaaaagctccaaatggatacactgcaaagccgacttgatgcagagttccttctagctcatatgtgttcagtcaagtttaaggaatggatcgtggtgctagctactttgttgcggcgtacagaggttttggtggatctctttcagcatgatttgcgattgtggaaagcatatagcattactctacagtcacatgatgtattcagggaatatcttgaccttcttaatatcttggaggaacagctttcgtctgtctctgatcttacattgcagaatggaccattgtcatgaatgctggacggtgacactgattgaaaaaaacaactgaatacggcgttttagccttgagttaattaacacatacggcgggaccaggaatctgatgtaaatagattattcagggtgtttttctctttgagcaacaccccgaggtgctatggcagttttttgtacagtgatcagctaagcacctattgttgtatcattagtttgttgcagcggagttgagtctgcattcttcgccttactgtaaatatgtgctgcgcccttaacattgtaagccatataccattctgagcagcaagttcttttctctgttccatagaatcgtgtttaaagctagaagcctagaacatgtagatagtcttcacctgatgtttgtagactccgagatattattaaaactgacactatgatttcttaattgcattttttccatggcata

SEQ ID NO: 9810 - DNA, 3256 bp, Zea Mays
tctctctctctctctctctctctccgtgccccccaggccctcctcccaggctcccagcccccctcccgtccctctctctgtctctctccacgcaccatggcgatctccgagctcgggtgagctgacaaggtgggcgtcccgtacctagtaccgctgcctgcctcgggtgaacgagcgtcggttcggctcggtgcagaatgcggccgatttgagcgaggacgggaggggcgcgatggatgcgggttcgggcggattcgcgaggaggctctagaggaggttaggtttcggccccggccccggcccggctgtgggagatgagctcctcgtccgcggccagcatcgggcagcagccgccggaggaagagaagaagtgcctcaactcggagctgtggcacgcgtgcgccggcccgctcgtctgcctccccaccgtcgccacgcgcgtcgtctacttcccgcagggccacagcgagcaggtggcggcgtcgacgaacaaggaggtggacgggcacatccccaactaccccaacctgccgccgcagctgatctgccagctgcacgatgtcacaatgcatgcggatgtggagacggatgaagtgtacgcgcagatgacgctgcagccgctcaacccacaagagcagaacgacccgtacctgcctgcggagatgggaatcatgagcaagcagccgacgaactacttctgcaagacgctgactgcgagcgacaccagcacgcacggcgggttctctgtgccccgtcgcgcggccgagcgtgtcttccccccactgtgtggtttgtaggatttcacacagcagcctccagcacaggagcttattgcacgggatattcatgatgtcgagtggaagttcaggcatatcttccgagcccaaaagacacctgctgactactggctggagtgtgtttgtcagtgctaagagacttgttgctggagattctgtgctattcatatggaatgagaaaaaccagcttctgcttggaatcagacgcgccagccgtccacagactgtgatgccctcttctgttctttcgagtgacagcatgcacattgggctccttgcagcagcagctcatgctgctgcaacaaacagccgtttcacaattttctttaatcctagggcaagtccatcagaatttgttatacccctttcgaaatacatcaaggcagtttttcacacgcggatatcagttgggatgcgattcaggatgttgtttgagacagaggaatctagtgtccgcaggtacatggggacaataactgaagtgagtgatgctgacccagtgcgttggcctagttcctattggagatcagtgaaggttggctgggatgaatcaacagcaggagaaaggccacctagagtttctctgtgggaaattgagccactgacaacctttcctatgtatccatccctcttcccactgcgagttaagcatccatggtattcaggagttgctgctcttcatgatgacagcaatgctttgatgtggctgagaggagttgctggtgaagggggctttcagtctttaaacttccagtcacctggtgtaggttcctggggacaacagagactccatccatccttacttagcaatgaccatgatcagtatcaagcagtggttgctgccgcagctgcttcccagtcggatggttatctgaagcagcaattcctacaccttcaacaacctatgcagtccccacaggaacagtgcaatctcaatccgctgttgcagcagcaaatactacagcaagggagccaacagcagatggttagtcctgatgctcaaaatatccagtccgtgctcaacccaaatgctattcagcagcagctccaacaattccagcagatgcagcatgctcataatgaccagaagcagaagattcaaccagatcagccgtaccaagttcctagcagtgcggttctctcgagtccaacatcattaccaagccatttgcgggaaaaatttggcttttctgatcctaatgtcaactcttccagcttcatcagctctagcagcaacgagaatatgctggaatcaaacttccttcagggaagctcaaaatctgtggatttgtctagattcaaccaacctgtagttagcgagcagcagcagcaacaggcatggaagcaaaagtttatttgctcacaatcgatgtcttttgggggctcggtttcacttaactcacccactaccaaagatggtcctgttgacaacaaaattggtcgtgatgtgcagaaccagaccctttttagccctcaagttgactcttcctccctactgtacaatatggtacctaatttgacctcaaatgttgcggataataatatatcaacgattccctctggatcaacatatctgcaaagtccaatgtatggttgtctggatgactcttctggtttattgcaaaatacaggagagaatgatccgacaactagaacattcgttaaggatcggtggggagatccttggacatcacccggttctctaattatgctgaacttcgagaggaactgggtcagatgttcggcattaagggtcagttggatgaccctgatagatcaggctggcagcttgtatttgtcgacagggagaacgatgtgcttctccttggagacgacccgtgggagtcatttgtgaatagtgtatggtacatcaaaatactttcacctgaggatgtgcataagatgggaaagccaggaaacgatccacgctacctatcttaaattgatacccagagctctttcgggctcccgtgacgattctgtggcacactgtagcactgtccatggcggtccggtgtgctgtgctcccatgttcgctggtgtcacctctagcatgtacaccgtgcgcgtcttcagaactcccccgttacttgtatccggtgcaggccaccgctctggactgatatcttgtaggttccacttaggaatcagtatcagcgactctatcctagttggtttgtagctcgcacggcactcgttcttgtgtcgcatcgaaatcttcaggctaaatgcttagttgaaactgttcccgtgattcttaagctatctatgtatttgaggattccccggcatgctttcgacgatgaactgcaataatctgaatgcaggaggattgtttgaatgctatcttgtgtctgccgggtgctgggtgcaaggttgattttgacgcatctagctttagcttatgacgtttcaggtgttctctgtctgaaactatttttatgcatggtgagttgatg

SEQ ID NO: 9811 - DNA, 3352 bp, Zea Mays
cacgcgcacacacacgctgctgaatgctgatgccgcttcgcccctccgccgtctcgcttaaatgcccaggcctaatcattcccacccccagtccctctgccctctctctctctctctctctctctccgtgccccccaggccctcctcccaggctcccagcccccctcccgtccctctctctgtctctctccacgcaccatggcgatctccgagctcgggtgagctgacaaggtgggcgtcccgtacctagtaccgctgcctgcctcgggtgaacgagcgtcggttcggctcggtgcagaatgcggccgatttgagcgaggacgggaggggcgcgatggatgcgggttcgggcggattcgcgaggaggctctagaggaggttaggtttcggccccggccccggcccggctgtgggagatgagctcctcgtccgcggccagcatcgggcagcagccgccggaggaagagaagaagtgcctcaactcggagctgtggcacgcgtgcgccggcccgctcgtctgcctccccaccgtcgccacgcgcgtcgtctacttcccgcagggccacagcgagcaggtggcggcgtcgacgaacaaggaggtggacgggcacatccccaactaccccaacctgccgccgcagctgatctgccagctgcacgatgtcacaatgcatgcggatgtggagacggatgaagtgtacgcgcagatgacgctgcagccgctcaacccacaagagcagaacgacccgtacctgcctgcggagatgggaatcatgagcaagcagccgacgaactacttctgcaagacgctgactgcgagcgacaccagcacgcacggcgggttctctgtgccccgtcgcgcggccgagcgtgtcttccccccactggatttcacacagcagcctccagcacaggagcttattgcacgggatattcatgatgtcgagtggaagttcaggcatatcttccgagcccaaaagacacctgctgactactggctggagtgtgtttgtcagtgctaagagacttgttgctggagattctgtgctattcatatggaatgagaaaaaccagcttctgcttggaatcagacgcgccagccgtccacagactgtgatgccctcttctgttctttcgagtgacagcatgcacattgggctccttgcagcagcagctcatgctgctgcaacaaacagccgtttcacaattttctttaatcctagggcaagtccatcagaatttgttatacccctttcgaaatacatcaaggcagtttttcacacgcggatatcagttgggatgcgattcaggatgttgtttgagacagaggaatctagtgtccgcaggtacatggggacaataactgaagtgagtgatgctgacccagtgcgttggcctagttcctattggagatcagtgaaggttggctgggatgaatcaacagcaggagaaaggccacctagagtttctctgtgggaaattgagccactgacaacctttcctatgtatccatccctcttcccactgcgagttaagcatccatggtattcaggagttgctgctcttcatgcaatgctttgatgtggctgagaggagttgctggtgaagggggctttcagtctttaaacttccagtcacctggtgtaggttcctggggacaacagagactccatccatccttacttagcaatgaccatgatcagtatcaagcagtggttgctgccgcagctgcttcccagtcggatggttatctgaagcagcaattcctacaccttcaacaacctatgcagtccccacaggaacagtgcaatctcaatccgctgttgcagcagcaaatactacagcaagggagccaacagcagatggttagtcctgatgctcaaaatatccagtccgtgctcaacccaaatgctattcagcagcagctccaacaattccagcagatgcagcatgctcataatgaccagaagcagaagattcaaccagatcagccgtaccaagttcctagcagtgcggttctctcgagtccaacatcattaccaagccatttgcgggaaaaatttggcttttctgatcctaatgtcaactcttccagcttcatcagctctagcagcaacgagaatatgctggaatcaaacttccttcagggaagctcaaaatctgtggatttgtctagattcaaccaacctgtagttagcgagcagcagcagcaacaggcatggaagcaaaagtttatttgctcacaatcgatgtcttttgggggctcggtttcacttaactcacccactaccaaagatggtcctgttgacaacaaaattggtcgtgatgtgcagaaccagaccctttttagccctcaagttgactcttcctccctactgtacaatatggtacctaatttgacctcaaatgttgcggataataatatatcaacgattccctctggatcaacatatctgcaaagtccaatgtatggttgtctggatgactcttctggtttattgcaaaatacaggagagaatgatccgacaactagaacattcgttaaggtttacaagtcaggatcggtggggagatccttggacatcacccggttctctaattatgctgaacttcgagaggaactgggtcagatgttcggcattaagggtcagttggatgaccctgatagatcaggctggcagcttgtatttgtcgacagggagaacgatgtgcttctccttggagacgacccgtgggagtcatttgtgaatagtgtatggtacatcaaaatactttcacctgaggatgtgcataagatgggaaagccaggaaacgatccacgctacctatcttaaattgatacccagagctctttcgggctcccgtgacgattctgtggcacactgtagcactgtccatggcggtccggtgtgctgtgctcccatgttcgctggtgtcacctctagcatgtacaccgtgcgcgtcttcagaactcccccgttacttgtatccggtgcaggccaccgctctggactgatatcttgtaggttccacttaggaatcagtatcagcgactctatcctagttggtttgtagctcgcacggcactcgttcttgtgtcgcatcgaaatcttcaggctaaatgcttagttgaaactgttcccgtgattcttaagctatctatgtatttgaggattccccggcatgctttcgacgatgaactgcaataatctgaatgcaggaggattgtttgaatgctatcttgtgtctgccgggtgctgggtgcaaggttgattttgacgcatctagctttagcttatgacgtttcaggtgttctctgtctgaaactatttttatgcatggtgagttgatg

SEQ ID NO: 9812 - DNA, 2937 bp, Zea Mays
ccccacccacccacccactctccatggacacgggcatggagttgtcctcctccgccctccttcctccccccaccttctaggactaggcctaaggactaggagtggcgccgcggtgccgtgtggcgttgactggagatccagagggcgccatccgtcctcgatttgaacttgggttcacctcgccttttctcttcctctccctgagggatgaggcgaagatccaggcttgggctaacctggagagcgccaaggctaaacaacaatcaagaaagctagaggtctgccattgaggagtcacatgtgtttcagtggcggttagaagcctacaactctacactcacgtgaagttgtggttggatttgttaaccgtccatgttgagggcaaagcaactcagcaccctaactcagtgtgcacggtccttctatcttaatggatcaaggtgcggtagcacagatggagcttcatgcacatgccctgaggatgagacttatgctccaaaaaggcagactgcaagtgctatcgagcagaattctcattcaacccacagaacatttgtgaagattcagcctcctttgcaagatgctactagagctactggccacccagttccagctgttcatgccactacctcaacttcaggaaaggaggctgcatctagtaacagaagcaatcatcctcacagtcatcatcagatcataagaagtgattatgtacagccatctaagcagacagccagaagcatttctcaatctggaattgctggagctggtgtatattcagagctggttaatatcaggtcctcatctaataatggaagcactgatcaggctccacagatgggtactaactattcttatcagattttatctgataaccattcttctaataatagggcacagaatcaacttaactttcctgagggaaagatggcttataacccttccgtgaacaatgaatttgggaagggttacccaagagctggctatgcaaagccaaagcagagtttctcaggaccttctgtgatggtttccagttcaccatcacaaataaggagtcaagggcatcctggtctacctcctgcaaaatatcattctaatcatttcaattcagatgccaggcaagatgatgtacaaactcggaacccatcaggtcccaatgtgtttagtggttctggcaacaaaattcagggttctacaggaagggtaaaagctcatagtggaggaccccaatctaacttaagatcattgaagttattgcgatcagttgagcagtactaccacacactgcagcaaatgaaatggggtccaatgaccgagcatgttctagacaatcttcattgcaagatagatgcattccaggcaaatcaagtactcaagctgcttcatgaccacactgtcgctcttggcttctttcaatggttaaagaggcaacctggattcaagcacgatggtcatacttacacaaccatgataggcatccttggacaagccaggcaatttggtgttttgaaggaacttctggatgagatgagccgagctcactgcaaaccaactgtggtgacctacaacagaataatacatgcatatggccgtgcaaattatcttaaggaggctgtcaaagtatttgaggaaatgcaggaagctggttatgagcctgatcgggttacatattgtacattgattgatatccatgctaaagctggatacctagacattgcaatggatttatatggcaggatgcaagaagtaggcttgtcacctgatacgttcacctacagtgtcatggttaattgccttggtaaaggtggtcaattagcggctgcttataagcttttctgtgagatgattgaaaatggctgcacacctaaccttgttacttacaatattatgattgcgctccaggccaaagcaagaaattatgagaatgttgttaagctgtacaaagacatgcaggttgctgggtttcgtcctgacaaaataacttacagcatcgttatggaagttcttggtcattgcggccatctggatgaggctgaggcggtttttattgagatgaggcgtgattgggctcctgatgagccggtatatggacttttggtcgatctctggggcaaagctggcaatgttgacaaagcgctaggatggtaccaagcgatgcttcaggatggtttgcagcctaacgtgccgacctgcaattcgctcttgagtgctttcctgaagatgaacagatttcaagatgcctacatcgtgctccagaacatgcttgctcgggggcttgttccatctgtgcagacttacaccctgctactcagctgctgcaccgtgggtcaggcacagatgggtttgtgctgccagctcatggccatcactggacatccagctcacatgttcctgctgtacttgcctgatgcagaagctggtggccagaacgtcagggatcacactggttatttcttggacatgatgcacagtgaggacagagagagtaaaaggggtctaatggatgctgtcatagacttcttgcacaagtccggtctcaaggaggaagcaggctttatatgggaggttgctgcacagaagaacgtgtacccagattctgtaagggagaagagctcgtcgtattggctcatcaaccttcatctgatgtctgagggcacagcagtgactgcactgtccaggacgcttgcctggttccataggcaggttctgacattgggcactggtcctgaaagaattgacattgtcactggctggggcaggaggagcagggtaactggatcttcgctggttaggcaatcgattcaaaagcttctaaacctctttgaatccccattcttcaccacccgtggaaatactggctgctttgtcggctgcggggagccactcaacaagtggttgcacaatccttatgttgagcgcatgcatttattgtaagct

SEQ ID NO: 9813 - DNA, 1655 bp, Zea Mays
cacacgcaacgcaacggcagcagctcagctcagctcgctcgctcgctatagctccacagtggccggccggccggtgtcctgccgtgtgccgtgcgcgtgcgtctactctagtactctactacatggcggcctcgctaggactcgcccacgagacgagctacgccgcctaccacccgccgtccgcgcccgcctcctcgtacttcccaccactaccaccacccgacctcctcgtggcggacctcccgccgcccgccgccgccaccatggccgatgactacttccagttcggattcgacggccaggagatggtgggcgctcccgctcccgcctgcggcggctacgactgctcggcgccggtgttcgccaacagttcttcagacgccgccgccgccgtcggcaatggcatgagcctgctgagctatggcgtcgacggcgacggcgacgggaggaggccgatgagcggaccaccatatggcaccggtgggaacggcggcggccggccgccgtcgtcgtcacggattgggttccggacgcggtcggaggtggacgtgctggacgatggcttcaagtggcgcaagtacggcaaaaagacggtcaagagcagccccaacccgaggtacaaatcagaatacaatactccaacactagctaggcgccgacgacgatcgcttcgtcacttcaagttcccccattccatggaactactaccggtgctcggcggagggctgcggcgttaagaagcgcgtggagcgggacagcgacgacccgcgctacgtcgtcaccacctacgacggcgtccacaaccacgccgcgctgggcccgggcgccgcctcctacctgtgccaaccaccgcctccgcgcggcgcaaccgcaaccgcaaccgtaacgcccttctcgcctccacgctcggcctcggcgccggcgcccctggctgcagcgcccagctggagcgccgcctgtgacgcgtgggaggcgcagctgcacgccgcggcggcggctgctcactcgtcggagtcgtcgtactgatccgatccatcatcgatcagttattagacgcacgtacggatcacgtagctagaatgttcacgtttttttttgctcacgtagtactcctctgtttgcactatccagcgactaataaaaagaaacgaagggagtatataagagtaccatagtactaccatacatacttgtcgttacagtactcagacacacacacatctctgattagctgagcgttcccttcgattttaataatacaggttcacgcatatatctcggtgcactgtactgaatactgactaagctagctgccagactttgcttaggaaaacaatacctatatatgtccaataagaacatacagactttctaaaaaaaatggtagatattgttgtcaccatcatcctgataagttcccggccaaagtttgcacacaggctgcgactgcttaatgcttatctcccatgttagggcccgttccttttctgtacaatccacgtggacgagaagggattggtgtgtttcaatccatagcaagtcaaagtttctattaattttttccagtcacattcaatttatgtgatattaggaataacatagtaaaacagagttgtattttgcgacgtgtataatgcaaaaacattagttaaaac

SEQ ID NO: 9814 - DNA, 2116 bp, Zea Mays
gcgcgggcccgtcccggcgctaataatgccaagcccccacctagacgacgcgcccattcctccacctccctccattttgccgccgctgccgctccagcaccagcctgctccggcgcagcacctcagcccaggcgcccatcgcttcgccagtctcatacggccatggaccgcggcggccacgcggcgctgctgctgctgctgctggcgctggcggtgatccccgtgacgggcgccgccggcgcggcgttcctggaggaggacgcgatcctgggcgccgtggagcgcgcgatgatgcgcggcggcggggggaagggcgccgcgaccgcgaacgcgagcgggaggcaccagcaccggcgccagcgctacggcgtgggggcgccgtggagggaggagatcgcggggctggcggggcggcccgagctggcggcgtggctgcgctcggtgcggcgccggatccacgagcgccccgagctggcgtacgaggaggtggagaccagccgcctggtccgcgacgagctgggcgcgctgggcgtcgggttccgccaccccgtcgcgcgcaccggcgtcgtcgccacgctcggcaccggccgcccgcccgtcgtcgcgctccgggccgacatggacgcgctgcccatccaggaggccgtggagtgggagcacaggagccgggtccccgggaagatgcacgcgtgcggccacgacgcgcatgtggccatgctgctcggcgccgccagcatcctcaaggctcgcgagcaccaactcaaggcatgggtcggatgatgctggtgcttgctggtcagttaaggatcgtgtggtcgtcatgccattcctcacgtttcggtcggcacgcgttccagggcacggtgaagcttctgttccagccggcggaggagtcgggctgcggcgcgaagcggatgatcgaggacggcgcgctggagggcgtggaggccatcttcgccgtgcacgtgtcgcaccagcacccgacgtccgtggtcgggtccaggacgggggccctcctcgccggctgcggcttcttcaaggccgtgatacgcggcggcggcggcggcggcgaccgggcgtccgaccccgtcgtcctggccgccgcctccaccgtcatcagcctgcagggcatcgtctcccgcgaggcggacccgctggactcgcaggtggtgtcggtggcggtggtgaacggcggcagcgagcaggcccagcctcaggagcaggagctggtgctgggcggcacgttccgcgccttctccaacgccagcttctaccagctgcggcggcggatcgaggaggtggtcacgccgccatcgccgagaggttcctcgccgaacacgactccatcatgggcgtggccgcctccgacgaccaggacccctaggccgagcgcggtgggaaccgcgtggggagtttggccccgtcgctcggtcggcacggcagggatggtggcggaatgcgggctcgggctgctttttagattttgtggccgatgggctcttggtgggccgacctgtccgcgggctgacgtgcccacggttcaggttttttttccctccgtgttccgtttgggcgagcaaggaaaggaaccatgctgtgctggtgcagtgatgctgatgcaaatagtaggctgctctacgtatgtgtttttgtccctttttgggatgtcctgaaaactcatgatgtatagcacggtagctcctgcctacttggtagcaggacctctctggctgccacgcatgtttatgcactttcctctttattattatatcaatctattattacacggacggttatggtcgaacagctagggtgtggtaatgagctctaaattacaccataaaatttaaaaatcaaatcgtattaggatcaaacaatattcctatttatttttgaactaaaatttattaaaatatctaacgttttgtgaagcaacgatccattttcaccaggtcgtgttaccagctgcgtcaatctcgcaaagtgcatcgtgggccgctttgagtttggacgccgatgggccgtcttggctgtcgataacttttgcagtagcatttttattaatatattgttcgtgtacaaatttttgtcgaatgttttgtacaaaatgttttcg

SEQ ID NO: 9815 - DNA, 2650 bp, Zea Mays
ttcggcgactgcaatactgcgaagtggccatccgtcggcaaagggccgacttcctgtgctcgttcctgtcatacctcgccaccatgcgcctcccgcccgtccgcttcctgccgtcgagctcaacgccggcggtagtggacgcgaacgcgcgcatcgctcggctggcacgcacggggaacatggagggcgcccgcgccacgttcgaggccatgccgctccgcaccaccgcctcctacaacgccctcctcgccggctacttccgcaatcacctccccgacgccgcgctccgcgtcttccaccgtatgcccacgcgggacctcgcctcctacaacgcgctcatctctggtctctccctgcgccgtcacaccctccccgatgccgccgcggcgctcgccaccatcccctacccgccctcggtcgtctccttcacatccctcctgcgtgggtatgtgcgccacggcctcctggctgacgccatacagctgttccgccaaatgcctgagcgtaaccacatatcgtacacggtgctgctcggtggcttcctcgacgccggccgtgttgacgaggctcgcaagttgtttgacgaaatgcccgcaaaggatgttgttgcgtggactgccatgctgtctgggtactgccaggttggccgggttgatgaggcgcgcactctatttgatgaaatgccaaagaggaatgttgtgtcgtggacagctatggtctctggctacgctcagaatgggcaggtgaaccttgcccggaagctgttcgaggtgatgcctgagcgaaatgaggtgtcgtggactgcaatgctatttgggtatatacaggctggccgcatagaggatgctgaggagctgtttaatgcaatgccagatcacccattggctgcctgcaatgggatgattgttgggtttgggcagcaggggatggtggatgctgccaagtcagtctttgacaggatgtgtgagagagatgatggaacatggagtgcaatcatcaaagcatatgaacagaatgaattcttgatggaggcactgtctacctttcgtgagatgttgcacattggaatccgtccaaactacccatcagtcatcagcatcctcaccgtatgcgcagcactggctgttcttgattatgggagggaagtgcatggtgcaatgctgaggcgctcctttgatatggacatctatgccgtgtcagcattaatcacaatgtacatcaaatgtggcaatttggataaggccaaaagggtctttcacatgtttgagcccaaagacgttgtgatgtggaactctatgatcactggttatgctcaacatgggttgggagaggaagcactccacatattcgatgacatgaggttggctgggatggtgcctgatggaattacatatattggggcccttacagcatgcagctacacaggaaaagttaaagaaggcagggatatttttaattctatgcgtacaaaatctggcatcaaacctggattagagcattatgcttgtatggttgatttgcttggtcgagctggacttgtggatgaagcactgtatttgataaagaccatgccagttgaaccagatgctgtcatctggggagctctaatgggagcctgtaggatgcacaagaatgctgagattgctgagatttctgctaagaagcttttagagctagagcctggaaatgctggaccatatgtcttgctctctcacatttatacatcctctggaagatgggaagatgcttctaatatgcggaaattcattagctcaagacatttgaacaaatcactcggctgtagttggatagaatacgacaagagggtgcatctcttcaaatcgggtgatgttttagcacatcaagagcatgctagtatccttaaaatgctggagaagttagatgggttgttgatggaatctggatactcagctgatggaagttttgtgcttcatgatatagatgatgagcaaaaaacgcatagcctacggtatcacagtgagaggcaggctgtggcatatggactattgaaaatcccagaagaattgcccatccgtgtcatgaaaaatctcagagtctgtgggactattggtgaggtgaatgctgtagtaaattccttgcttcatatcatctctttgatgagcctttcatttggagacacatggaggattatatttccgctgaagatgaggtacatccaggatcagcacatggtcaactgcaaatcctgttgtaacacagagcctctaatttcaacatgaacaatttatcttttgagttgatacattctggcgaagaaagctatgagatactagtacctggtatgatgcttggaatcatagatgtgaaatattgactggcagcattcatcttttcatcttaaagcacctcaccaagtttggcgaatagtcacagttcacaaaaagatggagaattgggtacactagtgtgccatctgccatgggatctgaacaactgcatattgtgcttttttgtgcaggttgccactggcaagattagacaattacttgcggggatcaagtatggaagttcacttacatttcttgtaacataactctactgccagcagtggaccaagggaagggaaggaaataaaacagcatcatatggaacccgtggcgaaaacgag

SEQ ID NO: 9816 - DNA, 2330 bp, Zea Mays
aagccatcaaccctagtaacgccatgtgccgcttgctctgcctccgatccaacccaacccaaggcagcagcagcagcgggtacgttcttctcggccatgcatggaatggaacgaagaccgcccaccgccggcgccgcctagatctctgcatccggtggccgccattggcggttcttggctccgattcggtgctgcctggtgacgagtaaaagcgaaggaaaaaaaaagaaggaagggacggcgattcaggcctcactcttggcctgtgagcctgtcgtcgacatgaagtacatgaagcttggatccaagccggacgcctttcagacggaggggaacagtctgttgcaactgagctggcagtggatattgtcgtcactgtaggggatgtcaagttctaccttcacaagttccctcttctgtccaagagctcccgcctacaaacgctggtggcctcgacaagcgaggagggcagcgacgaggtggacatctccgacatcccgggcggcccggcggcgttcgaggtctgtgccaagttctgctacggcatggtggtgacgctcaacgcctacaacgtgctggccgcccggtgcgcggcggagtacctggagatgtcggagacggtggagaaggggaacctggtgtacaagatcgacgtgttcctgtcggccagcatcttccgggcctggaaggactccatcatcgtgctgcagtcgacgaggccgctgcagcggtggacggacagcctcaaggtggtcaaccactgcgtcgacgccatcgcctcccgggcgtccacggacccgtcggaggtcgactggtcgtacacgtacagccggaggaagctcccgtcggagaccgacggcgacgcgcgcggctggaacggcgtcaggaagcggcaggcggtgccgagggactggtgggtggaggatctctgcgacctcgaggtgtgcctgtacaggaaggtgatcctggcgatcaaggccaaggggaggacgggcggcgccgtcgtcggcgaggcgctgcgggcctacgcgtgccgccggctgttcgggtccctggaccacgccgtcagcgacgggctcgattgcaccaagcaccgcgcggctcttgaagccgtcgccgacctgctgccggccgagaaggggtcggtctcctgtggcctccttctcaagctgctcagggcctcgtgcctactggagtccggtcaggcctaccgcggcgagctgatcaggaggatcggcgcgcagctggaacgggcttcggtcccggaccttctgatacctgcggactccggcgacggcgacggcgacgcgacgtacaatgttggcatggtggctgcgatgctggaggagttcttgctgcatcacaaggtaaatggggccgaggcggagaagcgggaagatggcgaggacgacgtggatgttgccgctgacgacccggtcacttcttcgaagctggccgctgtcgcaaagctggtcgatggatacctctccgagatcgccaaggacccgtgccttcctctggagacgttcgtcgccctcgccgaatcgatgccgcccctgtctcgcccggtgcacgacgcgctctaccgcgccatcgacgtttacctcaaggagcatccgggcttgtcgaagggcgagaagaagcggctgtgcgcgctgatggactgcaggaagctgacggcggacgcgagcgagcacgccgtgcagaacgagcggctgcccctgcgcgtggtggtacaggtcctcttcttcgagcaggtccggcagtcggcggcggcggcggcagcctccgccgcccccgcgcgctcgctcatcctgcccagggacgacggcgcgtcgtacggcagctcgaggtcggcgaccacgacggcgacggaggacgagcagtggggcagcggcgccgtggtgggcgcgcctgtgacgacgtcgacgtcgggcggcgccggcgacgccggctcgctccggtccatgagccagctgtcggccaacgagaacgggagaagcggcggcggcggcgacaggaagaaggccaagggcggtgcggtggcgccggcgccggtgaagagagtgctggggaagctgtggtccggcaaggcgagcagcggcgggtccgacgacacgtcggccagccccgttgggtccctcaacctggaggagaccaagtcaatgtcgtcacagatcacgaggcattctgtgtcatagttactatattactgtatatgttctctttttttttgggtgatggttttgttggattggatttgacttacataattatggagggtgtttggtaattggtacatgtggtaatggagaatttctcgtcacgaa

SEQ ID NO: 9817 - DNA, 909 bp, Zea Mays
atgtccagggacagagaaacagggaagggggcttgcatcgtagagacagattcgcaggttatgcaggtcgaggaggagcaaatagaaccattaagggagcaggtggctgcactgtgcaattttttgcggctaccgagagaatattctcagctagcatgttcttatgcctactacttcttaaacattgtttcatcaatgcgtcatgcctaaaagcatttgcccctcttatagtgtacttctgggactatatatgtatagaactatagactacaatatacatgggggtggtttatttataagatgctccgtttaatggtggttgttacagtcatctacgttatgtttcttgctttggttaagtgataggatcaatatgattcaaaacatttcagtcttttttccttttactaatttgtattgtggctatttggagaaaaatgcaatttttttgttcaaatcaaccgccacgaacgtgtgttctaatgaacccatgctatagaatctcggtcttttttcctataacatataggagtcctacatttataatatggatatacgtctattgcctaacaaaacgtgctcaatattttgtatatcttttgatcagtatatgttttcataatgttatttgaaagtatctcaggctagcttggatcatggtgctacgttttcaagagctgctagccaacgccaatgcatctcgtttaagatcgtgcatgtgaccttcgtctcctctcctgatgttaggccttcacaacttgtattatgtgcaggcagaaaaaaatcctctcttttatatagcaaccacctgctgttaagaccttttgactctatatcctaaggctgcaaactgtgttctctaagtatctgtgcaaccagcatcttttattggcccaaaaatgtatttga

SEQ ID NO: 9818 - DNA, 2500 bp, Zea Mays
gtgtgtgatgtactcatgtgtagtataaaggatgtgatgggatgagacggttccttttaccaatcattccctacttatattacccgtccatcatgcagccatccgatttttctttcttgttttaccgtatactacagcacaaggataaattcctacagaccgacctcatatgcattgcatggtgagcccttccacatatacacacatgcatgtagtggcagtagctaggcgagctagttttttttttatatagatatccagccgtagtgctctcacatcgatcgctcgcactcgcactcgcactcgcactgacctgacgctacgctgcctacaatctatctacctctaccctccctcatcacttgttccactacgaccggccacctcgccgcgcgcgcaagcctgcgtcaccacccaccgtgcagcacgacagccagcaatggccgccgcccactgaggcagagtcgcagtgacggcacgggacgcacacccacgggcgctggcggcatgccgggcgacgcctacgacctcctgtgcgccgaggacgacgccgccggcagcgccctgctgtgcaccaccgacgacgacgacgggtgctgctccgctgtcgaggacgactcggcggcggcggcggcggcatccatcgccgagctcatcggcggcgaggcccagtactcgcccaggccggactaccccgacaggctccgctccaggtccatcgacccggccgcccgcgccgagtcggtcgcatggattctcaaggtgcaagaatactatgggtttcttccattgacagcctacctcgccgtcaactacatggaccggttcctctctctccaccgtttgccggaggacgggtgggcgatgcagctgctggccgtgacctgcctctccctcgctgccaagatggaggagaccctcgtgccctccctcctggacctgcaggtcgagggaaccagcaggtacgactgcttcgagcctgggacggtcggccagatggagctcctcgtcctgatggcgctcaactggcggctgcgctcggttactcccttcaccttcgtcgacttcttcgcgtgcaaggtcgacccaggagggaggcacaccaggtgcctcattgcccgggccacgcaagtgattctggctgcgatgcatgacgtcgagttcttggaccactgcccgtcatcaatggcggcagcggccgtgctctgcgccatcggtgagacgccgtcgctggagtcggtcagccctggggctgccgtcagctggtgcatcggccttgcagagggatcagcagctgctacagactgatgcagcggctggtgataggcaacgtccggacaagggtcgccagcacgacgaccattaccatggcagcagtgaacctgtgctgctcggatgaggcgctgtcctcgcattcctctgccacctcctcgccacccccggccaagaggaggaagaggtcgccaacggccacgtgaaaactgaagaacgcaagtagataggattatttatacgctttttgggggggcagattaacagggtttgatcgatttctttgcagtttgtttgtcgttttttcttctttgtgattctttctcctttttttcccccttttgccatttatttgttctgttcttttgggttggatctctactcctcggtggggggattctgcctgcctgctcgaccggcccagtcatcatggtggcctctggcctctgcaacgcgcgccagccagtatgtgaaggcgacgagactcgagagagagagaaagaaagacagctactacgtataacagacacatctgtgtttctctgtgcaacactctgtggggcttcttcaaccccgacgcagagctgcagagagggaccattgattggtgagcgagggcagccatggcggcagatggagatggagagggtgggggaaagaggcaatgagttgcggtggatggatgatgattggtagggttaaatgaggtggtcaaagggccgggcggtcagtgctcctgccaagatgcagccctgcctgcaaagtttctgttcatattcatgagggcaaaaattgtttgtttccgagtggtttgtttgtattttgttgatgccgctgaggcgagggcgtcagagagagagaaagagagagagagaaagaggggcatgctttgctttgctgtgatgggagtcacatggatatgccctactgtggtggtgctctggagggaaatatttgtccatctccagagctaacagtgtccaagcatggggcttttgggggcccttgctgattgtttgtatctcttttttcttgcttgtgtatcaatgaagattttgccatttgaattggcctgagaagagagtacaagctgaagagagagtttctgtgttttgcctgctgctggattatatgtttgtacctcttccttcttgtttatgtatcaataaagattttgccatttgaattggcttgagaagagagtaaaaaagagaaaattggtgttttt

SEQ ID NO: 9819 - DNA, 6243 bp, Zea Mays
cagccgtcgcgttttggtgatcgcattacgcatggctgccacattaaagattgttgtaggctctcatatatggctggaggataaagatttagtttggattgatggcgaggttttccgaactgaaggtcaaaatgtccatgtccacactaccaatggaaagacggttactgtgagcatatcagacattcatccaaaggacacagaagtgccatctgatggcattgatgacatgacaaggctatcatacttgcatgaacctggtgttctaaataatcttgctgttcgatatgcaaaaaatataatttatacctatactggcaatattctgattgcaattaatccattccaaagtctgccccatctttctgaaccccgtaccatggagaagtacaaaggtgcaaattttggtgagctcgaccctcacgtgtttgcaattgccgatgtttcttacaggcagatgatgaatgagggaaagagcaactccattttggtgagcggtgaaagcggtgctggtaaaactgaaaccacaaagatgctaatgagatatcttgcttttttgggcggacggtctaaaacaggggggaggacagttgaacaacaagttttagaatctaatccagtccttgaagcttttggcaatgcaaagactgtccgtaacaacaactcaagtcgatttggaaaatttgttgaaatccaatttgacaagagtgggaagatatcaggtgctgccattagaacatatttgcttgaaagatctcgtgtttgccaaatcaatagtccagagagaaactaccattgcttttactttctatgtgcagcaccgttggaggatatcaaaagttataagcttggtgacccatcatcattccactatctcaaccaatctacgtgcattaaacttgacgaaattagtgatgctaaggagtatcttgcaacacgaagtgcaatgaatacagttggcattactgagcaggaacaggaggctatattccgggtagttgctgctgtgcttcatctcgggaacatcagttttgtgaaagggagagaggcagattcatctgtaataaaggacgagaaagctaggttccatcttaatgcaacagcagagctcttgatgtgcgattgtggaaatctggagaacgcattaataaagaggaaaataaatacaccagaaggagttataaccacaacagttgatcctaattctgctactgttagcagggatggcttagcaaagcaaatatattctcagctatttgactggctcgtaaacagactaaatgcctccataggacacgatacatcctctgaccgattgattggagtacttgatatctatggtttcgaaagttttaagactaatagctttgaacaattatgcatcaatttcaccaatgaaaaacttcaacagcattttaatcagaatgtcttcaaaatggagcaggaagagtataacagggagcagattgactggagctacatagaatttgttgacaaccaagatgttctagacttgattgagaagaagcctggtggaattattgcacttcttgatgaagcttgtatgtttcctaagtgcacacacgaatcattttctcagaagttgtatgagaaattcaggaataacaaaagattttgcaaaccaaagctttctcgcactgcatttaccatacagcattatgcaggagaagtaacttaccaatctgatcagttcctggacaaaaacagagactatgtagttgtagaacatcaagaattactgaatgcttccaagtgctcttttgtgtcagggttattcccatcagtactagagaacacaaaagcatcgaagtcctccattgctactcgcttcaagtggcaactccaagaactaatggagactttgagttctacagaaccacattacatcagatgtattaagcccaataatcatcttaagcctgctacttttgagaacatcaatgttctgcagcaacttcggtgttcaggtgttcttgaagctattagaatcagctgtgctggatatcctacaagaaaaatatttcatgattttctctgtcgattttgcattcttgctcctgaagttttcacagaaagaaacaatgaaaagttaatatgccaaaagattttggacaatattggactccatggttatcagattggaagaacaaaggtgtttctgagagctggtcagatggctgaattagatgctagaagaactgaagtgcggaataaagcagctataaccgttcagagtagatttcgcactcatgttgctcgtgagcaattccttgcattacgcatgacatcaatatcttttcaatcttttgttagagtgatattggcctccattacattgcagacaggtttaagggcctttggtgcttataacgagtacattatcagaaaacaaaataaagcttctatttgtgtccaggcttgttggcgttgccatagagatcatttgaattaccttaaaatgaaaagatcagtgttaatttatcagtgtgcatggagaagacggattgctagagaagaactcagaaagctcaaaatggctgcgagggacacagaagccctgaaggtggagaaggagaaacttgaggagcacgtggaagagctgactagccgtttgagcttcgaaaagaatcttaggattgatctagagaagagcaaggcaagagaaatttgcaaactacaggccactcttcgtgagatggaacagcgggttgaagaagccatagagatgcatgaaagagaattagccaaaaaggctattgaggaagctttagctcaagaaagggaaaagatcaccgtattgactaatgaagtcgatgagttgaaggtattactatcaagagaacgagaagaaaacagtgcaactaagagtgcactcgttgttgttcgtgaagaaaatgatgtgctgaataagaaaattgtggttgcagatgcaagcatggagcagcttagagatactgtaacgagacttgaagaaactgcagctacattggagacttcattgttatctgagaaacaacagagtactgcaatcatttcacaattaactgaagcacaacaggacatccaagtactgcagaagaaatttgcagatgccaataagacaattgagctgcttcaagattctttgaaaaggtgtgaggacagcacaaccacaagggatgccttatatgtagcagaaagacaggagcatggtcaaaccaaacaagcactttccaaagctcaggaaagaaatttggaattgcttaggaaagttgatgatagtgagaaaactttaaacaagatgctggagaatgctcagagacttgagaaacatgcaacagcaagggaatccttgcttcttaagacaaagcagaatcttgactgcactacaaaagcgctaactgaagcacgagggagaaaccgagacttattgacaagttttgaggattcagctaaaaaaatcaatatgcttgaggattcacttaacagagaaagactctttgttggcagtagaaagaaaacaaaacaaaacgaccaaagaagaactggccaatgcccagaaaacaatcgatgaattagtacatgagtcacagcagtcccaggaaataagaaatcaattggaagataccatcaagaggtttaaagcagaatcgactgccagagacacaatattattatcagagaaacaggcacatgagacgaccaagaaagttctaactgaaattcagtcgagaaatgaagagttaatcaagaaaattcaggattgtgataaaaatattcttgagcttcagctaactgtggagaggcttcaggaaaacacatctactacagaggctttactgttgagagaacgagaacaaaacaatgcaaccatgaaggcacaagctgaaactcaagaaataaatttgcagttactgaacaagcttgaggacgttgagacaaaaattggtcttcttcaaggaagtgtacaaaggcttggtgataatacagcgaaagacactttgctgctatctgagaaacgtgagaaggatgccctgaaggaagcacttactgagtctgaatacaaaaatgaagagttactgataaaaactgaagaagccaacaaaaaagttgagcatcttcaaaacactataaattcgcttaaggagaacatggcagcttctttggaagctgaaagacaagaaaatgaagcaatcaagaggtcccttgttgaagctcaggagagaaacgatgcattatttaagaaagttagggatagcgaatacagggcccaccagcttcaagatactgtccaaaagcttcaagtagatgccatatctagactgtctagctttgtaatggagagacaagatggtgatggtgtcaagaatgcacatactgaggttcatggaacaaatgaagatctaatgaggagaaatgaaaacctcctaaaaaggaatgatgacttggtgaagaagattgaagattctgctatacttgttactgagcttagagggaacttggaaaggttagaagggaaagctgctaatttagaggctgaaaatcaattgcttcgtcaacaagcaattgcaactcctccatcaacagcaaagtcttctcaagctgcatgctctaaaatcagtatgatccatagatgtcaagaaagtggtcatattttaaatggcaacgtagcatatgctgaaatgaagtcctcaaccggtcaaacagaaatgagaccctcgatgggcagttcccttgatttgattaaccacaaggtttatgaaaatgggcaaagcttgtttaatgatgtatatcagcaccagcaaccccagaatcatcaacagttattgctgaaatatattacccaatatcttggattctctgggagaaaacctattgctgcgtctcttatatactactgtcttcttcattggagatcttttgaagaagcaaagacaactgtctttgacagtattatacaaattgtaaactcagcaactgaggctcaacatgatacgagaagcttggcctactggctgtccaacttatccacattgtcagttctcctgcaacgttcatttaaagccaccagggcaactgcctcaactccacatagacgaagaatttcctgtgaaaggatttttcaagccaatcaaacttcaagcagtggacttgcttgtctcagtgctcaatcagtggatggaggtaccgtgtttcaccaaattgaagcaaggtatccggcttcgctcttcaagcagcagctagtggatcaggttgaaaaggtgtatggagtgataagcgataaaataaaaaaggagctaaacccattacttgagttgtgcatacaggatccaagaacttactcaaatcaagcaaaggccttgatgtctccttctagtggcttgggccaacaggatcaactcatgcattggctgagcatcgtgaaaatcttcaacagctatttgcatgtcctcagagccaatcatgtaagttttgggtcgtcctatcatattttcttcttggaaatgacagttttcacttctgttcctggggcgttctcttccttatttgaaaacaggctcctcttgaggcgtgaatgctgttcctttagcaatgggcaatacatcaaagatgggctaactcaactaagatattggtgcaatgacgtcagtcaagagtttgcagactcagcatgggtagcactgaggcatataagacaagctgttgactttgtggtaatttctctgaagccgataaggacatgggaagagatatgcaatgatatttgcccggctctcagtttgcagcagctagagcggatagtcggtatgtattgggatgatttaaagggaacaaatgtaacttcagccgagttcatgtcaagcatgagagctatgctgcgcgaagaatcaaatagcgtctccagcttttcggtcctgctggatgatgattccagcatacccttttcgcttgaagatatttcgaagtcaatgccaaacattgaggagacgtcagttaatgacctgctgcctttcatccgcgagaaccaaagctttgcgtttttattgtagtggagaggacacgaatccttagatttgttgtatgagattgcaggccagtctgtgtggagttactatccgtctgatgggtatgcgttgactttacacgtgctactgtttgattacctagcttacctgcatccacaggaactctcaaaactgacgtatccattcggccaccctcacgggagcctgcaggtatcca

SEQ ID NO: 9820 - DNA, 6405 bp, Zea Mays
cagccgtcgcgttttggtgatcgcattacgcatggctgccacattaaagattgttgtaggctctcatatatggctggaggataaagatttagtttggattgatggcgaggttttccgaactgaaggtcaaaatgtccatgtccacactaccaatggaaagacggttactgtgagcatatcagacattcatccaaaggacacagaagtgccatctgatggcattgatgacatgacaaggctatcatacttgcatgaacctggtgttctaaataatcttgctgttcgatatgcaaaaaatataatttatacctatactggcaatattctgattgcaattaatccattccaaagtctgccccatctttctgaaccccgtaccatggagaagtacaaaggtgcaaattttggtgagctcgaccctcacgtgtttgcaattgccgatgtttcttacaggcagatgatgaatgagggaaagagcaactccattttggtgagcggtgaaagcggtgctggtaaaactgaaaccacaaagatgctaatgagatatcttgcttttttgggcggacggtctaaaacaggggggaggacagttgaacaacaagttttagaatctaatccagtccttgaagcttttggcaatgcaaagactgtccgtaacaacaactcaagtcgatttggaaaatttgttgaaatccaatttgacaagagtgggaagatatcaggtgctgccattagaacatatttgcttgaaagatctcgtgtttgccaaatcaatagtccagagagaaactaccattgcttttactttctatgtgcagcaccgttggaggatatcaaaagttataagcttggtgacccatcatcattccactatctcaaccaatctacgtgcattaaacttgacgaaattagtgatgctaaggagtatcttgcaacacgaagtgcaatgaatacagttggcattactgagcaggaacaggaggctatattccgggtagttgctgctgtgcttcatctcgggaacatcagttttgtgaaagggagagaggcagattcatctgtaataaaggacgagaaagctaggttccatcttaatgcaacagcagagctcttgatgtgcgattgtggaaatctggagaacgcattaataaagaggaaaataaatacaccagaaggagttataaccacaacagttgatcctaattctgctactgttagcagggatggcttagcaaagcaaatatattctcagctatttgactggctcgtaaacagactaaatgcctccataggacacgatacatcctctgaccgattgattggagtacttgatatctatggtttcgaaagttttaagactaatagctttgaacaattatgcatcaatttcaccaatgaaaaacttcaacagcattttaatcagaatgtcttcaaaatggagcaggaagagtataacagggagcagattgactggagctacatagaatttgttgacaaccaagatgttctagacttgattgagaagaagcctggtggaattattgcacttcttgatgaagcttgtatgtttcctaagtgcacacacgaatcattttctcagaagttgtatgagaaattcaggaataacaaaagattttgcaaaccaaagctttctcgcactgcatttaccatacagcattatgcaggagaagtaacttaccaatctgatcagttcctggacaaaaacagagactatgtagttgtagaacatcaagaattactgaatgcttccaagtgctcttttgtgtcagggttattcccatcagtactagagaacacaaaagcatcgaagtcctccattgctactcgcttcaagtggcaactccaagaactaatggagactttgagttctacagaaccacattacatcagatgtattaagcccaataatcatcttaagcctgctacttttgagaacatcaatgttctgcagcaacttcggtgttcaggtgttcttgaagctattagaatcagctgtgctggatatcctacaagaaaaatatttcatgattttctctgtcgattttgcattcttgctcctgaagttttcacagaaagaaacaatgaaaagttaatatgccaaaagattttggacaatattggactccatggttatcagattggaagaacaaaggtgtttctgagagctggtcagatggctgaattagatgctagaagaactgaagtgcggaataaagcagctataaccgttcagagtagatttcgcactcatgttgctcgtgagcaattccttgcattacgcatgacatcaatatcttttcaatcttttgttagagtgatattggcctccattacattgcagacaggtttaagggcctttggtgcttataacgagtacattatcagaaaacaaaataaagcttctatttgtgtccaggcttgttggcgttgccatagagatcatttgaattaccttaaaatgaaaagatcagtgttaatttatcagtgtgcatggagaagacggattgctagagaagaactcagaaagctcaaaatggctgcgagggacacagaagccctgaaggtggagaaggagaaacttgaggagcacgtggaagagctgactagccgtttgagcttcgaaaagaatcttaggattgatctagagaagagcaaggcaagagaaatttgcaaactacaggccactcttcgtgagatggaacagcgggttgaagaagccatagagatgcatgaaagagaattagccaaaaaggctattgaggaagctttagctcaagaaagggaaaagatcaccgtattgactaatgaagtcgatgagttgaaggtattactatcaagagaacgagaagaaaacagtgcaactaagagtgcactcgttgttgttcgtgaagaaaatgatgtgctgaataagaaaattgtggttgcagatgcaagcatggagcagcttagagatactgtaacgaggttgcaagaaagtttaattgagggagaagctactttgcttgcagaaagaaaagaaagtgatgcagccaagaaatcactcactgaagctcatgtaaaaaacgaggaactattcaataaaattgaagtagctgagcataacgttagtatcttccaagacgacatccaaagacttgaagaaactgcagctacattggagacttcattgttatctgagaaacaacagagtactgcaatcatttcacaattaactgaagcacaacaggacatccaagtactgcagaagaaatttgcagatgccaataagacaattgagctgcttcaagattctttgaaaaggtgtgaggacagcacaaccacaagggatgccttatatgtagcagaaagacaggagcatggtcaaaccaaacaagcactttccaaagctcaggaaagaaatttggaattgcttaggaaagttgatgatagtgagaaaactttaaacaagatgctggagaatgctcagagacttgagaaacatgcaacagcaagggaatccttgcttcttaagacaaagcagaatcttgactgcactacaaaagcgctaactgaagcacgagggagaaaccgagacttattgacaagttttgaggattcagctaaaaaaatcaatatgcttgaggattcacttaacagaagaatgcacagcagagaaagactctttgttggcagtagaaagaaaacaaaacaaaacgaccaaagaagaactggccaatgcccagaaaacaatcgatgaattagtacatgagtcacagcagtcccaggaaataagaaatcaattggaagataccatcaagaggtttaaagcagaatcgactgccagagacacaatattattatcagagaaacaggcacatgagacgaccaagaaagttctaactgaaattcagtcgagaaatgaagagttaatcaagaaaattcaggattgtgataaaaatattcttgagcttcagctaactgtggagaggcttcaggaaaacacatctactacagaggctttactgttgagagaacgagaacaaaacaatgcaaccatgaaggcacaagctgaaactcaagaaataaatttgcagttactgaacaagcttgaggacgttgagacaaaaattggtcttcttcaaggaagtgtacaaaggcttggtgataatacagcgaaagacactttgctgctatctgagaaacgtgagaaggatgccctgaaggaagcacttactgagtctgaatacaaaaatgaagagttactgataaaaactgaagaagccaacaaaaaagttgagcatcttcaaaacactataaattcgcttaaggagaacatggcagcttctttggaagctgaaagacaagaaaatgaagcaatcaagaggtcccttgttgaagctcaggagagaaacgatgcattatttaagaaagttagggatagcgaatacagggcccaccagcttcaagatactgtccaaaagcttcaagtagatgccatatctagactgtctagctttgtaatggagagacaagatggtgatggtgtcaagaatgcacatactgaggttcatggaacaaatgaagatctaatgaggagaaatgaaaacctcctaaaaaggaatgatgacttggtgaagaagattgaagattctgctatacttgttactgagcttagagggaacttggaaaggttagaagggaaagctgctaatttagaggctgaaaatcaattgcttcgtcaacaagcaattgcaactcctccatcaacagcaaagtcttctcaagctgcatgctctaaaatcagtatgatccatagatgtcaagaaagtggtcatattttaaatggcaacgtagcatatgctgaaatgaagtcctcaaccggtcaaacagaaatgagaccctcgatgggcagttcccttgatttgattaaccacaaggtttatgaaaatgggcaaagcttgtttaatgatgtatatcagcaccagcaaccccagaatcatcaacagttattgctgaaatatattacccaatatcttggattctctgggagaaaacctattgctgcgtctcttatatactactgtcttcttcattggagatcttttgaagaagcaaagacaactgtctttgacagtattatacaaattgtaaactcagcaactgaggctcaacatgatacgagaagcttggcctactggctgtccaacttatccacattgtcagttctcctgcaacgttcatttaaagccaccagggcaactgcctcaactccacatagacgaagaatttcctgtgaaaggatttttcaagccaatcaaacttcaagcagtggacttgcttgtctcagtgctcaatcagtggatggaggtaccgtgtttcaccaaattgaagcaaggtatccggcttcgctcttcaagcagcagctagtggatcaggttgaaaaggtgtatggagtgataagcgataaaataaaaaaggagctaaacccattacttgagttgtgcatacaggatccaagaacttactcaaatcaagcaaaggccttgatgtctccttctagtggcttgggccaacaggatcaactcatgcattggctgagcatcgtgaaaatcttcaacagctatttgcatgtcctcagagccaatcatgttccctcaattttggtccacaaattgcttacccaaatattttctgtggtcaatgtgcaattgtttaacaggctcctcttgaggcgtgaatgctgttcctttagcaatgggcaatacatcaaagatgggctaactcaactaagatattggtgcaatgacgtcagtcaagagtttgcagactcagcatgggtagcactgaggcatataagacaagctgttgactttgtggtaatttctctgaagccgataaggacatgggaagagatatgcaatgatatttgcccggctctcagtttgcagcagctagagcggatagtcggtatgtattgggatgatttaaagggaacaaatgtaacttcagccgagttcatgtcaagcatgagagctatgctgcgcgaagaatcaaatagcgtctccagcttttcggtcctgctggatgatgattccagcatacccttttcgcttgaagatatttcgaagtcaatgccaaacattgaggagacgtcagttaatgacctgctgcctttcatccgcgagaaccaaagctttgcgtttttattgtagtggagaggacacgaatccttagatttgttgtatgagattgcaggccagtctgtgtggagttactatccgtctgatgggtatgcgttgactttacacgtgctactgtttgattacctagcttacctgcatccacaggaactctcaaaactgacgtatccattcggccaccctcacgggagcctgcaggtatcca

SEQ ID NO: 9821 - DNA, 6471 bp, Zea Mays
cagccgtcgcgttttggtgatcgcattacgcatggctgccacattaaagattgttgtaggctctcatatatggctggaggataaagatttagtttggattgatggcgaggttttccgaactgaaggtcaaaatgtccatgtccacactaccaatggaaagacggttactgtgagcatatcagacattcatccaaaggacacagaagtgccatctgatggcattgatgacatgacaaggctatcatacttgcatgaacctggtgttctaaataatcttgctgttcgatatgcaaaaaatataatttatacctatactggcaatattctgattgcaattaatccattccaaagtctgccccatctttctgaaccccgtaccatggagaagtacaaaggtgcaaattttggtgagctcgaccctcacgtgtttgcaattgccgatgtttcttacaggcagatgatgaatgagggaaagagcaactccattttggtgagcggtgaaagcggtgctggtaaaactgaaaccacaaagatgctaatgagatatcttgcttttttgggcggacggtctaaaacaggggggaggacagttgaacaacaagttttagaatctaatccagtccttgaagcttttggcaatgcaaagactgtccgtaacaacaactcaagtcgatttggaaaatttgttgaaatccaatttgacaagagtgggaagatatcaggtgctgccattagaacatatttgcttgaaagatctcgtgtttgccaaatcaatagtccagagagaaactaccattgcttttactttctatgtgcagcaccgttggaggatatcaaaagttataagcttggtgacccatcatcattccactatctcaaccaatctacgtgcattaaacttgacgaaattagtgatgctaaggagtatcttgcaacacgaagtgcaatgaatacagttggcattactgagcaggaacaggaggctatattccgggtagttgctgctgtgcttcatctcgggaacatcagttttgtgaaagggagagaggcagattcatctgtaataaaggacgagaaagctaggttccatcttaatgcaacagcagagctcttgatgtgcgattgtggaaatctggagaacgcattaataaagaggaaaataaatacaccagaaggagttataaccacaacagttgatcctaattctgctactgttagcagggatggcttagcaaagcaaatatattctcagctatttgactggctcgtaaacagactaaatgcctccataggacacgatacatcctctgaccgattgattggagtacttgatatctatggtttcgaaagttttaagactaatagctttgaacaattatgcatcaatttcaccaatgaaaaacttcaacagcattttaatcagaatgtcttcaaaatggagcaggaagagtataacagggagcagattgactggagctacatagaatttgttgacaaccaagatgttctagacttgattgagaagaagcctggtggaattattgcacttcttgatgaagcttgtatgtttcctaagtgcacacacgaatcattttctcagaagttgtatgagaaattcaggaataacaaaagattttgcaaaccaaagctttctcgcactgcatttaccatacagcattatgcaggagaagtaacttaccaatctgatcagttcctggacaaaaacagagactatgtagttgtagaacatcaagaattactgaatgcttccaagtgctcttttgtgtcagggttattcccatcagtactagagaacacaaaagcatcgaagtcctccattgctactcgcttcaagtggcaactccaagaactaatggagactttgagttctacagaaccacattacatcagatgtattaagcccaataatcatcttaagcctgctacttttgagaacatcaatgttctgcagcaacttcggtgttcaggtgttcttgaagctattagaatcagctgtgctggatatcctacaagaaaaatatttcatgattttctctgtcgattttgcattcttgctcctgaagttttcacagaaagaaacaatgaaaagttaatatgccaaaagattttggacaatattggactccatggttatcagattggaagaacaaaggtgtttctgagagctggtcagatggctgaattagatgctagaagaactgaagtgcggaataaagcagctataaccgttcagagtagatttcgcactcatgttgctcgtgagcaattccttgcattacgcatgacatcaatatcttttcaatcttttgttagagtgatattggcctccattacattgcagacaggtttaagggcctttggtgcttataacgagtacattatcagaaaacaaaataaagcttctatttgtgtccaggcttgttggcgttgccatagagatcatttgaattaccttaaaatgaaaagatcagtgttaatttatcagtgtgcatggagaagacggattgctagagaagaactcagaaagctcaaaatggctgcgagggacacagaagccctgaaggtggagaaggagaaacttgaggagcacgtggaagagctgactagccgtttgagcttcgaaaagaatcttaggattgatctagagaagagcaaggcaagagaaatttgcaaactacaggccactcttcgtgagatggaacagcgggttgaagaagccatagagatgcatgaaagagaattagccaaaaaggctattgaggaagctttagctcaagaaagggaaaagatcaccgtattgactaatgaagtcgatgagttgaaggtattactatcaagagaacgagaagaaaacagtgcaactaagagtgcactcgttgttgttcgtgaagaaaatgatgtgctgaataagaaaattgtggttgcagatgcaagcatggagcagcttagagatactgtaacgagggttgaagaattaatgagacaaattgcaaatgccaagggaaaatccactgagcttcagattgctgtgcaaaggttgcaagaaagtttaattgagggagaagctactttgcttgcagaaagaaaagaaagtgatgcagccaagaaatcactcactgaagctcatgtaaaaaacgaggaactattcaataaaattgaagtagctgagcataacgttagtatcttccaagacgacatccaaagacttgaagaaactgcagctacattggagacttcattgttatctgagaaacaacagagtactgcaatcatttcacaattaactgaagcacaacaggacatccaagtactgcagaagaaatttgcagatgccaataagacaattgagctgcttcaagattctttgaaaaggtgtgaggacagcacaaccacaagggatgccttatatgtagcagaaagacaggagcatggtcaaaccaaacaagcactttccaaagctcaggaaagaaatttggaattgcttaggaaagttgatgatagtgagaaaactttaaacaagatgctggagaatgctcagagacttgagaaacatgcaacagcaagggaatccttgcttcttaagacaaagcagaatcttgactgcactacaaaagcgctaactgaagcacgagggagaaaccgagacttattgacaagttttgaggattcagctaaaaaaatcaatatgcttgaggattcacttaacagactagaagaatgcacagcagagaaagactctttgttggcagtagaaagaaaacaaaacaaaacgaccaaagaagaactggccaatgcccagaaaacaatcgatgaattagtacatgagtcacagcagtcccaggaaataagaaatcaattggaagataccatcaagaggtttaaagcagaatcgactgccagagacacaatattattatcagagaaacaggcacatgagacgaccaagaaagttctaactgaaattcagtcgagaaatgaagagttaatcaagaaaattcaggattgtgataaaaatattcttgagcttcagctaactgtggagaggcttcaggaaaacacatctactacagaggctttactgttgagagaacgagaacaaaacaatgcaaccatgaaggcacaagctgaaactcaagaaataaatttgcagttactgaacaagcttgaggacgttgagacaaaaattggtcttcttcaaggaagtgtacaaaggcttggtgataatacagcgaaagacactttgctgctatctgagaaacgtgagaaggatgccctgaaggaagcacttactgagtctgaatacaaaaatgaagagttactgataaaaactgaagaagccaacaaaaaagttgagcatcttcaaaacactataaattcgcttaaggagaacatggcagcttctttggaagctgaaagacaagaaaatgaagcaatcaagaggtcccttgttgaagctcaggagagaaacgatgcattatttaagaaagttagggatagcgaatacagggcccaccagcttcaagatactgtccaaaagcttcaagtagatgccatatctagactgtctagctttgtaatggagagacaagatggtgatggtgtcaagaatgcacatactgaggttcatggaacaaatgaagatctaatgaggagaaatgaaaacctcctaaaaaggaatgatgacttggtgaagaagattgaagattctgctatacttgttactgagcttagagggaacttggaaaggttagaagggaaagctgctaatttagaggctgaaaatcaattgcttcgtcaacaagcaattgcaactcctccatcaacagcaaagtcttctcaagctgcatgctctaaaatcaagatgtcaagaaagtggtcatattttaaatggcaacgtagcatatgctgaaatgaagtcctcaaccggtcaaacagaaatgagaccctcgatgggcagttcccttgatttgattaaccacaaggtttatgaaaatgggcaaagcttgtttaatgatgtatatcagcaccagcaaccccagaatcatcaacagttattgctgaaatatattacccaatatcttggattctctgggagaaaacctattgctgcgtctcttatatactactgtcttcttcattggagatcttttgaagaagcaaagacaactgtctttgacagtattatacaaattgtaaactcagcaactgaggctcaacatgatacgagaagcttggcctactggctgtccaacttatccacattgtcagttctcctgcaacgttcatttaaagccaccagggcaactgcctcaactccacatagacgaagaatttcctgtgaaaggatttttcaagccaatcaaacttcaagcagtggacttgcttgtctcagtgctcaatcagtggatggaggtaccgtgtttcaccaaattgaagcaaggtatccggcttcgctcttcaagcagcagctagtggatcaggttgaaaaggtgtatggagtgataagcgataaaataaaaaaggagctaaacccattacttgagttgtgcatacaggatccaagaacttactcaaatcaagcaaaggccttgatgtctccttctagtggcttgggccaacaggatcaactcatgcattggctgagcatcgtgaaaatcttcaacagctatttgcatgtcctcagagccaatcatgttccctcaattttggtccacaaattgcttacccaaatattttctgtggtcaatgtgcaattgtttaacaggctcctcttgaggcgtgaatgctgttcctttagcaatgggcaatacatcaaagatgggctaactcaactaagatattggtgcaatgacgtcagtcaagagtttgcagactcagcatgggtagcactgaggcatataagacaagctgttgactttgtggtaatttctctgaagccgataaggacatgggaagagatatgcaatgatatttgcccggctctcagtttgcagcagctagagcggatagtcggtatgtattgggatgatttaaagggaacaaatgtaacttcagccgagttcatgtcaagcatgagagctatgctgcgcgaagaatcaaatagcgtctccagcttttcggtcctgctggatgatgattccagcatacccttttcgcttgaagatatttcgaagtcaatgccaaacattgaggagacgtcagttaatgacctgctgcctttcatccgcgagaaccaaagctttgcgtttttattgtagtggagaggacacgaatccttagatttgttgtatgagattgcaggccagtctgtgtggagttactatccgtctgatgggtatgcgttgactttacacgtgctactgtttgattacctagcttacctgcatccacaggaactctcaaaactgacgtatccattcggccaccctcacgggagcctgcaggtatcca

SEQ ID NO: 9822 - DNA, 1598 bp, Zea Mays
cacctccacagctggcgctgcgagcggtgcgtcctgcggccgcggagaaatggcggagcgagaccgggtcttggagagagagcgaaggcagatggagcagatcctagagctggatatggaggagctccaggtagaggaggtcgacgacgacggctcatcctcctcctccgacgtcgacaccttccttagccgcggatactgttcacgcgtgtttgctgacagtaccgtagcgctctcagccatccataaccctcttgctatgttgttttttcttcttcatattctttaatgacagaaatactcatggagatggagggattaacacttatgaggagctttcaatcgatacatctactgtttccttgcaggatcacacctatcttggggcaaaggttgatggtgcccgaggcaaatttgctttcctgcatggagacagagtcctcaatctgccaatgttttatctccaaggagttgttttgtttcctgaagcttccctacatcttcgagtattccagcctagattagtggaagctattgacaaggctattaatcatgttgatgctccatgcatgataggtgtggtttatgtttatcgacacacaaatgatggacattatactattgcttctgtcgggacaatggcagagatactgaaaattcaacagctgtatgatggttcatcatgtattttctcccatggtcagcagcggtttcgtcttttgcgccattggttggatgtcgacggagtaccatggggtgaagtccaaattattgaagaagatacacctcaaagaactccaagagatgcttttgcacaattagctgcacctaacagtttcaggcaatgtgcttcatcgataatgcccagtttgcatgtgtattgttctacacaacttgatcatgtggattctgatatggacagggattcactatcacccactagcacttcaagcgatcactcaataacagataaaagaatataccttttaggttcccgctccagtggtttggtaaggtgtggtattgcggatgaatcctcaaatgaaggccaaaattctgtacatgaacagtcttgtcagagccatgactctgttaaagaaattgatgggtatggtcagccagataagaatacaaacacaggagatgaggataatctttgtttcatatcctccaaatcatttcagagaacaagaaagaaagataccaaacagcagaaacactacttcacaacgaaaaatgcttcacaggctccattgtcattttggcctcactgggcttatgagatgtatgattcgtattcactttccaggagagctgcagatttgtggagacaagtaattttaaacccaagcatggatgatcatgtgagaaaaccaaattatttgtcatattgcattggaagcaaacttcctatctcagaatctctgaggcaagaattgcttgagattgatggagtctaaaaaaaaacttgacctgcggggggtaagacagcccccgggcattgtattaagaagaagaccttctcacacaggtcaagaaaacccccgaacccctaccccacccatacacagcggcatcaaagcccatgtgagaacgac

SEQ ID NO: 9823 - DNA, 3935 bp, Zea Mays
ctccgccgccacctccacagctggcgctgcgagcggtgcgtcctgcggccgcggagaaatggcggagcgagaccgggtcttggagagagagcgaaggcagatggagcagatcctagagctggatatggaggagctccaggtagaggaggtcgacgacgacggctcatcctcctcctccgacgtcgacaccttccttagaaatactcatggagatggagggattaacacttatgaggagctttcaatcgatacatctactgtttccttgcaggatcacacctatcttggggcaaaggttgatggtgcccgaggcaaatttgctttcctgcatggagacagagtcctcaatctgccaatgttttatctccaaggagttgttttgtttcctgaagcttccctacatcttcgagtattccagcctagattagtggaagctattgacaaggctattaatcatgttgatgctccatgcatgataggtgtggtttatgtttatcgacacacaaatgatggacattatactattgcttctgtcgggacaatggcagagatactgaaaattcaacagctgtatgatggttcatcatgtattttctcccatggtcagcagcggtttcgtcttttgcgccattggttggatgtcgacggagtaccatggggtgaagtccaaattattgaagaagatacacctcaaagaactccaagagatgcttttgcacaattagctgcacctaacagtttcagggattcactatcacccactagcacttcaagcgatcactcaataacagataaaagaatataccttttaggttcccgctccagtggtttggtaaggtgtggtattgcggatgaatcctcaaatgaaggccaaaattctgtacatgaacagtcttgtcagagccatgactctgttaaagaaattgatgggtatggtcagccagataagaatacaaacacaggagatgaggataatctttgtttcatatcctccaaatcatttcagagaacaagaaagaaagataccaaacagcagaaacactacttcacaacgaaaaatgcttcacaggctccattgtcattttggcctcactgggcttatgagatgtatgattcgtattcactttccaggagagctgcaggaaaactctatatctttatattatagagagataagtcctgttatacgaaagggcatctagcgtaatggttaagccttccgagtagcacctctaggtcctgggttcgatccctctcggtggcgaatttctggcttggttaaaaaagttccctcactgtgcctcgcccgctcccggattacgccttgtgcgctaccctccggctgggccgttgcagagtgggcggtgacggcccgctagtgatgggggttagggttaaaggattttctcggctgggaccatgtttcggtctcttcttaatataataccgggagggcggtctttccctccccggccgagttttttgataagtcctgttatgtcaaagtataaatatgtgcagttgtgatttaagtgttgttgtatgtatgatcttgaattttcttcatggcagatttgtggagacaagtaattttaaacccaagcatggatgatcatgtgagaaaaccaaattatttgtcatattgcattggaagcaaacttcctatctcagaatctctgaggcaagaattgcttgagattgatggagtctaaaaaaaaacttgacctgcggggggtaagacagcccccgggcattgtattaagaagaagaccttctcacacaggtcaagaaaacccccgaacccctaccccacccatacacagcggcatcaaagcccatgtgagaacgaccacgaccggggctgagccttagacctgtgctttggcgtgggacagacgaggggatttttttaaccacagcctgaaattcgctcccacggggagtcgaacccaggacctgaggagtgctactcagaccacctaaccaactcagctagaggccctttcgcagattgatggagtctcatatcgactacagcgggagattcagctgctcaaagccttcaatatcatacgatgtagaaattgcctggtaatgtttactttcttttaaaaaaaacagttactttttcaaagtttctgatcatacttcatttcttcaattgtctcacatggctaagacttgtggccttatctttatccagtctgcagttagagccagtggtaatgcatcatgcatagtggtgacatgaaaatgaaactggacctggggtttcaaattttgttgtgatttagggtttcttcaggatttcaacattttgttttgcataagtgcagtgtctcgaatacctaataaaaagaagaagaaaaatgaagctggctcattatttacatagagatggtgaaagctcactggtcaacttttggcgaattgatttttgagaatcagcagagaaactcttgcttggttcttatcccatctgattcatggatctggggtagtcctggggatatcagctataaaactgatcaaataatttctgcatagttttgattaatacaagaggtgacaggctcatttcttgccgtagatccgtattgcaagacgaagtgacatggtggtgacgtccagtgacagccctatgtctttgcacagcaggcctcacggttttgtgaaagagattattacagtatacaatgccactggccttgcactgcgtggcgacccttccaaaactcacagctggtttccagaatacacatggacgatcgcgttgtgcaatgcctgccagtccaatataggctggctgttcagagtcgatgacaagaacctgcatccgagatccttctgggcgatacgcagttcccaaatttcagacgatacacagtcaagagatagaactgatcagaccatccatgtataagctgcgtgaccatttgttgaaattccaacaatccattaacatctgccttccattattctctgcgagattcaatttggctgcatggtgtccccaagtggctaaggtttctagtaaaatgaaactgaaaacaaagatactgagatcataagcttaacccgccacatgggcacctacgttacctgaaaccttcctttgtggggtacaatcaggcctttctcaatatgctccgggtgtattcagcacgacagatttatctaagggctagtttgagagtccaaaaaccggagaggattggaggggctaaaatcaactttattttagcccctttaatctcctctgtttttgtgacttccaaattagccctaaaagctactatctgtctggatatctccaaagctaccagttcagcaaggcccttaccagggtgcaagacagacagatggaccttcagactgcaatgctcgtacttctggcaagtttcccccactgttggtatatacacaactggaagcagacattgtcaatcaggagcttgactcattatttatctcctggaaaacaaatgcatcgttcaatcaacaagataaaagcactcccaactgaaataataacctggctagcaattgactctgtgaatccaaattttctcttggagaagtcgattagcgtagtgcagcgcagcgctacaagcctacaaagggaccttgaactgccgaacattctgcaacgtcctgttctttggtacaagatgcacaagcttcactgaaatcacgaactgctaaggcaggtgttagatttagacgtgtttagtttatagagactaatttttagtcccttcattttattccattggcgtctagaacggattggttatacccgttggggtaccggatatgagtagtgcaaatacccgtttttttggatacggattcgggtagttttatattcgggacggatacgtgtaaatacccggatactgtagcttcggattcgggtcggatacagagcaaga

SEQ ID NO: 9824 - DNA, 2289 bp, Zea Mays
cgccagagctctctttcaaaaactagcaaagatggtacaatgtactcaacctcctccccagttaaagctcccagagagtaagatcacagaaccgacagatgatgagaaccaagatttgccaccaaaacctgagaaaaggactaggatgcaccacattgagaggcacagatcttgtgttgtgaccttatctgacatagaacttaatggtctgcaacctcgtcatctgcaccaacccattgagatcagcccaggaggatcacagtgttcgctccatgaagaaacacctacagatactaatgcatcacacaggcatgcaattgcagatgctgcttgggaagccctcaaaaggtcaatggtttacttcagaggccaaccaattggaactgttgccgcaatagacaagtctcagggggcagcactgaactatgaccaggttttcatgagggatttcattcctagcgcattggcttttcttatgaaaggagagcacttgattgtgaagaactttctggtagaaactgcacgccttcagtcaagggagaagatggttgaccttttcaagcttggtcagggtgtgatgcctgcaagctttaaggtgcatcatcgcaaccctactcagaagacagaaagcttactggctgattttggtgaaactgccattgggagggttgctcctgtagattctggcttatggtggattattctccttcgtgcttacaccaaatggacaggggacaattctctggctgaaagtactaactgccaaagggccatgcaccttattctcaggttgtgtctctcagaggggtgtgatacttctccagccttgctttgtgctgatggatgctccatgatagaccgaagaatgggcatatatggctacccaattgaaatccaggctctctttttcatggctatgagatgcgccctgagtctgttgaaacaagagtccgatgctgacttcgtgaaccacatcacaaaaagaatccaagctctgagctaccacttgcacagttactactggttggacttccagagacttaatgacatataccgctacaagaccgaagagtactcacagacagctctgaacaagttcaacgtgatgcccgaatcgatacctgactggatatttgacttcatgcctagccgtggtgggtacttcattggcaacgttagtcccgcgaggatggatttccgctggttctgcctaggcaacttcatcgcgattctgtcgtcgttggctaccggagagcaggctgaagcgatactggatcttgtggaggagcgctggcaagaactcatcggtgagatgccgctcaagatctgttaccctgcgatggaaaatcaggaatggcagatagtcactggatgcgacccgaagaacaccaggtggagctatcacaacggaggctcgtggccagaggccaggagaaggaaatggctcgaagactacccggaggcgacgagcacagacgatgccgtcgtcttcgacacctccattatcccgtggtgggcatggatgaagcggttccaccttcctgaagccgagaagctaaacggtcgggccgccatggttggcttcttcatggcctacttcgtggacagcttgacgggcgtgggcctcgtcgaccagatgggcaacttcttctgcaagacgctgctgttcgtcgccgtcgccggcgtgctgctggtcaggaagaacgaggacgtggagtcgctcaagaagctcatcgacgagactacgttctacgacaggcagtggcaggctacctggcaagatgacccaaccgaggggccaaagaattagttcggcgttgggggtgcaaacgcagaatgctcgcttcttgtggtgtgtctttgcctctttcttcggcccctttttgtttcaccgtttagtcaggcttggaggaactttttgatgaacgtcataatctatctacgtgatcttgtgcaaaaacaaaaggtatgggagtactttctgtgctagagataataatcatgttgcagtttcactggtttatgctttctgtcaacacgcgtcaaggtgctcgtcgaagaagactttgagcaaatcgcaaataatttgatgtcagacatggaattcgctcacatatcgatcaaataaatgccatgtcaaggtactcgtcgaagaagattagtctgaaaccaacctgtgagacacaaagcgaaaaggcatgcctgttgatggttaacttttcacgtactactacttgctttgatctggcatggaattcaagtcaggcatgacacgactgaataaattac

SEQ ID NO: 9825 - DNA, 997 bp, Zea Mays
acgtccaggaaaaatatcgaaacaaggacgaaaaacacgaagaattacggaagagcaccccatcttcggtttctttcctccggacttcttcctgcttgcggcgtccgccaattcccttccctacccaaaccctagagcaaagctgaatggccctcgccacgagctcgcgagagactctgcgccgccgccggtgactgctgatccgcccgccgccgccgcgcccggtgctttgtcacgcaggaggcgacggtatggcgtcgaggcagcacaatgcacagttccacaaatccaagacgctcgacaacaaatacatgctcggagatgagatagggaagggggcgtacggccgcgtatacaaggggcttgacctggagaatggcgatttcgtggccatcaaacaggaactgacgaccagcagacgtgaggaattgcgtgaaatgtggtttcgggcggagctgtgtgcctgtgtacacagcggctgcagtgcagctataatatggagtttgagccatgcagctcgcccttttgtagtgtactttttttgctgtgagattacatcccatggataggttctgctagcttactcatgtgagttgtaagcaagctctctgtttggtcacattgttcaaaaaaattatagtatgattatattgggatttcataaaaacaatgtattatttccaaatttactaccaatatacaggttttgttttgtcaaaaaccaccctgaaaaatgtcttctatgtgatcaagctgcagaaactttttttctcgaacgcgcaggagagctgcacatcattatattaagagaggaaaggtccaaagtggaccgaaatacaacacccagagggcagaaaagaaaaaacgaaaaaacagaccaagaccaaaccctcaagctgcagaaactttggaccatcttcttgtggcttgctccttctcaagaatcttctggtatcagcttctccggaaatctgggctgtactcccttgcccctcag

SEQ ID NO: 9826 - DNA, 1757 bp, Zea Mays
gaggcatgggaaggctgaaattgacactggaagagacagtaaaagggggcttgaaaggatggatatacatatactcaaaggtttagccttaaatatgagtgcatcgaaaacagctttccatgtggctgaacattggtttttggtttttgtcgagtttcaactatagtctaccgcaacttgcttgggactaaaagactttgtcgttgttgtagcaatatgtagttctttggttaaaactttcaacattgtaatgaattctgcataactgaatgcttcttttggaaagcacaagtttgctcctatgcgttgaccttcttttcattgaggctattcctagtcactcaacaaggcgggctatatttgaccactatgttcgcacacgtgctgaagaggagcggaaagagaaaagagctgccctgaaggctgcagtagaggcgtataaagaattacttgaagaagcatccgaggacatcaaccagaaaacagactaccaagaattcaaaagaaaatggggtgctgatacaaggtttgaagccttggatcgaaaggaaagggagattctttttagtgagaaagtcaaggctgttcaagaaaaagtccaatcaatgcgcaaagctgtcatagctaatttcaaatcaatgcttcgagaaagtaaagatataacttcaactagccgatgggcaaaagttaaagaaaatttccgtagtgatccaaggtacaaagccatgaagcatgaagaaagggagactatatttaatgaatacatagtggaactaaaatctgctgaacaggaagcagagcaagctgccaaggccaaagtggatgagcaagccaagttaaaggagagggaacgtgaaacacgtaaaaggaaagaaagagaggagcaggagatggaaagagtaaaaatgaagatacgtagaaaagaggctgtgtcatcataccaagctttacttgttgaaatgattaaggatcccaaggcatcgtggactgaatccaaaccaaaacttgaaaaagatccacaaggtcgtgctcgaaatcctgacttaggccaaggtgatgcagaaaagttgtttcgtgaccatgtcaaggacctatatgagcggtgtgtacgtgatttccgggcacttctatctgaggttatcactccagaggtagcagcacggacaacagctgaggggaagacggcaatcaactcctggagtgaggcaaaaggtcatctaagatctgatctaaggtacaataagctaccgagtaaagacaaagagtctatttggcggcgctatgctgatgacttgacgaggaaactcagacaatcagacacgaaggagaaggacaaatcggatacagatgggaaacaacctaggtcctctgatccacctaggcggaggtagcttgtagtaacagtcacttgtacttcctaggtgctgctcctatatttcttactgttgatagttaagggtctgctcgcactcgtctgcaacatttgaatagtcactggctcactgccacttttgatactgagagtttctgtgttgtagggtgttttccttgcaaatgtttttcccgttctggatcagatgatatatttttgcagtatgagtctgacattgcagtaccgtgccaagttgcgtctcccatgctctcaggtctcagccttccatctttcaaacttcaagcccatttataggatctgtttcaccgttagaattctggcgacttcggctccagacctccagctcccagacagaggatagaga

SEQ ID NO: 9827 - DNA, 1661 bp, Zea Mays
cgcgattccattgctctcttctctcaagatggaaaaccataatccattacattctcagattgctgaagtgaaaatggacatctcagcatcagcttctgttgcatcagggaacaaattctgcaagggtggtgcctgtgatttctctgattccagtaactcctcgaaagatgccaaggagagatccacgtccatgaggaagcttataatcgcagtgatcctttgcatcatattcatgacggtggaagtggtcgggggcatcaaagcaaacagtcttgccatcttaactgatgcggcgcaccttctttctgatgtggcagcatttgccatatcgttattctctctctgggctgctggatgggaagcaacaccgcagcagtcatatgggttcttccggattgagattcttggtgccttggtctccattcagctcatatggctacttgctggcatactggtatatgaggctattgtaaggctcattaacgagagtggcgatgtgcagggctccctcatgtttgctgtgtcggcgtttggactgtttgtcaacattataatggctgtattgctaggccatgaccacgggcacggccatggacacagccatggacatccacatgaccatggtcatggtgattcagacgatggccattctcaccatgaagaaccagaacagggccatgttcatcatcatgagcatagccatggaagttctattactgtcacaacacatcaccaccaccactcaggcactggacaacaccatgacgctgaggagccactgatcaagcacgaggccgactgtgagggcacccaatctgctgctaagaagcctcgacgcaatataaacgtacacagcgcttaccttcatgtgcttggggactccatccagagcatcggggtgatgatcggcggggctatcatctggtacaagcccgagtggaaaatcatcgatctgatctgcaccctcatcttctcggtggtcgtgctgttcaccacgatcaggatgctgcgcaacatcctcgaggtcctgatggaaagcacgccccgtgagatcgacgccaccaggctggagagggggctctgcgagatggaaggcgtggttgccgtccacgagctgcatatctgggccatcacagtggggaaggtgctactggcttgccatgtgacggtcgccagggaagccgacgcagacgagatccttgacaaggtgattgggtacatcaagacggagtacaacatcagccatgtgaccattcaggtcgagcgtgaatagagggggagctgtcttttgggctgtcagggcataaatggcgtcacgccttcactggttatcttactctgtcggttaaaacttttttttggcacctgggaaggcatcaggcagccatcggagtcttgatgtgcttgcaagttcatctgtggttcaagctttgatggtcagtagtgttatctgttactactagtctattaggcgggggtaggcgtcaaccagtgtgtacgggtttgattttcggtcatgctgttaacagcattgcggttcgtcgaactggatatgtagtttagtacgctgtgtcatcacctcttgtgtaagggaacgcttcttttctgtggtatggaagatgtgaacttcgtgatataaacaaaatagtaatataaagcaa

SEQ ID NO: 9828 - DNA, 1794 bp, Zea Mays
attggttgcagtagcagccagccagtcacgctgttcgagcagagccccatcccctgatccccgtgccaggccgctcggccctcgacgccgtgagtcaggcaggcaggcgcctctttctgtccctccactcgggtctccacgccgccgccgccgccgccgcctcgaccgccccacgcatccgccgctcctctacccatcctcggcccgcggcccagggagaagaccgcacgggcgggcgagggaacaaattctgcaagggtggtgcctgtgatttctctgattccagtaactcctcgaaagatgccaaggagagatccacgtccatgaggaagcttataatcgcagtgatcctttgcatcatattcatgacggtggaagtggtcgggggcatcaaagcaaacagtcttgccatcttaactgatgcggcgcaccttctttctgatgtggcagcatttgccatatcgttattctctctctgggctgctggatgggaagcaacaccgcagcagtcatatgggttcttccggattgagattcttggtgccttggtctccattcagctcatatggctacttgctggcatactggtatatgaggctattgtaaggctcattaacgagagtggcgatgtgcagggctccctcatgtttgctgtgtcggcgtttggactgtttgtcaacattataatggctgtattgctaggccatgaccacgggcacggccatggacacagccatggacatccacatgaccatggtcatggtgattcagacgatggccattctcaccatgaagaaccagaacagggccatgttcatcatcatgagcatagccatggaagttctattactgtcacaacacatcaccaccaccactcaggcactggacaacaccatgacgctgaggagccactgatcaagcacgaggccgactgtgagggcacccaatctgctgctaagaagcctcgacgcaatataaacgtacacagcgcttaccttcatgtgcttggggactccatccagagcatcggggtgatgatcggcggggctatcatctggtacaagcccgagtggaaaatcatcgatctgatctgcaccctcatcttctcggtggtcgtgctgttcaccacgatcaggatgctgcgcaacatcctcgaggtcctgatggaaagcacgccccgtgagatcgacgccaccaggctggagagggggctctgcgagatggaaggcgtggttgccgtccacgagctgcatatctgggccatcacagtggggaaggtgctactggcttgccatgtgacggtcgccagggaagccgacgcagacgagatccttgacaaggtgattgggtacatcaagacggagtacaacatcagccatgtgaccattcaggtcgagcgtgaatagagggggagctgtcttttgggctgtcagggcataaatggcgtcacgccttcactggttatcttactctgtcggttaaaacttttttttggcacctgggaaggcatcaggcagccatcggagtcttgatgtgcttgcaagttcatctgtggttcaagctttgatggtcagtagtgttatctgttactactagtctattaggcgggggtaggcgtcaaccagtgtgtacgggtttgattttcggtcatgctgttaacagcattgcggttcgtcgaactggatatgtagtttagtacgctgtgtcatcacctcttgtgtaagggaacgcttcttttctgtggtatggaagatgtgaacttcgtgatataaacaaaatagtaatataaagcaa

SEQ ID NO: 9829 - DNA, 1500 bp, Zea Mays
atgtgggccccacccgcggcgtcgccgacaggggcattcccctcgctccggccgtcgaggacggcggtggtccgcgtcctagtcacgctgcctgccgctgcgcggccgcaggatcagccgcggcggcggctctgtctcgcggtaccacggcccgctccggagatggcctctgcggctgctgaaggggagggggaggaggaggacgtggtggtggtggaaggggacacggggaagaagacggcggtggagatggacgcgacggtgaggcgggagctggcgatccggagactgcgagaggaggccgaggaggaggcgaacgaggcggggacgaggaggaggagcagcagaagggatttcgccgtgttcgagaccgccaggggcgacgcgctcttcacgcaatcgtggactccggccgccgacgatcgcctcaatggaaggtacagccatttcgcaaaactgttgaatgatcaagggcttaaagtttatgccatggactggattggacatggtggaagtgatggagttcatggatatgtttcgtcacttgatcatgctgttggtgacttgaaagaatttctggaggatgttgtattggaggaaaaccatggtttgccgtgcttcttatttgggcactccacaggtggagctattgttttgaaggccgcgctggatccttctgtagaacttcatgtagaaggtgtggtcttaacgtcgccagctattcatgttcaaccatctcatccaatcatcaaagttgttgcaccaatattctccatgttagctccaaaataccgtgtcagtgctttgcataagagaggacctcctgtttcccgcgatccagaggctctgaagatgaaatattcagatcccctggtgtatactggaccaattagagtcagaactggcaatgaaatcctccggatatcatcatttctgcaaagaaacttgagcagagttactgtcccttttcttgttctacatggtacagctgacacaataactgatccaagagcatccgagcgattataccaaacatcaatgtcaacaaataaatcaataaaattatatgatgggtatttacatgatctcctctttgaacctgaaagggatgatatcgcaaatgatatcatcaattggttgagcgcaagacttagtgttcttcagagatggtgagctgaatcaagtatgaactacaaggtgcttccccttatgtagttaccggcggttttactggaactgtatacatggcatagagtgcagaatagtgtaaatgtaaactaggatgttatcattatgtcttcacggtcacggtcatttcttgtcttcagctctgctgtataagtttgggaagagcctacatgagatgtaaataatattagagttaagctgaaaataatgtatctcctaatacacaggtagttcagtgtcactttttttttaaaaggacttggttcgcatctttttctgaattgctctcggtcattctctcacatctttttt

SEQ ID NO: 9830 - DNA, 1814 bp, Zea Mays
atggggtgcgcgcaggggaagtcctcgcggggctcgcccgcccgcagcgacggccgcggcgtggaccgcctgaagcgcgacaacgactaccgccccggctccagcgtgtcccgcctctccgacccgctcccggccaccgccgagagcgttccggctccggcagctccgccgaccaaagagcacgcccggcgagccgctgccgtcgtcccaggagggaagacaccggacgacggcaacggcgacgccgcggcacagcaggcgacgacggccgcaacgccggcgaccccgccactgctcccgccacacccgccgcggcgcgaggacgagctgcgtctggaccaccccaacgtgatgaagctggagggcatcgccacctcccggatgcaccgcagcatctacctcgtcttcgacttcatgtactccgacctcggcaggctcgtcttgcgctcccaacagcgcctcaccgagccgcagatcaagtgctacatgcagcagctgctcgcggggctgcagcactgccacgagcgcggcatcctgcaccgggacatcaagggctccaacctgctgatcgaccgccacggcgtgctcaagatcggcgacttcggcctcgccaactactacggcgctgggcgccggcacccgctcaccagccgcgtcgtcacgctctggtaccgcgcgcctgagctgctgctgggctccaccagctacggcgtcggcatcgacctctggagcgcggggtgcctcctcgccgagatgttcttcggcaagcccctcatgcccggcagcggcgaggtggatcagctgctgaagatcttcaggctgtgcgggtcgccgccggacgactactggcggaagatgaagctgtccccgtcgttcaagccccccaagccgtacaaggcaacgacgggcgagcggttccgcgacctgccgccatcgtcgctcggcctgctcgccactctcctcgcgctcgacccggccgcgcgcggcaccgccgggcaggccctgcagagcagcttcttcaccacgccgccgatgccgtgcgacctctcgtcgctccccgtcgtgtacaaggaggaggaggaggtcgactcgaggaagccgaggacgaggcagcgctcgcataggcggaaggacggcaacggcaagcggtcggagaccaacagcgggtctcctcctgagaaagaggcgcagcccatgcagccgttggacattaccatttctctgtccggtccaggtttccagcgcttgggtctcggtgcatctccactacgtgcccccctgaatttgttccaggaggatgatgaattaactggcacggcgaactcagtaactgacacgacgcgagaacatgacataggccaaggatcagctgccgctgtgatgactgccgctaaagcctcttctggcgttcacgactcatcatcatcagagaaaaccatcgtcaacggctcatccagcacagtcgcgaagcagctgccgacggcccgccactcgggcagcgacgacgacgatcacgggaacatccacctggttccggctccggacgaggaggaggccgatggcgagccggcgtccggcagcggcgtgaaccgcgtcggcccggagagcaagtcgtctgctttcgtgtcggacttcgaggcggccgccgcggcgctacgcgcgtcggaggaactcccttcttccaattaagcagtaggttcttgtggatcggctgttcttctccggctgagcttgagcattcctctgaatttgttcttctccggctgttcttccaatgagcttgagactgatgcctcatatcattgcacgcacca

SEQ ID NO: 9831 - DNA, 5441 bp, Zea Mays
atggagctcgccggcgtcggcggcctcgaggacgaggactggtacgatgtgggcacgacgacggcgccggccgcgacgaagccgccgccgctcacccacgacgacaaccgcggcttcctccggatgcttcgcgagaagaaagagagatatgagttgcaaagtccggccctgatgaactggctggcatggtcggagcgcaggctgggcgtggaggcgcacaaggtggaggtgcggttcgagaggctcgccgtggaggcggacgtccgcgtcggcagccgcgccgtcccgacgctgctcaactccgccgtcaacgccgcccaggaattagcgacgtctgtccatatgtgtgttaccaggaaaagacctatgagaatcataaacgaagtaagcggggtcatccggccgtcaaggatgacgctccttctgggagcgcctggatcaggcaagacgactcttctaaaagcgttggcaggaaaactggattcttctttgaagttcaagggaaaagtcatgtacaatggagaagaaatgaatcactcaacaccgcagtacctgcgtgcttatgttagccagtatgatctccatcatgctgagatgacagtgagggagacaatcaacttctcttctaagatgttcggaaccaataacgaattcgagatgctaggagaagcaataagaagaaaaaagggtgtcatcaataaagtggaccaagatcttgattcgttcattaagctcgtctctcaggccaccacctttggagaaggaagcaacctcacaacaaactacattatcaagatacttggcctgtctgagtgtgctgataccctagtaggagacgagatgaggagaggaatatctggagggcaaaagaaaagagccacaattggtaagcattcctatcatggctgattgtaaaatacatagctataggatttatttagctgccactggaagcacacacttcaatctgaaacaaagccacattaactgacattccaccacctcaagaacgcaaaaggttcttaccagggcaggaatcttcatgataacgaataatgagtagctctaaaattgaatgcttaactaaccagaatattagaataaggaacagagtaaagatatagttaactggaacctaacctaagttggcatacattaacgtgatgttgtttaatgcaggggagatgctggttggtctagcaaggtgcttctttatggatgatatatcaacaggtctagatagctccacgacatttgagatcatgaagtttctccaacagatggcccatttgatggatctcacaatggttatttccttgctgcaaccacctcctgagacattggaattatttgacgacattatacttttatgtgaggggcaaattgtgtatcatggtcctcgagaaaatgctacggacttctttgaaagtatgggattcaaatgccctgacagaaagaatgtagccgatttccttcaagaggtaacctctaagatggaccaaaagcaatactgggctggtgatcaaaacaagtatcagtaccatacaattgaaaattttgcacaatccttcaggacgtcctatctccctcttctagtagaagacaaacagtgcagttcaaacaatactggaaagaaaaaggtggtaaaagtgaatgcaagtcgccgaatatccagatggaatattttcaaagcatgcttttcaagggaagtactgctgctgaaaagaaactctccagtccatatattcaagaccattcagataactgttatggctttggtgatctccacacttttcctgagaacaaaaatgagtcacgattctgtacttgatgccaacaagtacatgggagcactttttatggctgtggtcatagtaaacttcaatggaatgactgaaattgcaatgacaataaagcggcttcccaccttctacaagcaaagagagctactagcattgccaggatgggcactcctttgttcagtttaccttattagcataccaatatcgcttcttgagacaggcctttggacatgcttaacctactatgtgattggatatgcaccttccattatcaggtactcatctcttggtacttatatgctgaatgacctctggtgcttcaatagacggaagttcttccagcactttctggtacttttttccatgcatcaaatgtcaatgggcctgtatcgcttcttagcggccataggaaggacgcaagtgatggccaacatgctagggactgcagctcttattgcaatatacatacttggaggattcgtcatatcaaaagatgatctccaaccatggttgcgctggggatattggacgtccccattcacctatgcacagaatgcaatcgccctcaatgagttccatgacaaaagatgggctacggaattttattataataatgcaaacaccgtcggtgaagctatcctcatgatcagagggctgctcacagagtggcactggtactggatttgtgtcgccattttatttggatactcgctggtcttcaacatattcagcatatttgcattggagttcatgaactctccacacaaacatcaacttaacatcaagaccacaaaagcgaatttcgtgaaccaccggcagatggctgaaaatggcaattcatcaaatgatcaagctatcctcccatttcgacccctctcccttgtctttgatcatatccactattttgttgacatgcctaagaaaagaaaacgaatgtcccaccaggagatcgcaaacaatggagcaacggagaaaaagcttcagctgctgcaagatgtcagtggtgcttttagaccaggagtactaacagctctgatgggaataactggcgctggaaagacaacattgcttgatgtattagctggaaggaaaactgggggatatattgaagggactattaagatagcaggctaccctaagaagcaggagacgttctcaaggatatcaggttactgtgaacagagtgacattcactcccctaatcttactgttcatgagtcactgaaattttctgcatggcttcgtctgccttcaaatgttaaacctcatcaaagagatgtatgtgtttcaaccttacccctctttatcattggagtatggagcctagttcctgacacaatttattttcaaatgcatttcagatgttcattgaagaagtcatgagccttgttgagctcactgacttaaagaatgccatggtaggcatcccaggagcaactggcctgtcagccgagcagcgtaaaagactaacaatagctgtggagctggtggctagtccctccattatattcatggatgagccaaccaccggcttggatgctcgtgctgcagcaatcgtcatgagaacagtacgaaagacggtagacactggacgaactgttgtctgcacaattcatcagccaagcatcgagatatttgaatcttttgatgaggtatgaacaagttcagatggtatagccatataggtagacaaaaatatagccacaccaagcaattgagaaacatgaatacatgattagtccagtgctggagtggtgtcaaagtaattacataagtaaaacaaacatgattcttgacaaacaaattgaagtgtatagaagtatgcataaagttgtaaaatgcagtcgaaacctaaagtagaaaacgatcaaagaactacatgataaactggtccttcttttattaaagtaggcataggcactacaaaatagccattctgaattttaagttcaatttgcgtttttaagtgcatggaaaacagctattcatgtgcccgaaacttgattgtggttttattgggtttttaactctagcctacccccaacttggttgggataaaaggctcggttgttgttgttattgagttttaagttcaatttggccaattgcagcttctgctcatgaaaagaggtggtcagcttatatacagtggttcactaggtccactctctagcaacatgataaagtatttcgaggccataccaggcgttcctaaaataaacaagggccaaaacccagcagcatgggtgttagacatcagttcacacataacagaatatgaaattggagtggactatgcagaaatttatcgcaactcctccctgtacagggagaacaggcttctaattgatgaattggaacaaccagaaccaaacacagatgatctgcattttcctcagggttactggcaaaactttacgacacaatgtgcggcatgcttgtggaagcaaaattgtgcatactggaaaaactcagaacacaatgttgtccggttcataaacacttttgctgtttcaatcatgtttggagttgtattctggaaaattggctcgaacatatctaacacagatatcatgtgcaacagcaaggttgagcaagatgtattcaacatacttggaatcgtatatgggtcagcattgttcctgggtttcatgaactgcagcatcctacagccagtggtggcaatggagagagttgtgctctaccgtgaaaaggcggcaggcatgtactccaccatggcatacgctatcgctcaggtggcggtggaattaccttacatgttggtgcaagtgctgatcttctcatcgattgtgtacccgatgattgggttccagctgtctgcggccaagttcttctggttcttcctatacctggtgatgagcttcatgtactacactctgtacgggatgatgacggtggccctgacccccaacatcgagatcgccatggggctgtcgttcctcatcttcatcttctggaacgtcttctctggcttcatcatcgcgagagagctgatgcccgtgtggtggcggtgggtgtactgggccgatccagcggcatggacagtttacgggctgatgttctcacagctcgcagaccggacggagcagatcctggtgccagggctcggggtgcagacggtgcgtgagttcctggaggggtacctaggcctgcaggatcgctactttgagctggtgacctgcctccatctcgcaatcattggcctcttcgccttcctcttcttcctcgccatcaagcacctcaatttccagcgcaggaatacgagtaggttcaaggggattttgcaaaatgtgtaatgattaagattcagaaaatggaaatgtgttgtttgccattgtttcagtttttgaatcttcagagatggatggaatggaactgctgcaatcctcagctctgtgtgatgtttttatgggcaagacataccatactgatgctcgatttcttcatatttccctggctgtattaagtgattggcagcgatcatagtagcaggacctcgtgtgtaaggctgtcttcaacaagcgatctatacggtgctctgaaccgaaaatgggctgtaacacaccagttgcaggcctccaacagcagaccgaaacagaagacccaaatatagagcag

SEQ ID NO: 9832 - DNA, 2415 bp, Zea Mays
actgccatgccgataatttctagccacaattccatgccttgcccgtccagtagctcccatctcatcccatcccgacgaatcaaatctccatcaccacttcaccagtcaccaccttgcctagcctccgtctgctgcggacgccagacatcagtcagcacgagggaagcccaaactctgccgcctcttcctctgcgctgcgctaacaacgattcccgattccatggccgcgaccgccatgattaggattaccactttacgttgccgccacgacccgctctcctcccttccccgcaccacgtcggccgcctgctcctgtacccttccgcctcgatgtcgccaatgcagactgctccctccccattcttctggctgttccccttcctcctccatctttccgcgccgggtccgggtccgcccaacagcagcattgaagcgcatcggtggcggcaacaccagcttcatgggtccagccaacaatggcgccaccacgcttcagcgatcttcatcgcccgaccttcgtcgcagcctgatcgtcctcaagtctactgctggtacaggaggtggcaatgcttcctcaggactgctgcccaccattcttggggtggcgcatctgcttgtgtcgctgggcattgtgctcgccaccgataagttcctcaaacaggcatttgttgccgcgtccatcaagttcccaagcgccctcttcggcatgttctgcgtcttctctgtgctagtcgtgttcgacacattcgtgcctgctctggcgaaggcgttcatggacttctttgagcctgccacgctgttcatccagaggtggctaccgttgttctatgtcccgtcactggtcgtgctgccgctcgccgtcagggatgtcccagcggcttcaggagtcaagatttttgcaatcacttttggcggctggtttgctacccttgcggtcgcaggatatacagcattagctgtgagaaaacttgtgaaaacacagcttataccagcagagcccatgagcaaggcatcgccattttctacagtagaaacctgggcatgggctgctgtattcgttgcatcgttcggtgttgcatgtttcaatcccagagctcttggtaccacagcaagaacatgccttccctttctgctcgctgccactgtgctgggatacatggttaccatctggtgtcaagaaagtgttacatccaatcatcacctgcgcactttctgcagatttggcggcagtagcgtatgggtacctctccgggtctggacttgacgctgtgctaggtgattacctcacaaaggcgccctctaatcctggagctggtgacgtactaatgggtttccttgggtctgtgatcatatcatttgcattctcaatgttcaaacagagaaagcttgtaaagaggcacgcagcagagattttcacatcaattgccattgcgtcgacattctctctgtactcaaccgctgtcatagggcgcctgattgggctggagccatcgttaaccatatccatattgccaaggtgtataactgtggcgctggctttgagcatagtatctttctttgaaggtgtaaactcttccctaaccgctgccgtggttgtcgttaccgggctcattggcgcgaatttcgtgcaagtagctatggataaacttggtctcaacgaccccatcgccagaggaatagggacagcttccagtgctcatggactggggacagcagcactgtcagccaaggaacctgaagcgcttcctttctgcgccatcgcttatggtctcacgggaatttttggctccttggtttgctcggttccagtagtgaggcaaagcttggtattcatagctggttaggagcagctcgtgatgatctgaatttgaggatctgattctttagataaaggaaatcgtttcatgtgtaaaagaagtcgtgctcagaagacgaggaagcaaaacgcccccacgttttgggtcaggatgaagaaaggtgaataattccgtaatcaggatgtaactaaaacactagagcaaggcggatccattgtttgtttgatactttgtgatatcacctttctcccttcactgacacgagagatataaagtacttgtaggtttcataaattcgacaatttgtttagacaaattacggtttgtagttggagaagaaaaaatcattccagatctagttgcggagcaaaagcatttgctagtggacggattgcctgctggagatggaatgatgaggttgacacttcgccacacgggccaccgctgatgtcgtgtagttaaggctggttctagctgatgtcgtttagttaagagcctctttgggtacaatgttctcaaaaccttggttctacaatgctatattttgtcagctccaaaaataccatgattttgagaaacatttttaaatgcaacattt

SEQ ID NO: 9833 - DNA, 1098 bp, Zea Mays
cgggcttctggccttctcctccctctctgcacggggaaaagaatagaaaggagccttccgctctcacgacgtctcgacccgtcgaccgcttcgccaccacaaccccgccggaaccctaaccctagcagcgggagccccatccgccgggccgtaccgatgggacggtctgtgaattgaagtagcttggaagagcggtgttatgcactgggatgggagacaatgtcctaaaattcagggtggggttgttaggataaactgcattatggattctggcaacagttcgtgctctagaacacgaagtgggcttgtaaggaaaaaagacacatttgctctcagtagatcttcatgttcaagaactcgaagtggacttctaagagtaaagagctctgtggattccagtgatgtttcgagttccagaactcgaagtggccttctaaggataaagagctttctggattcccatgatggttcattttcgaggtcacaaagtgaccatgtaggaggtagccctcctattgttgaggctataaatgatgaatcagttttgaaggagtctcctgatagattgatgaaagaagagatgcctgttacaactccaaatgggcttgttagacagagctttactgaacaggctgtaaccaaggacaagtcaggcatgaggacacttctcgatggatgtttgagtgaagatatgccttctagaacacggagtggacttgtcagaagaagccctactgttaagactctaagcaaggacaaatcagtcattaaggggctggcagatgggtgtctgaaagaagacaagcctcttggaacacgaagtggccttgtgagtggaagccttgctgccaaggttccaatcaaggctgaagtactcacaaaggggcagcatgatagatggctgaaaaatgacaaggctgctgcaatgcggagtgaccatggtggcagaagattggctgccaagactgtaagcgaggacaaaagaggcgttgagggtttgcctgatggatggcaaaaagaatacagacccaggaagaatggtccatgttcagatccgtgaactgacccttttggcctctaattagggggtggtaattg

SEQ ID NO: 9834 - DNA, 3725 bp, Zea Mays
ggccagcgttacggcgcgcaaacctccgcctctcccctcccctgtcccctccaatcctccattctccggccaccctcgcttctccgtccctcggcaatccgcttgtcccccgttgcccgctccgttcagaagcgcctcgccgctgaccggtcgtgacccgcctcgcacctccgccttctccgtccctcgcggccgcggctgccgccgaatggaagccgcctcatgctgccgcgtcttctccacgcagcggtgccgcttcccgctccgcaggctgtcggcgccgccgtggccgcagccgttctgcaccgagtccagcggcggcctcgtcaccccgtcggcctccaagcggaggtccaggggccccgtcatggccgcgaagaaggccgcggagggcgaaaaacaagaagatggaaaatacaagcacactgtggatctcccgaaaacaacatttgggctgagagcgaattctgtacagcgggagccagagctccaaaaattatgggacgataatcaggttctgaaaagggtttctgaaaggaacactgggactgcttttgttctccacgatggccctccctatgctaatggtgatcttcacatgggccatgcgctcaataaaatcctcaaggattttataaatcgctacaagctgcttcagaatcataaagtgtcctttgttcctggttgggattgccacggccttccaatagaactaaaagttttgaagtcaatggataaggaaactttgagtgctcttacacccataaaattaagacaaaaagctgcaaaatttgctaaagcaacagtcgatgcacaaatgaaatctttcaagcggtatggtgtatgggccgattgggacaacccttacctaactctgtcaccggaatacgaagctgctcagttggaagtgtttgggcaaatggttatgaaaggatatatctatagaggacgaaagcctgtccattggagtccatcatcacgtacggctttggcagaagctgaactggagtattccgaaaatcacatttccagaagcatatatgccgcattcaagattactaatccatctaaatctgggatgctagacgatttttttccaaatgtatctttggtcatatggaccaccactccatggacaattccggctaatgctgctgttgctgtgaacccaaagcttatttatgcagtagctgaggtacagtctgtatttgaaagtgagtcaacatccggtggtaaacaaagaaaagttggaaatatattgagttctgagaaaggaaaactgttcgttattgtggcttctgatcttatcacaactcttgagtccaaatggggtgtgaagcttgtagtacacaaatcatttcccggatctgccttggagcactgcaggtatgcccatcctgtgaatagcaacgaatgttccgtcattctaggaggagattacattacaactgaatcgggcactggccttgttcatactgcccctggccatggccaggaagactacataacaggtttgaagtatgggcttcctatcatttctcctgtggacgatgaagggaacttcacggctgaagctggacagttcggtggtttgtctgtcctgggggctggcaatgctgcagttgtgaagtatctggatgaacagtattcactcattttagaggaaccatacaaacacaagtacccctatgactggagatctaaagaaccaactatattccgagcaactgagcagtggtttgcatctgtggatggttttcgtgatgctgcaatggatgcaatcagacgagtaacttgggttccttctcaggcacaaaacaggattgttgccatgacctctagccgttctgattggtgtatttcacggcagagaacttggggtgtccctattccagttttttaccatgtggactcacaggaacctcttataactgaagaaacgattgaacacatcaaggctattgtgttgaagaaaggtagcgatgcatggtggtatatgacaactgaggaacttcttccagatagatatcgggacaaagcatctgaatatcgcaagggaactgatacaatggatgtttggtttgactctggttcagatcaacatcgtggatggttccagagctcattgttgactagcattgctacaacagggaaggctccctactccagtgttattacacatggatttgtactggatgaaaagggtttcaaaatgagtaaatcaattggtaatgtagtggacccagagaaaatcattgttggtggcaaaaaccatagggaagaacctggctatggagcagatgttctccgtctatgggtttctagtgttgattacactacagatgtgttgattggcccacaaatcttgcgccagatgtctgacatgtatagaaaactacgaggcacgatgcgatttcttttgtcgaatctccatgattggaagccggataattctgtgccgtacaatgatctgccaaaaatcgacaagtatgcacttttccatttggagactgtcatgacttccatgaaggatagttatgaaagttatcaattctataaagtataccagatccttcaaagatttgctactgttggtttgtccaatttctatttggatgttgcaaaggatcgcctttatgttggaggccgagtcagcttcacaaggaaaagttgtcagactgtgctcatggcacatctgctctaccttgttagggccatttccccgattatgcctcacctagctgaggatgtctggcagaacctaccctttcaatacaccttgcaggatggatcccttgcaaactttgtttttgatctgaaatggccagaaaagaatgaagaatggctctcggccccgaaggatgatgttgatttcctgggtgttatcctggagttgaggtcagaggtcaacaaaattttggagaatgctcgcactggaaagttgattggttctagcttagatgcaaaggtttatctccataccgaaagttcagatacggtattaaagctaaaggagctatcttctgcatccaatgatgcagacgctctgcatcgcctgtttatcacatctcaggtcgatattcttccaatcctaaatgaagagattacatcatctgtaccatacacaggaaagttcagtaacccacgcactggagtcatatggattggtgtgactcgtgcggatggtgcaaaatgtgagaggtgttggaattacacacaggacgttggatctttccatgaccatcctactctctgcgttcggtgctatggtgtcattgagttgcagacacaacctgcggccgcagctgtcagttgaaaggagtgatgttaacgtatcctatcgaaccatctaattttgaggatcattggtggaattcattcttttggagagctttcacgctaccatgtggcggtagcctgggactccagcttgaatcaagttttgcatgcagcaagctgtactttagattcttcatacataggtcacgagagttgtttggagcttgggtcatcgcttactttcccatactactggggggcttatttggaacagttttttacacaaaactcctgacctgtaaatcaattttggaaaaccgtatccggtggtcgatccatgtattaatagagtaataatgttactatgttcatccaaatctcaaagacgtgatggttgtgttgaaaaaacagcttgaatcacttgcttatgctcaactgttttttct

SEQ ID NO: 9835 - DNA, 3790 bp, Zea Mays
ggccagcgttacggcgcgcaaacctccgcctctcccctcccctgtcccctccaatcctccattctccggccaccctcgcttctccgtccctcggcaatccgcttgtcccccgttgcccgctccgttcagaagcgcctcgccgctgaccggtcgtgacccgcctcgcacctccgccttctccgtccctcgcggccgcggctgccgccgaatggaagccgcctcatgctgccgcgtcttctccacgcagcggtgccgcttcccgctccgcaggctgtcggcgccgccgtggccgcagccgttctgcaccgagtccagcggcggcctcgtcaccccgtcggcctccaagcggaggtccaggggccccgtcatggccgcgaagaaggccgcggagggcgaaaaacaagaagatggaaaatacaagcacactgtggatctcccgaaaacaacatttgggctgagagcgaattctgtacagcgggagccagagctccaaaaattatgggacgataatcaggttctgaaaagggtttctgaaaggaacactgggactgcttttgttctccacgatggccctccctatgctaatggtgatcttcacatgggccatgcgctcaataaaatcctcaaggattttataaatcgctacaagctgcttcagaatcataaagtgtcctttgttcctggttgggattgccacggccttccaatagaactaaaagttttgaagtcaatggataaggaaactttgagtgctcttacacccataaaattaagacaaaaagctgcaaaatttgctaaagcaacagtcgatgcacaaatgaaatctttcaagcggtatggtgtatgggccgattgggacaacccttacctaactctgtcaccggaatacgaagctgctcagttggaagtgtttgggcaaatggttatgaaaggatatatctatagaggacgaaagcctgtccattggagtccatcatcacgtacggctttggcagaagctgaactggagtattccgaaaatcacatttccagaagcatatatgccgcattcaagattactaatccatctaaatctgggatgctagacgatttttttccaaatgtatctttggtcatatggaccaccactccatggacaattccggctaatgctgctgttgctgtgaacccaaagcttatttatgcagtagctgaggtacagtctgtatttgaaagtgagtcaacatccggtggtaaacaaagaaaagttggaaatatattgagttctgagaaaggaaaactgttcgttattgtggcttctgatcttatcacaactcttgagtccaaatggggtgtgaagcttgtagtacacaaatcatttcccggatctgccttggagcactgcaggtatgcccatcctgtgaatagcaacgaatgttccgtcattctaggaggagattacattacaactgaatcgggcactggccttgttcatactgcccctggccatggccaggaagactacataacaggtttgaagtatgggcttcctatcatttctcctgtggacgatgaagggaacttcacggctgaagctggacagttcggtggtttgtctgtcctgggggctggcaatgctgcagttgtgaagtatctggatgaacagtattcactcattttagaggaaccatacaaacacaagtacccctatgactggagatctaaagaaccaactatattccgagcaactgagcagtggtttgcatctgtggatggttttcgtgatgctgcaatggatgcaatcagacgagtaacttgggttccttctcaggcacaaaacaggattgttgccatgacctctagccgttctgattggtgtatttcacggcagagaacttggggtgtccctattccagttttttaccatgtggactcacaggaacctcttataactgaagaaacgattgaacacatcaaggctattgtgttgaagaaaggtagcgatgcatggtggtatatgacaactgaggaacttcttccagatagatatcgggacaaagcatctgaatatcgcaagggaactgatacaatggatgtttggtttgactctggctcttcatgggcagctgttttagcaaaaagggacggtcttaattttcctgcggatatttatcttgaaggttcagatcaacatcgtggatggttccagagctcattgttgactagcattgctacaacagggaaggctccctactccagtgttattacacatggatttgtactggatgaaaagggtttcaaaatgagtaaatcaattggtaatgtagtggacccagagaaaatcattgttggtggcaaaaaccataggaacctggctatggagcagatgttctccgtctatgggtttctagtgttgattacactacagatgtgttgattggcccacaaatcttgcgccagatgtctgacatgtatagaaaactacgaggcacgatgcgatttcttttgtcgaatctccatgattggaagccggataattctgtgccgtacaatgatctgccaaaaatcgacaagtatgcacttttccatttggagactgtcatgacttccatgaaggatagttatgaaagttatcaattctataaagtataccagatccttcaaagatttgctactgttggtttgtccaatttctatttggatgttgcaaaggatcgcctttatgttggaggccgagtcagcttcacaaggaaaagttgtcagactgtgctcatggcacatctgctctaccttgttagggccatttccccgattatgcctcacctagctgaggatgtctggcagaacctaccctttcaatacaccttgcaggatggatcccttgcaaactttgtttttgatctgaaatggccagaaaagaatgaagaatggctctcggccccgaaggatgatgttgatttcctgggtgttatcctggagttgaggtcagaggtcaacaaaattttggagaatgctcgcactggaaagttgattggttctagcttagatgcaaaggtttatctccataccgaaagttcagatacggtattaaagctaaaggagctatcttctgcatccaatgatgcagacgctctgcatcgcctgtttatcacatctcaggtcgatattcttccaatcctaaatgaagagattacatcatctgtaccatacacaggaaagttcagtaacccacgcactggagtcatatggattggtgtgactcgtgcggatggtgcaaaatgtgagaggtgttggaattacacacaggacgttggatctttccatgaccatcctactctctgcgttcggtgctatggtgtcattgagttgcagacacaacctgcggccgcagctgtcagttgaaaggagtgatgttaacgtatcctatcgaaccatctaattttgaggatcattggtggaattcattcttttggagagctttcacgctaccatgtggcggtagcctgggactccagcttgaatcaagttttgcatgcagcaagctgtactttagattcttcatacataggtcacgagagttgtttggagcttgggtcatcgcttactttcccatactactggggggcttatttggaacagttttttacacaaaactcctgacctgtaaatcaattttggaaaaccgtatccggtggtcgatccatgtattaatagagtaataatgttactatgttcatccaaatctcaaagacgtgatggttgtgttgaaaaaacagcttgaatcacttgcttatgctcaactgttttttct

SEQ ID NO: 9836 - DNA, 1527 bp, Zea Mays
ttttggccggaaacaatcctggcctcaagaggccagacaattctcccgactcgcctccgacggacgccagccgcaacgccgcgaaccccatcctcgggagcctctcctccgacggtcgatggcccggctccctgacgccatcctcgcaacgccaaccccagcctcgagaccgtcatctccgacgccatccccaagtgcctccgccgctgctccacatcctcttcccctctacaaggtgattctgatatcatcaagactacaccagttttgaaaaaaggatgatttggaacaatgtgtatgagaaaggcttatttgatgtgatgcatgatcacaaagataatccaaaattcaaaggtcaaaatggttggaatcgtgatggatggaatagtatcactacgaagttcaatggaaagttccctctagctcatttctctaaacaacaaccacaagagaaggagagagagcttaaaggatactacaaggcaataagggattcaagaaaaaaaaagcggggctggttggaatgacactctatgcatggtactggccaaaccagaagtttggccatggctgattcgtgctcacccaaaagtatcaaagtttcgcaacaagccattccctcttttttacagtttagaagggctatatgaaggtagtgtggctatcggagagttaaatttcacatcaactgcttttgatcttcctccaccttcagctccatctaggagtgtgtctggacaaagtccaaatcccttgagtactaattcacttgatttggatggacaagaaaccacaagtgtgttcaatctgtctactaatgctcactctgtcccagtcagtactaatgaacccaccgaagctcagtttgtcccatctaatcaagaatcaagccaaagagaaggtgccagtgggagaaagcgtaagcaaagccatgttggattagccttgaaagttatgtggagtttaaaaagatcaattttctattagcaagtgtcaggctgaattgaaagaaatggatggattaacagtcgtggacaaatcatatgctttggagcttttcgtatctacgacaaacagagagattttcttaacaacaacagagcatgatgttagagaaatttggctcaagcacaaaattaggttgcttcatggcagtgatgcatggcctggacaattgatatgaggaaatttgagtgcaaagtgaaagcaactcatggagccgacatggagaagaaaaatgcaacgacagtctacatgaagcttgtgaaaaaagagttaaatctcaaagttcataataaagagacttgtattacagttttatgttatattgtttatctttttgtgatggatggatgtattacagttttagtttgttgttgcttcagtttgctgcccatacttcagtttgcttgacaaactattgtgatgatggataaagcgtgatgtgatgacggccaaccagtttactacttcagtttgctttcagtttactatgcttcagtttactgtttactaagcagatttggc

SEQ ID NO: 9837 - DNA, 2474 bp, Zea Mays
aaacaatcctggcctcaagaggccagacaattctcccgactcgcctccgacggacgccagccgcaacgccgcgaaccccatcctcgggagcctctcctccgacggtcgatggcccggctccctgacgccatcctcgcaacgccaaccccagcctcgagaccgtcatctccgacgccatccccaagtgcctccgccgctgctccacatcctcttcccctctacaaggtgattctgatatcatcaagactacaccaggtgagcagtaaaagagtggtggcagtacatcctctctagagttgttactcagaactgcattggtgcaatcgacggcacacatatacccaccaccatagcagaacatagggcccctccatatagaaacatgaaaggaactctttcacacaatgttatggtagcctgcgactttgacctcaatttcacatttgtttcatgtggatgggaggggtcagcctcagatgcaggggtgcttcgatctgctattagcaaaggatttagtgtgccagaaggaaagttttatgtagtagatggtgggtatgcaaatacatcatccttcattgcaccatatagaggggttcgataccatctcaatgagtttaggaggcgtcgttcatcacaaagtggttatgcgaactacaaagagctgttcaaccatcgccatgcaattctctgtaaccatatagagagggccatcgatgttctaaagaaaaggttcccgattctaaaagtaggcacatttcgtcccatagagaaccaaatcaagatcgcaactgcaactattgcatttcacaacataattagagggcaaaatggagacaaaagatggcttgacaaccaaccagattacatctctccaagtcaatatgttgatgtcccagagggagataccaactatctcaatgacacagaatcaagtgatggaagctctctaagagatcagatcacacttcagatgtgggctgcctacaatagctagatgggtgcttataatggcttctagtttgtcatgtagctagttgcctagttcgtcggttatgtactattattacttatgaagtctttatggtttgtagtttgtcatgtagctagttgctgagttcatttgttatgtacaattattacttatgaacttaaagtagcctatttatgaacttaaaattacctagttatgtactattatttccacaatttcagttttgaaaaaaggatgatttggaacaatgtgtatgagaaaggcttatttgatgtgatgcatgatcacaaagataatccaaaattcaaaggtcaaaatggttggaatcgtgatggatggaatagtatcactacgaagttcaatggaaagttccctctagctcatttctctaaacaacaaccacaagagaaggagagagagcttaaaggatactacaaggcaataagggattcaagaaaaaaaaagcggggctggttggaatgacactctatgcatggtactggccaaaccagaagtttggccatggctgattcgtgctcacccaaaagtatcaaagtttcgcaacaagccattccctcttttttacagtttagaagggctatatgaaggtagtgtggctatcggagagttaaatttcacatcaactgcttttgatcttcctccaccttcagctccatctaggagtgtgtctggacaaagtccaaatcccttgagtactaattcacttgatttggatggacaagaaaccacaagtgtgttcaatctgtctactaatgctcactctgtcccagtcagtactaatgaacccaccgaagctcagtttgtcccatctaatcaagaatcaagccaaagagaaggtgccagtgggagaaagcgtaagcaaagccatgttggattagccttgaaagttatgtggagtttaaaaagatcaattttctattagcaagtgtcaggctgaattgaaagaaatggatggattaacagtcgtggacaaatcatatgctttggagcttttcgtatctacgacaaacagagagattttcttaacaacaacagagcatgatgttagagaaatttggctcaagcacaaaattaggttgcttcatggcagtgatgcatggcctggacaattgatatgaggaaatttgagtgcaaagtgaaagcaactcatggagccgacatggagaagaaaaatgcaacgacagtctacatgaagcttgtgaaaaaagagttaaatctcaaagttcataataaagagacttgtattacagttttatgttatattgtttatctttttgtgatggatggatgtattacagttttagtttgttgttgcttcagtttgctgcccatacttcagtttgcttgacaaactattgtgatgatggataaagcgtgatgtgatgacggccaaccagtttactacttcagtttgctttcagtttactatgcttcagtttactgtttactaagcagatttggc

SEQ ID NO: 9838 - DNA, 2971 bp, Zea Mays
cttttttggccggaaacaatcctggcctcaagaggccagacaattctcccgactcgcctccgacggacgccagccgcaacgccgcgaaccccatcctcgggagcctctcctccgacggtcgatggcccggctccctgacgccatcctcgcaacgccaaccccagcctcgagaccgtcatctccgacgccatccccaagtgcctccgccgctgctccacatcctcttcccctctacaaggtgattctgatatcatcaagactacaccaggtgagcagtaaaagagtggtggcagtacatcctctctagagttgttactcagcaagttagacaatttttgttagatgaggaagaagatgatgatgagttgttctttgctattctccctgctataattccatatctctcagaagagaaagagcccatccacacctcctcactcactggtgctaaaaaggttagagaaattcttgaaggacatgagagttggtgcaaatctgagtttcaaatggagccagcaatattcgaaaccacaacaaattttcttagaagagagaatttactacgagacacacgaggagttatcgttgagaagcagcttgggatgttcatgtacatgatctccaacaatgctagtaaccaaatgctacagaaggcttttcaacatagtggagagactatccataggaaaatatctgaagtatttgatatagttcccacactaactcaatgttttgtgaagcttcctagctctatccaaactcacaccaaaattgctacagattctaggttcatgccatttttagaactgcattggtgcaatcgacggcacacatatacccaccaccatagcagaacatagggcccctccatatagaaacatgaaaggaactctttcacacaatgttatggtagcctgcgactttgacctcaatttcacatttgtttcatgtggatgggaggggtcagcctcagatgcaggggtgcttcgatctgctattagcaaaggatttagtgtgccagaaggaaagttttatgtagtagatggtgggtatgcaaatacatcatccttcattgcaccatatagaggggttcgataccatctcaatgagtttaggaggcgtcgttcatcacaaagtggttatgcgaactacaaagagctgttcaaccatcgccatgcaattctctgtaaccatatagagagggccatcgatgttctaaagaaaaggttcccgattctaaaagtaggcacatttcgtcccatagagaaccaaatcaagatcgcaactgcaactattgcatttcacaacataattagagggcaaaatggagacaaaagatggcttgacaaccaaccagattacatctctccaagtcaatatgttgatgtcccagagggagataccaactatctcaatgacacagaatcaagtgatggaagctctctaagagatcagatcacacttcagatgtgggctgcctacaatagctagatgggtgcttataatggcttctagtttgtcatgtagctagttgcctagttcgtcggttatgtactattattacttatgaagtctttatggtttgtagtttgtcatgtagctagttgctgagttcatttgttatgtacaattattacttatgaacttaaagtagcctatttatgaacttaaaattacctagttatgtactattatttccacaatttcagttttgaaaaaaggatgatttggaacaatgtgtatgagaaaggcttatttgatgtgatgcatgatcacaaagataatccaaaattcaaaggtcaaaatggttggaatcgtgatggatggaatagtatcactacgaagttcaatggaaagttccctctagctcatttctctaaacaacaaccacaagagaaggagagagagcttaaaggatactacaaggcaataagggattcaagaaaaaaaaagcggggctggttggaatgacactctatgcatggtactggccaaaccagaagtttggccatggctgattcgtgctcacccaaaagtatcaaagtttcgcaacaagccattccctcttttttacagtttagaagggctatatgaaggtagtgtggctatcggagagttaaatttcacatcaactgcttttgatcttcctccaccttcagctccatctaggagtgtgtctggacaaagtccaaatcccttgagtactaattcacttgatttggatggacaagaaaccacaagtgtgttcaatctgtctactaatgctcactctgtcccagtcagtactaatgaacccaccgaagctcagtttgtcccatctaatcaagaatcaagccaaagagaaggtgccagtgggagaaagcgtaagcaaagccatgttggattagccttgaaagttatgtggagtttaaaaagatcaattttctattagcaagtgtcaggctgaattgaaagaaatggatggattaacagtcgtggacaaatcatatgctttggagcttttcgtatctacgacaaacagagagattttcttaacaacaacagagcatgatgttagagaaatttggctcaagcacaaaattaggttgcttcatggcagtgatgcatggcctggacaattgatatgaggaaatttgagtgcaaagtgaaagcaactcatggagccgacatggagaagaaaaatgcaacgacagtctacatgaagcttgtgaaaaaagagttaaatctcaaagttcataataaagagacttgtattacagttttatgttatattgtttatctttttgtgatggatggatgtattacagttttagtttgttgttgcttcagtttgctgcccatacttcagtttgcttgacaaactattgtgatgatggataaagcgtgatgtgatgacggccaaccagtttactacttcagtttgctttcagtttactatgcttcagtttactgtttactaagcagatttggc

SEQ ID NO: 9839 - DNA, 3103 bp, Zea Mays
tggaagcccatcgtacgatgtaatttcgtcaggggaacccttttttggccggaaacaatcctggcctcaagaggccagacaattctcccgactcgcctccgacggacgccagccgcaacgccgcgaaccccatcctcgggagcctctcctccgacggtcgatggcccggctccctgacgccatcctcgcaacgccaaccccagcctcgagaccgtcatctccgacgccatccccaagtgcctccgccgctgctccacatcctcttcccctctacaaggtgattctgatatcatcaagactacaccaggtgagcagtaaaagagtggtggcagtacatcctctctagagttgttactcaggtttgtatgttggcagcagtatgctcctagttaccttctaaagtttctcctaatttctcaatgggtttgtgataacttgccttttgttcttagtttcatgagtcatatatatatatatatataagagctatctccatgttttgcatgcttaagttccttataagagctatctccacttctctatatatgggttcttgggagcagcaagttagacaatttttgttagatgaggaagaagatgatgatgagttgttctttgctattctccctgctataattccatatctctcagaagagaaagagcccatccacacctcctcactcactggtgctaaaaaggttagagaaattcttgaaggacatgagagttggtgcaaatctgagtttcaaatggagccagcaatattcgaaaccacaacaaattttcttagaagagagaatttactacgagacacacgaggagttatcgttgagaagcagcttgggatgttcatgtacatgatctccaacaatgctagtaaccaaatgctacagaaggcttttcaacatagtggagagactatccataggaaaatatctgaagtatttgatatagttcccacactaactcaatgttttgtgaagcttcctagctctatccaaactcacaccaaaattgctacagattctaggttcatgccatttttagaactgcattggtgcaatcgacggcacacatatacccaccaccatagcagaacatagggcccctccatatagaaacatgaaaggaactctttcacacaatgttatggtagcctgcgactttgacctcaatttcacatttgtttcatgtggatgggaggggtcagcctcagatgcaggggtgcttcgatctgctattagcaaaggatttagtgtgccagaaggaaagttttatgtagtagatggtgggtatgcaaatacatcatccttcattgcaccatatagaggggttcgataccatctcaatgagtttaggaggcgtcgttcatcacaaagtggttatgcgaactacaaagagctgttcaaccatcgccatgcaattctctgtaaccatatagagagggccatcgatgttctaaagaaaaggttcccgattctaaaagtaggcacatttcgtcccatagagaaccaaatcaagatcgcaactgcaactattgcatttcacaacataattagagggcaaaatggagacaaaagatggcttgacaaccaaccagattacatctctccaagtcaatatgttgatgtcccagagggagataccaactatctcaatgacacagaatcaagtgatggaagctctctaagagatcagatcacacttcagatgtgggctgcctacaatagctagatgggtgcttataatggcttctagtttgtcatgtagctagttgcctagttcgtcggttatgtactattattacttatgaagtctttatggtttgtagtttgtcatgtagctagttgctgagttcatttgttatgtacaattattacttatgaacttaaagtagcctatttatgaacttaaaattacctagttatgtactattatttccacaatttcagttttgaaaaaaggatgatttggaacaatgtgtatgagaaaggcttatttgatgtgatgcatgatcacaaagataatccaaaattcaaaggtcaaaatggttggaatcgtgatggatggaatagtatcactacgaagttcaatggaaagttccctctagctcatttctctaaacaacaaccacaagagaaggagagagagcttaaaggatactacaaggcaataagggattcaagaaaaaaaaagcggggctggttggaatgacactctatgcatggtactggccaaaccagaagtttggccatggctgattcgtgctcacccaaaagtatcaaagtttcgcaacaagccattccctcttttttacagtttagaagggctatatgaaggtagtgtggctatcggagagttaaatttcacatcaactgcttttgatcttcctccaccttcagctccatctaggagtgtgtctggacaaagtccaaatcccttgagtactaattcacttgatttggatggacaagaaaccacaagtgtgttcaatctgtctactaatgctcactctgtcccagtcagtactaatgaacccaccgaagctcagtttgtcccatctaatcaagaatcaagccaaagagaaggtgccagtgggagaaagcgtaagcaaagccatgttggattagccttgaaagttatgtggagtttaaaaagatcaattttctattagcaagtgtcaggctgaattgaaagaaatggatggattaacagtcgtggacaaatcatatgctttggagcttttcgtatctacgacaaacagagagattttcttaacaacaacagagcatgatgttagagaaatttggctcaagcacaaaattaggttgcttcatggcagtgatgcatggcctggacaattgatatgaggaaatttgagtgcaaagtgaaagcaactcatggagccgacatggagaagaaaaatgcaacgacagtctacatgaagcttgtgaaaaaagatttgctgcccatacttcagtttgcttgacaaactattgtgatgatggataaagcgtgatgtgatgacggccaaccagtttactacttcagtttgctttcagtttactatgcttcagtttactgtttactaagcagatttggc

SEQ ID NO: 9840 - DNA, 677 bp, Zea Mays
gcagcagcttcatcccctctgggtgtcattgcgggatcactagctggtcatgccattgcaacattgattgcagttcttggtggctctttgctgggaacattcctgtctgaaaagattatagcatacattggagggagcctattcttggcctttgctgcgattaccatagttgagatagtgacttgaaaagggagttccagcttccacaattcataaaaagtactgatcttttgtcagggcaatgaaaaatcagcttgatcgtaatggtagtacattgatgtgttaccgaacatgattgtccacaggaacttcattgttcgtatgggacgtcctaggcttgcgtagagtgttttgtttctggtgatgagaatttctgcttctttatccaagaacaatgtttttgtcatcatcatgatttgtagtggaaacactgatagtcaggttggtcggaagatgggactgggagcaaaactatgaattccatgtagcttttgaacttcctcttacattatttacaagtatatgaatcagccttttcgtatttatggggaagacttccctggtttatgtcttccctagactttattcacactagttcaaccctttttatatgaatctaagtgttagattggaagccctaaccctaactagagttgggatgttgtattaataagtag

SEQ ID NO: 9841 - DNA, 2010 bp, Zea Mays
tatcaatcgcgctctatcgccatatataaacacaaagcttctccagccaagtgtattgcgtgcttcacgcgtacagtacaaaactacagatgtactggtaagtctcgccgcccgaccccgagctccagcaagcataaagacagcgagagagagagggaggaatcttttgtgacgacgaacgcagggtggtcgtttccatggggaagctcgcggcgaggctgcgggccttctccaggaaccgatggctggtgctggtggccgcaatgtgggtgcagtccatggccggcatcggctacctcttcggcgccatctcgccggtgctcaaggcccgcctcgggtacaaccagcggcagctggccgcgctggccgtcgccaagaacgtcggcggctacgtcggcgtcgtcgctggcacgctctccgccgcgctgccggcgtgggcgatgctgctcatgggcgcggcgcagaacctcctcggctacggatggctctggctcatcgtcaccggacaggcgccgccgctgccgctctggatgatgtgcgtccttatattcgtcgggaacaacagcgccacgtacttcaacacggcgtcgctggtgacatgcgtccagaacttcccggcgagcaggggcccgatggtgggcatcctgaaggggttcctgggcctgacaagcgccatcctgacgcaagtctacgcggtgacgcgcgcgacagaccaggcctcgctcatcctgatcatcgccgtcggcccgtcgctggtcgccgttgccgtgatgctcgtcgtccggccggtcggaggccacctgcaggcgcgtgcatccgacagggtcagcttcgtgttcgtctacgccgtgtgcctgctcctcgcctcgtacctcgccggcgtcaagctggtccaagacttcctgcagctgtctgacggcgtggtcgtttctctcaccgtggttctgctcgtcctccttgtctcgccggttgcggtccctgtggccttgacgctgacgccggaagccgagtgtccgatccgggaggccctcctgtcgtcgtctgaaccactgacgggagaggggaacgcttcgcaagaatcgcctccatgcgcatctgagagcgggggcaggccggcaccgtacctgggggagaacttcaccatgatggaggcactggtgaaggctgacttttggctgatctgggtgtcgtttttgcttgggtcgggatcagggctgacggtgatggacaatctgggccagatgagccaggctcttgggttcgaggatgcgcatatcttcgtgtcgttgacgagcatatggaacttccttggtcgtattggaggtggctacttctctgagatcattgccacgcaacgagcatatccaaggcacatagcactggcatttgctcaggtgctgatcgccgctgcgcacttcctcttcgccatggcctggcctggaactatctacatcgggaccttcctagtcgggctcggatacggagctcactgggccatcgtgccggctgccgtctccgagcttttcggcataaagctagcacttcggcgccatgtacaatttcctcgctctagcaaaccccactggatcccttgtcttctccaacctcatcaccagtaccctgtatgattacgaagccgagaaacaggctcgccagcgtcgtcgtcgggtcatggcggaactgctggcgtcgtctccaagatcgcttcacagcgctggtctttctgctggtggtggaggaggaggaccactcatcaagtgcgaagggcctgcttgcttcttggtcagctctctgattatgtcggcgctgtgcgttgttggagccggcctgagcctcgtcactgttcacaggaccagacgggtttatgctcgtctgtatcggtccgtacgaacgtgaaattttcgtagatagaagtataaaatcctcgtgctacttacttcgtaccaaattatatatgcttgtatatacacacagagttacgttgtaagagaccattcgttgtgtaaatat

SEQ ID NO: 9842 - DNA, 865 bp, Zea Mays
atggcatacgatggcatctatcgattctatattcaagtccaatccctttctacaaaatatgatgagagatgcaagattgttggagatgtggcatctaatctaacaatggatgaggccactttccgtgattcccaggaacataggttggaaatttattacaccataattaggccgcaaaaaattgtctacatattcagagaagtgcaacagtgcacactcctttcaaagactgagtgcagtgaagaatgttcctatgccctcagtcatcaagatacaacattggatcgaacactcaaaaatgatggatcagcaaaaaagggtactattattgtctgggagatctttgctttgaaacacaaagcaagacatttagttcaatctcgtcttcttcagtcaccagttgcagttgtcgccgtcgcttctgcgacaactgcctatgctgtaattactaccacagatgagaaacctagagatattgttgtgacagatgattttgatatcaagagaactcaacctacaagtaattccaaaaagatcgttgctgaaactgatgtacttactggacagaatggtaaactagcgaccagattggcagaagttcttgatgaaaactaaatgatagattagacatgaaaaacttgccatatgatgaattggcaaagataaagctttctttatgttagtacataatgcttgatttttgttgacaatctctcccttttccctttcaaagaagcttaaattagttcaagatcaactagcaccagagggttcaagatgacagaagcctgattcccaaattgctgctgcacggaagagattggaatctttatgattttccttgtctaattttgtggccgcatta

SEQ ID NO: 9843 - DNA, 1556 bp, Zea Mays
tccatcaccgtccccacgttctcctccctccgcctctcgctctgcgcacatccccatgcccacgccgagcgcttgcgcctcaccacccccgtcgcagccgcggccgtggcggcgtcgacgacctcccccgactttcccgccgtgggcgccgtcctggggaagcccacagtgctcgtgggtagtggccgagaagatcggagccgcggggttcatgctgaaggaggtggtgcgatgtccagctcccaggtcgtcgtcctcacgctcctggagttttggtcagtgagatgttcgtcttcgtgctcagcctcgtcctcgagtcgtcgcgcaaacagcgagagcagcgtgggtctcatcatcaggatcacaccaacagggacggagatctgtcgtcgaagaccacctgactgtttctcatggcaggcttgcttgcactagcttggcacaataagccacttcaggcttcagtcggttatgtgatcaccggaacattatgggctctagagtaggacttttgagaaatgctaggcgatggtgcatgcatgatgaagctgctgtccattatattgacatgattgatcagaccacgcttggtcaccggatgatcaagaaacaattcaacaagactccaagagctggctggcaaatcgattgcttggaacagagcttggcttcgattctttgcattttgcaagaatcgattaccaagataagaaaaggcgtaaagctggcaaaggcttgaggttatatggcgtggctcaagaactttcggttcatcttcacagatatttacaaatgtatttcgtgtcgattatagccctccagatggctttggctttgaagttttagatgaaaatatcttgcctgtccaggatgacatgccgatgtttgactataatgttgaagaacaagttaatgattttgttgctgcagccatagaacagaatcttggttccggaatatggacaaacttatctatcgcgtgaacaaggatgcacgtaaaatagaatttttagtaggtaggaggagttccttagggctgttcacgaccagcttggaagacccaatggcaattgcccagcatcatgatgcggtctcagaatgaaagcattaatggtatatagttggatatttcattcagagaggctcaagtgatagctgcaagtagttctaccttgtgcccagttttcttgttcttttaggtcaatgaaagttcccatttttgtggcgttgcttagatggttggtcctttcctcaaaaaaaaaagatggttggtcctgttgactaccaaaatgacttgaacttttggtgcatggacaaatggactagaagctttcctgtaacgtggcacatcataagatgttggttgattctcctgaaagcagattttattttactttaaccaaaggagaaccaagttggctgtcgtctcccactgtggcactattttttgggttaaaagtataacaccatcgtgagttgaaactcttgagacatagagataaaaaccaataaaactcacatccgacgtgattagcatgaccattactcatcaaaaa

SEQ ID NO: 9844 - DNA, 4785 bp, Zea Mays
aaacgccaattactgagtactgatcccgaatccccaaccattcgaacgccacggccatccccctcgaatcccctccaactcgaacattccggaatccatggaggccggcccccaaaccttctagagcgtgcttctccggtcgccatgagccgccgcgagccggacacctcccccttctgcgacctctccaacctccgcaccccgagacccaaccccaaaaccgtacctccctcgcctcagttcttcaccgcctccaaatccgccctccaggctcccactccgacgtcactccgccgccggaggcctggcgacggcgtccctaccccgacgcccctcggccgccgcctccacgccctcgaggtcgaccagtcgcgctccgcccgccgcgccgagtccggccgtgagcgcgccctccgtaccttttccgcctccgcctcgtcatggctatccctcctcctacgcgacccctccgcctgcgggtgcttcccagggttcaccggttccgccgcggccgcgcagccctgggctacggggaaacgcggcgcgctcgatggagaccgggcgcgtggggggcgcagcccgaagaggtgccgcggtggtggtgatcgcggcggagagaggagcaaggagatgacgccggcgatggtggccgcgttaagggaatctcttaaggatgcgtgcagcctggaggatgtcacggagaggatggagaaacacatgagtaagggcgcgtgtgaggaggtgctctttatgatgtttcaaatttgtaagaacatcgatgaaggcagattgaagatgaaagcacggtgcccccttgttactgaccttaggctcaaagagaaagcaactagggttttcatgtcctacaatccatattggctcaggattggcttgcatattgttctcggtggtgattccttgctgcagactggacaaggaaaacgggacaaggaggttcattttctaaaactaattttggagaagcatatgctttctcaaatcatgactgcaaaatcatgtggtaacaagaagctggtagaagagcaccatgtacaaggttacagtgatgtgctgggcaatattatattgaaaagaatttttcttcttgttgttgcactagacagaaccaaaatagaaagtactcttcctctcgaagctggaatcgatggccttgatggtggatcccctcttttattttgtcaccaaagtcaaataaaatctagtcgtcaaatcattcaagagtctttgagggagaccatgcatggagaaggtgacattctggtacacctcacaactatgggatataaactaaattatcaacagcctgctttgtcagaatatgatttcacaatgaggaatttatttgaagatctccaagatggcataattctttgtagagttgttcagctgctcctcgcagatgcatcaatcatttcgaaagtaattgttccctcagatacagacaagaagaggcgaagtaactgcaccactgctatacaatatatcaaacaagctcgggttccattatctgattctgatggagtcacaatttccgcggaagacatcgctgctggggataaggagcttattctttcactgctgtggaatatgttcatccatatgcagctaccgttgttagcaagcgcaacctcgctagctcgtgaactaaccaagctaaacgtacatgtaacggaacaacaaatatctgagaacaagccacacatgggtttgctttacaattgggttcaggcaatatgctcaaagattggcatgactgttgaaagttcatctcagttagacagaagagcactgaactgtttcatcaactattatttgaatattgatatttcccccttcaaggaaacaccaactggatgccgaaaggaattgttcacctgtcaccaacttgatactatatcagatatcgctggctggccatccagcgagatggggaaagatattccagctagtggcatcctagctgatggtgtattatttgatgagaggagtaccattcttttgctagcattcctatcttcgcatctgactaatgatgaaagattggatcaactaaagaatttgatcaacatgaggttgtacaagagtgcggatactaagattgcagcaagacgtatatctcgaggaaagattgatataaagtatcatccatctcagacagataaaaatgatggtgcatgcaccaaccaggagtgggctgcaactattatacagactcaggccagaagtcttattgcaaagaataaatattgtgagcgtaagaaggcaatatttatcctgcaaggtgctttaagggcatggtcagccatcatctcgaacaggaaccgtagttgtctaagtattgctgcctctattccctggcaagcacaaggaaacaacagatatttcatttttataatggaaaggcatcgatttgttcagatgagaaaatctgccattatgattcaactggctgtaaggatttggattagaggaagaaaaaaatttaagaacagtgattctttcaaaagctgtgagttccttgaaggtaaaactccacccaaaattagtagcattgctccttcccctcaggagcattgtagtggtggagataaaacaatagcttcgcccacagcatgcaagcactgtgagcatgtgctcacagtgagagcttctgctgctgctcctattctttattttgatggcatggacagtctagactcaacaactccactacagtttagcggcaatcaaagcaactttataacttctaccactcagctgtgcaaaagtgagcatgactgtcggtcgtgtgtggttgagaaatccaattcagtttccgtcagtaagcttgtgagtgcggatgacattcagtgcagcagcagtatttgtttccctgtctgcaaggaactagtggctgctcaaacgatacaaagtgcatacagaaggtttttgaacaacagaaacaggataactggtgcaattaaaatccagagccactggcgatgctattcagtacgcaagtgtttcatgaaggaaattcaggctattgtaggaatccaaacatcaataagagtattcttgtgctaccaagcttttcaacgccaccgacttgctgcagtactgattcagcgagttgtcagaggatggctggctagaaagagactgttaggttcctcttcactgcgaacctacacaagactttgtgtagtcgaccaaagtcaaaagagaaaatgttatcaaagccttgagttgaacattgtgctagactctgtcataaggctacaaagatgctggaggaagttcctgctgcgtcagtctgtcaaaacatatgtgatctcaattcagtcttttgtccgtggctggttggcacggaagcaactaaaccaaactttccgttgcatcaacatcattcaaagatggtggcgaaaggttcttcaaacgaggaagcgagctgtgattgtcattcagactcgtttccgtggttgggttgcacgacaagatgctattagaactagaaactctatctgtaacatacagagatggtggagaaaggttttgttccttaaattgaggaagcaagcggcgttagttatacaggctcatttccgtggttggatagcacgacaagttgcttttagaactagaaaaagtattactataatacagtcctatgtcaaagcctaccttgtgaggaaggcttcgaagcaagaagttgcacatataagatctagactgcagaagtcatcttcacaggttgatgatagtatgcgcctgatcaacagactggtgtctgcattgtcacaactccatcgctgtcggagcatacacagcattcgtcaaacttgtgcaacattgagtactgctacagagtattccaagaaatgctgcgagaagctggtcgctgctggtgctgtagatatattgctaaagcaaatatatttgctgaaccgtgggattgctgaccaggaggtcttgaagcaagtgttccttactctcaggaacattgctcgatattcaaatcttagacaggtgttagccagcactgcagaatctgttgaaatcatcttccaggaattactgaggaacaaagcagacggattcttcatcgcgtctgatattctaaaaagcctatgtgaatccaaggaaggccgtgaaaccgtccaagcgctgagtcacctcatcaaaaggctgcgcaatctggtgcatgacctggaaaagaaggtagagcttgataagaggaatgggcgcaccggagccgtgaaggcgaccaacctgcggcggcttcgggaggccgccacactctatcatatcctcaccagtggtacttaacgcgtcggcagcatagctagaaaggctaatctgacgttttgttgtacaataatttagtctaagaaggttttcatgtaactggaggtgactacggtgcaattgtcgaaaaccttcctaggtaaccaggatcttctaagttctgttgctgcagttggttttgtgtggtaggtgtgagaatcatcggcttgatgtattggattacctcttataaagagtgaagtcgctgagttaaccgtcctcacgtgtcttggattaaccgccttttatgttctaacaaatcatcagctcttgatgtgattgttagtatcacataccagtaccaaacagaaaaacgagtcatcctattcattaacttgcagaaatggattttctgaaatagtttttttttgcgtaatatataaatctcaaatcgcggaaggcaacatcgatacagctaggcaccagtttacaacaaca

SEQ ID NO: 9845 - DNA, 4854 bp, Zea Mays
cgaatccccaaccattcgaacgccacggccatccccctcgaatcccctccaactcgaacattccggaatccatggaggccggcccccaaaccttctagagcgtgcttctccggtcgccatgagccgccgcgagccggacacctcccccttctgcgacctctccaacctccgcaccccgagacccaaccccaaaaccgtacctccctcgcctcagttcttcaccgcctccaaatccgccctccaggctcccactccgacgtcactccgccgccggaggcctggcgacggcgtccctaccccgacgcccctcggccgccgcctccacgccctcgaggtcgaccagtcgcgctccgcccgccgcgccgagtccggccgtgagcgcgccctccgtaccttttccgcctccgcctcgtcatggctatccctcctcctacgcgacccctccgcctgcgggtgcttcccagggttcaccggttccgccgcggccgcgcagccctgggctacggggaaacgcggcgcgctcgatggagaccgggcgcgtggggggcgcagcccgaagaggtgccgcggtggtggtgatcgcggcggagagaggagcaaggagatgacgccggcgatggtggccgcgttaagggaatctcttaaggatgcgtgcagcctggaggatgtcacggagaggatggagaaacacatgagtaagggcgcgtgtgaggaggtgctctttatgatgtttcaaatttgtaagaacatcgatgaaggcagattgaagatgaaagcacggtgcccccttgttactgaccttaggctcaaagagaaagcaactagggttttcatgtcctacaatccatattggctcaggattggcttgcatattgttctcggtggtgattccttgctgcagactggacaaggaaaacgggacaaggaggttcattttctaaaactaattttggagaagcatatgctttctcaaatcatgactgcaaaatcatgtggtaacaagaagctggtagaagagcaccatgtacaaggttacagtgatgtgctgggcaatattatattgaaaagaatttttcttcttgttgttgcactagacagaaccaaaatagaaagtactcttcctctcgaagctggaatcgatggccttgatggtggatcccctcttttattttgtcaccaaagtcaaataaaatctagtcgtcaaatcattcaagagtctttgagggagaccatgcatggagaaggtgacattctggtacacctcacaactatgggatataaactaaattatcaacagcctgctttgtcagaatatgatttcacaatgaggaatttatttgaagatctccaagatggcataattctttgtagagttgttcagctgctcctcgcagatgcatcaatcatttcgaaagtaattgttccctcagatacagacaagaagaggcgaagtaactgcaccactgctatacaatatatcaaacaagctcgggttccattatctgattctgatggagtcacaatttccgcggaagacatcgctgctggggataaggagcttattctttcactgctgtggaatatgttcatccatatgcagctaccgttgttagcaagcgcaacctcgctagctcgtgaactaaccaagctaaacgtacatgtaacggaacaacaaatatctgagaacaagccacacatgggtttgctttacaattgggttcaggcaatatgctcaaagattggcatgactgttgaaagttcatctcagttagacagaagagcactgaactgtttcatcaactattatttgaatattgatatttcccccttcaaggaaacaccaactggatgccgaaaggaattgttcacctgtcaccaacttgatactatatcagatatcgctggctggccatccagcgagatggggaaagtactctccgatgttcttcaggcagttgatattccagctagtggcatcctagctgatggtgtattatttgatgagaggagtaccattcttttgctagcattcctatcttcgcatctgactaatgatgaaagattggatcaactaaagaatttgatcaacatgaggttgtacaagagtgcggatactaagattgcagcaagacgtatatctcgaggaaagattgatataaagtatcatccatctcagacagataaaaatgatggtgcatgcaccaaccaggagtgggctgcaactattatacagactcaggccagaagtcttattgcaaagaataaatattgtgagcgtaagaaggcaatatttatcctgcaaggtgctttaagggcatggtcagccatcatctcgaacaggaaccgtagttgtctaagtattgctgcctctattccctggcaagcacaaggaaacaacagatatttcatttttataatggaaaggcatcgatttgttcagatgagaaaatctgccattatgattcaactggctgtaaggatttggattagaggaagaaaaaaatttaagaacagtgattctttcaaaagctgtgagttccttgaaggtaaaactccacccaaaattagtagcattgctccttcccctcaggagcattgtagtggtggagataaaacaatagcttcgcccacagcatgcaagcactgtgagcatgtgctcacagtgagagcttctgctgctgctcctattctttattttgatggcatggacagtctagactcaacaactccactacagtttagcggcaatcaaagcaactttataacttctaccactcagctgtgcaaaagtgagcatgactgtcggtcgtgtgtggttgagaaatccaattcagtttccgtcagtaagcttgtgagtgcggatgacattcagtgcagcagcagtatttgtttccctgtctgcaaggaactagtggctgctcaaacgatacaaagtgcatacagaaggtttttgaacaacagaaacaggataactggtgcaattaaaatccagagccactggcgatgctattcagtacgcaagtgtttcatgaaggaaattcaggctattgtaggaatccaaacatcaataagagtattcttgtgctaccaagcttttcaacgccaccgacttgctgcagtactgattcagcgagttgtcagaggatggctggctagaaagagactgttaggttcctcttcactgcgaacctacacaagactttgtgtagtcgaccaaagtcaaaagagaaaatgttatcaaagccttgagttgaacattgtgctagactctgtcataaggctacaaagatgctggaggaagttcctgctgcgtcagtctgtcaaaacatatgtgatctcaattcagtcttttgtccgtggctggttggcacggaagcaactaaaccaaactttccgttgcatcaacatcattcaagttcttcaaacgaggaagcgagctgtgattgtcattcagactcgtttccgtggttgggttgcacgacaagatgctattagaactagaaactctatctgtaacatacagagatggtggagaaaggttttgttccttaaattgaggaagcaagcggcgttagttatacaggctcatttccgtggttggatagcacgacaagttgcttttagaactagaaaaagtattactataatacagtcctatgtcaaagcctaccttgtgaggaaggcttcgaagcaagaagttgcacatataagatctagactgcagaagtcatcttcacaggttgatgatagtatgcgcctgatcaacagactggtgtctgcattgtcacaactccatcgctgtcggagcatacacagcattcgtcaaacttgtgcaacattgagtactgctacagagtattccaagaaatgctgcgagaagctggtcgctgctggtgctgtagatatattgctaaagcaaatatatttgctgaaccgtgggattgctgaccaggaggtcttgaagcaagtgttccttactctcaggaacattgctcgatattcaaatcttagacaggtgttagccagcactgcagaatctgttgaaatcatcttccaggaattactgaggaacaaagcagacggattcttcatcgcgtctgatattctaaaaagcctatgtgaatccaaggaaggccgtgaaaccgtccaagcgctgagtcacctcatcaaaaggctgcgcaatctggtgcatgacctggaaaagaaggtagagcttgataagaggtaatgcaatacatcaattcgcaagattacgcccttgccaccgatgtcgggtctgctgaaacgggctcctcttgtcctgcaaggaatgggcgcaccggagccgtgaaggcgaccaacctgcggcggcttcgggaggccgccacactctatcatatcctcaccagtggtacttaacgcgtcggcagcatagctagaaaggctaatctgacgttttgttgtacaataatttagtctaagaaggttttcatgtaactggaggtgactacggtgcaattgtcgaaaaccttcctaggtaaccaggatcttctaagttctgttgctgcagttggttttgtgtggtaggtgtgagaatcatcggcttgatgtattggattacctcttataaagagtgaagtcgctgagttaaccgtcctcacgtgtcttggattaaccgccttttatgttctaacaaatcatcagctcttgatgtgattgttagtatcacataccagtaccaaacagaaaaacgagtcatcctattcattaacttgcagaaatggattttctgaaatagtttttttttgcgtaatatataaatctcaaatcgcggaaggcaacatcgatacagctaggcaccagtttacaacaaca

SEQ ID NO: 9846 - DNA, 1477 bp, Zea Mays
gctccgacttcaagcctccaactcacatcacatttcattcacatatatacactccctccgcctttgcttttattccgatcgatgatggatgtagcagtagcgcactccatccgccacactagataagcagcgtctctccctctcctgtctcgatctctccaccaaccaccattgctgaggctgagctctggatgagctcggcttgcctcctggagcagtggatcatgagcagtccggaggacgacgagacaatgttgtccttggccgaagaagtggacgagtgtgtgttcatgatggactacgagcggccaccaccagccatcgccatgcatcaccaaaacccataccacgtcttggaggctatcgttgagcccagcacacaggtggagatcgaggtacatgagagggccatgaagcacttgagagagatcggggaggagaggcggacgaggagcttattgaagaggaggctgatgatgaggctcaggaaagacggctacgatgcgtcgctctgcaggtcttcttgggtcgctaccgccgagcacccgggaggcgactacgagtacatcgacgtggtcgttgcgggggagcacggcgggggcgcggcctcgtcgtcttccacttccagcagcagctccaggatcgtggtcgacatcgacttcagttcccagttccagctcgccaggccggccccgtggtacgcgcagctctgggcccggctgccgccggtgttcgtggggccacgcgcgaggctccggaaggcggtgtcgctgctctgcgaagcggcgcagcggtcgctgcgggagagcgggctgcacgtcccgccgtggcggaggtccgggtacatgcaggccaagtggctccccggcgggacctcggaggtggtggcggcggcggcacagaggtcggtggcgatagcgaggggcgcgggcggcgggacccggaggccaggcgcgggcgcgggcgcgggcggcctctcgatggcgctgctgtccagctccggcgctgaggccaacggctgtcaaggccaagctgggtccatgtgggcgtagtgctctttttactgatcagaggatcatcagaataggccgcagaaactagctacaccattttgtgcattggttaggtaggttagcactggtagtaagaactgcttagtagcagcagtagcattttgggttgagccacggccatgtcgtcatgtggatgtggtttgtgtgtgtttcttttgttttcgttgcaagctgtgctgtctgcctgtctcttgcttggttagccaagcgcccaagccatgcggcagacgacggactttgcttcggtggtggggtagtttccgaggccgcagcaagagagatcagcaatgcgatttctgaaaaggtaaggctaaaagtaaatctgatcgcaacgtgtgcatgggaaagatagttcctcgcctgaaattttgtcggttctgaattctgatgctagagaaagaaag

SEQ ID NO: 9847 - DNA, 1722 bp, Zea Mays
agaatcccttcgtcccggagacccggacctccctggttgcgggttgcggcgcctgcctcctccgcccatgcgacgcgcgcccgcgcaaactacccgccttcgcagtcgtccgcgcgggaaacgtgaagctaatccaactccaacatttcctcccgatgcgctgtgctgtgctgtactccttcgcagggagctctcgaaacccaaaccctagctctgacccaccgcgattccccatttgatttctcgtacccatgggtggatccgctgatcccgaggcgccgtcgccgtctccgacgaagccatcgccctcgtcggctgacgggaagccgccgaggcggtgcgtgcagtcgaaactctcgtgggggcttgtcaaaccagccggcggcggccgcgaaggtggaggaaaaggaggcggcggtgaagcaggaagaggagatgccgaggctgttcctcctgtgcctgcggccggggaggcggcggcgacggaagttagagaggggctggagaaggggaagaagaagagaaagccgcggaaatcagaggatggcaagaagggctcttcaagcaaacagaaacaatggcaggatcaatcgaacaaagatggagtcattttggttgatgaaagccctcagaaaaagcaacgtaaaggtagaaagcaagatgcaatactgaaggagcctaatgctagcagaaagcgttgcaagacatcggaagctcctgatggtcctggaagctgtcagcaattgcatatcagccagattgaagccagctcgcctgcagcagcgccagtaataattgacgttgatttgatgagtacgccttctaaagcaggacatgctaattcaatcgatcaggatatatcaccgttgaaagttgacctaaggtcagaggcgaagatagctgcagaggaaattcgaaggttatcatctggaaagaaaattcaccctttctttcattctcggaaattgaacaaatgtgctagccaagatcaagatgtcatcaatattgaaaacatgcatgggctttgtgattctgaaagggatccaccattttatcctattcatgttgtgtaccaatcagaggccagcatgccaatccactggagtaattggataatcactgatatgtcatcatttgacactgatactgccgttcctcttaaaaaatctgtgtcatactttgagggcttggttaagccactgacaatagaaactaattgcaagaggcattctaatcaattgtcagatccgattcttgctgagtgtacaacttcaggaatgccttttccaagtttttctggcaagcaaagtgaacacagctgtttttcagatgcgatcaacgtggacacacagaacttgttgaggcctggtgctagttgccaagcttctcttcttgatctgaatgtagagccagaagatccacagaatggttgtcagcctgcctgttacctatggactgacaagtaccgacctgaaactgtggcccaggtatgtggaaatagtgagcacgtaaagtttcttgctgaatggcttaaaagctgggatgaaaaaggccacaagattggagttgctaacggggacactaatgataactcatatcaagatatatctgattcagattattcagagagtgcttctgattgtgaaaatacacttctaatcactggacctgttgggatatatgacctggatacactctcattcttgtctatgctactgttat

SEQ ID NO: 9848 - DNA, 4353 bp, Zea Mays
cctgcctcctccgcccatgcgacgcgcgcccgcgcaaactacccgccttcgcagtcgtccgcgcgggaaacgtgaagctaatccaactccaacatttcctcccgatgcgctgtgctgtgctgtactccttcgcagggagctctcgaaacccaaaccctagctctgacccaccgcgattccccatttgatttctcgtacccatgggtggatccgctgatcccgaggcgccgtcgccgtctccgacgaagccatcgccctcgtcggctgacgggaagccgccgaggcggtgcgtgcagtcgaaactctcgtgggggcttgtcaaaccagccggcggcggccgcgaaggtggaggaaaaggaggcggcggtgaagcaggaagaggagatgccgaggctgttcctcctgtgcctgcggccggggaggcggcggcgacggaagttagagaggggctggagaaggggaagaagaagagaaagccgcggaaatcagaggatggcaagaagggctcttcaagcaaacagaaacaatggcaggatcaatcgaacaaagatggagtcattttggttgatgaaagccctcagaaaaagcaacgtaaaggtagaaagcaagatgcaatactgaaggagcctaatgctagcagaaagcgttgcaagacatcggaagctcctgatggtcctggaagctgtcagcaattgcatatcagccagattgaagccagctcgcctgcagcagcgccagtaataattgacgttgatttgatgagtacgccttctaaagcaggacatgctaattcaatcgatcaggatatatcaccgttgaaagttgacctaaggtcagaggcgaagatagctgcagaggaaattcgaaggttatcatctggaaagaaaattcaccctttctttcattctcggaaattgaacaaatgtgctagccaagatcaagatgtcatcaatattgaaaacatgcatgggctttgtgattctgaaagggatccaccattttatcctattcatgttgtgtaccaatcagagcatgccaatccactggagtaattggataatcactgatatgtcatcatttgacactgatactgccgttcctcttaaaaaatctgtgtcatactttgagggcttggttaagccactgacaatagaaactaattgcaagaggcattctaatcaattgtcagatccgattcttgctgagtgtacaacttcaggaatgccttttccaagtttttctggcaagcaaagtgaacacagctgtttttcagatgcgatcaacgtggacacacagaacttgttgaggcctggtgctagttgccaagcttctcttcttgatctgaatgtagagccagaagatccacagaatggttgtcagcctgcctgttacctatggactgacaagtaccgacctgaaactgtggcccaggtatgtggaaatagtgagcacgtaaagtttcttgctgaatggcttaaaagctgggatgaaaaaggccacaagattggagttgctaacggggacactaatgataactcatatcaagatatatctgattcagattattcagagagtgcttctgattgtgaaaatacacttctaatcactggacctgttgggtgtggaaaatcagctgcagtttttgcatgcgccagagaacaaggcttcaatgtgatagaggtaaatacatctgacatgagaaatggagcttatgtaaggcagaagtttgaggaagcaactaaatcacatggccttgaaaaatggtcacaggaggaggttatcaatccactaagggatgattccttggatccagattcaggaactcctgataggactgaataccaatgtttgatgtcctgtgctacaagagtaatgattgactgtgatcaacagaaatcacctgtaggatactactcaggtttgaaggcctgtgatgaacctcctaaacaagttgctaacaagacactcatactatttgaggatgtggatactgtctttgatgaggatcgtgggtttatttcaactattcttaagatggcagagactacaaaatggccaatcatactaactagcaacaagaaggatccgtctttgccgaatctcttggatcaacttgttttggatttcaaatacccatcgacctcagagctactttcacacgttgccatgatttgtaaatctgagggagtgaatgtcactgttcctcagttaaaacatgtaattgatgtttgtctaggtgacattaggagggtggtgatgtttttgcagttttggtaccaagggcatcaattcacagagaggccaaaggaatgtttgtgtggtcctttctcacttgatttagatgcagtacattctacagtgccaaaaatgttgccatgggagttcccttgtaagttatctgaaacattatgcatggaggtagacaaaactatccttttggctgaagaaaagaaaaaacagatggaaatatcagatcttgaaggcctgcagttacatgtaacagcacctttgatcaagggaagaacttctaaaacaagaagggctaagaaatccaaattaaagcgtgctcactcgactgagcataatgatatttcaccttgtaagaatgaacttgatgatttccatgatcttccagatatatctcttccatctgataaacaaataaaaagaaatcggcatcgttcgctgctattatctgagtccgatgatgatccagctgatgtaggtactgaaaaacataacatatttactgttactgaagttggtttcttcccacaaccttcagaggtgcctcctatgcatgggcaagggatttctgatcagttccattttcccgttgaatcacgagagacatgtgaaattgctgattctttccaaaatccacctgaaagcaacatgtatgggtccatttcacaagtttgtgatacatttatgtcacaggacgtgtcatgtgtacccgagtcatccttaattttggacggcacatctgcatccataagtggtgatgaatttttgtcaagggcagtgtccaatggtttttctgccttttgtgagggtacatacactacctccagaatggtattagaagacagtgactgtgtgaagaatctaatggctgaacgacaaaaagatgttgaagatgtagttggtgagacaagtgagacttatatggaatcatttcggagaaatgaacaggcaagctgttcagctgctgggtttcaattaatggatgaatgtagtcgtgctgaaagcatctggctgctctctggcaaaaaatctaatgactcttgcaaggtggaactagtacaggacacttggaacaggctacggagttgtcgtcttgaatttaccagtgaggctaatcacaacagagcaacttctggagctttgaagcttgtctcagaagtgtctgatttaatatcagaatcagatcttatgcttttccgttgctaccctcttactaaggatacgttggatccgtctttaactccttgtgatgagccagttgattcttcttggtacagcaatcaggttgagatgggatctgtatatgcccagcatgctcttcgtattttatcgaggaattcccaaaaaatagatggtggttctgtcgatttgtcacaagagttgtttgccagtacagctgctgtatcctttggtaaaattacctgttcaggattcaggaatgattatggatctacggacctttctcatatgaaaaatccaactacctgtatttttaaaagaagggagcggcatgttcatctttgtgaaaccctgtctccagtggttcctccaaagttgttgcagtcattgagaggccctgcttttgttgattatttgtcttcaatcagccagatttccaaattagaaaacttgcgactctctgaaaataaagtcataaacaagcgaagaaggtcccgtcaggcaagacattacttgagttctggcgcacttcaactttcacatgaggatgttgtattattagaagaaagcggctgtttcagtagcagacgcgagagggttgaggttgtagagcaagcaccagtcagtacataagttaatgaactggtgctgatcatgagcggcagcattttgattttttttattagaaggcaatgtgactgggttggccgagccatttttatagttgcgtccgtgatcacggagcccggcggtggaggaaccggaatgtgtgcagttgattgctgtatctgttagataactagacattttaaagtttatttaaattttaaaattatttatagcaatcatgaatatggattaatcttagtatgtttacatgttcatgtttatcatctttataatcataaatagtataaaaataagaag

SEQ ID NO: 9849 - DNA, 4506 bp, Zea Mays
cttcgtcccggagacccggacctccctggttgcgggttgcggcgcctgcctcctccgcccatgcgacgcgcgcccgcgcaaactacccgccttcgcagtcgtccgcgcgggaaacgtgaagctaatccaactccaacatttcctcccgatgcgctgtgctgtgctgtactccttcgcagggagctctcgaaacccaaaccctagctctgacccaccgcgattccccatttgatttctcgtacccatgggtggatccgctgatcccgaggcgccgtcgccgtctccgacgaagccatcgccctcgtcggctgacgggaagccgccgaggcggtgcgtgcagtcgaaactctcgtgggggcttgtcaaaccagccggcggcggccgcgaaggtggaggaaaaggaggcggcggtgaagcaggaagaggagatgccgaggctgttcctcctgtgcctgcggccggggaggcggcggcgacggaagttagagaggggctggagaaggggaagaagaagagaaagccgcggaaatcagaggatggcaagaagggctcttcaagcaaacagaaacaatggcaggatcaatcgaacaaagatggagtcattttggttgatgaaagccctcagaaaaagcaacgtaaaggtagaaagcaagatgcaatactgaaggagcctaatgctagcagaaagcgttgcaagacatcggaagctcctgatggtcctggaagctgtcagcaattgcatatcagccagattgaagccagctcgcctgcagcagcgccagtaataattgacgttgatttgatgagtacgccttctaaagcaggacatgctaattcaatcgatcaggatatatcaccgttgaaagttgacctaaggtcagaggcgaagatagctgcagaggaaattcgaaggttatcatctggaaagaaaattcaccctttctttcattctcggaaattgaacaaatgtgctagccaagatcaagatgtcatcaatattgaaaacatgcatgggctttgtgattctgaaagggatccaccattttatcctattcatgttgtgtaccaatcagaggccagcatgccaatccactggagtaattggataatcactgatatgtcatcatttgacactgatactgccgttcctcttaaaaaatctgtgtcatactttgagggcttggttaagccactgacaatagaaactaattgcaagaggcattctaatcaattgtcagatccgattcttgctgagtgtacaacttcaggaatgccttttccaagtttttctggcaagcaaagtgaacacagctgtttttcagatgcgatcaacgtggacacacagaacttgttgaggcctggtgctagttgccaagcttctcttcttgatctgaatgtagagccagaagatccacagaatggttgtcagcctgcctgttacctatggactgacaagtaccgacctgaaactgtggcccaggtatgtggaaatagtgagcacgtaaagtttcttgctgaatggcttaaaagctgggatgaaaaaggccacaagattggagttgctaacggggacactaatgataactcatatcaagatatatctgattcagattattcagagagtgcttctgattgtgaaaatacacttctaatcactggacctgttgggtgtggaaaatcagctgcagtttttgcatgcgccagagaacaaggcttcaatgtgatagaggtaaatacatctgacatgagaaatggagcttatgtaaggcagaagtttgaggaagcaactaaatcacatggccttgaaaaatggtcacaggaggaggttatcaatccactaagggatgattccttggatccagattcaggaactcctgataggactgaataccaatgtttgatgtcctgtgctacaagagtaatgattgactgtgatcaacagaaatcacctgtaggatactactcaggtttgaaggcctgtgatgaacctcctaaacaagttgctaacaagacactcatactatttgaggatgtggatactgtctttgatgaggatcgtgggtttatttcaactattcttaagatggcagagactacaaaatggccaatcatactaactagcaacaagaaggatccgtctttgccgaatctcttggatcaacttgttttggatttcaaatacccatcgacctcagagctactttcacacgttgccatgatttgtaaatctgagggagtgaatgtcactgttcctcagttaaaacatgtaattgatgtttgtctaggtgacattaggagggtggtgatgtttttgcagttttggtaccaagggcatcaattcacagacctttcagcatgtaaaacttactatgatggtacatgatgaagtggaagatgctggttgtttatgggtattgtgctcaataatagccccccccccatctagaatagaggccaaaggaatgtttgtgtggtcctttctcacttgatttagatgcagtacattctacagtgccaaaaatgttgccatgggagttcccttgtaagttatctgaaacattatgcatggaggtagacaaaactatccttttggctgaagaaaagaaaaaacagatggaaatatcagatcttgaaggcctgcagttacatgtaacagcacctttgatcaagggaagaacttctaaaacaagaagggctaagaaatccaaattaaagcgtgctcactcgactgagcataatgatatttcaccttgtaagaatgaacttgatgatttccatgatcttccagatatatctcttccatctgataaacaaataaaaagaaatcggcatcgttcgctgctattatctgagtccgatgatgatccagctgatgtaggtactgaaaaacataacatatttactgttactgaagttggtttcttcccacaaccttcagaggtgcctcctatgcatgggcaagggatttctgatcagttccattttcccgttgaatcacgagagacatgtgaaattgctgattctttccaaaatccacctgaaagcaacatgtatgggtccatttcacaagtttgtgatacatttatgtcacaggacgtgtcatgtgtacccgagtcatccttaattttggacggcacatctgcatccataagtggtgatgaatttttgtcaagggcagtgtccaatggtttttctgccttttgtgagggtacatacactacctccagaatggtattagaagacagtgactgtgtgaagaatctaatggctgaacgacaaaaagatgttgaagatgtagttggtgagacaagtgagacttatatggaatcatttcggagaaatgaacaggcaagctgttcagctgctgggtttcaattaatggatgaatgtagtcgtgctgaaagcatctggctgctctctggcaaaaaatctaatgactcttgcaaggtggaactagtacaggacacttggaacaggctacggagttgtcgtcttgaatttaccagtgaggctaatcacaacagagcaacttctggagctttgaagcttgtctcagaagtgtctgatttaatatcagaatcagatcttatgcttttccgttgctaccctcttactaaggatacgttggatccgtctttaactccttgtgatgagccagttgattcttcttggtacagcaatcaggttgagatgggatctgtatatgcccagcatgctcttcgtattttatcgaggaattcccaaaaaatagatggtggttctgtcgatttgtcacaagagttgtttgccagtacagctgctgtatcctttggtaaaattacctgttcaggattcaggaatgattatggatctacggacctttctcatatgaaaaatccaactacctgtatttttaaaagaagggagcggcatgttcatctttgtgaaaccctgtctccagtggttcctccaaagttgttgcagtcattgagaggccctgcttttgttgattatttgtcttcaatcagccagatttccaaattagaaaacttgcgactctctgaaaataaagtcataaacaagcgaagaaggtcccgtcaggcaagacattacttgagttctggcgcacttcaactttcacatgaggatgttgtattattagaagaaagcggctgtttcagtagcagacgcgagagggttgaggttgtagagcaagcaccagtcagtacataagttaatgaactggtgctgatcatgagcggcagcattttgattttttttattagaaggcaatgtgactgggttggccgagccatttttatagttgcgtccgtgatcacggagcccggcggtggaggaaccggaatgtgtgcagttgattgctgtatctgttagataactagacattttaaagtttatttaaattttaaaattatttatagcaatcatgaatatggattaatcttagtatgtttacatgttcatgtttatcatctttataatcataaatagtataaaaataagaag

SEQ ID NO: 9850 - DNA, 3127 bp, Zea Mays
atggaccttgacgcggctgcagaggaggaggagcgccggcttgaggactacaatgaggcgcaggatgctaggtacttcctggggtttggtgacacccatggagatcctattgaggttgatactgttgccggctctcaaattggcactggaaccgaatccactagcccgtcagaagcagtccctaatcctgatcaggctgctaatgctagtggtagcaacatgaagaaaaggtccaagtgctgggatgactttgatgaattgactaagattgtgaatggtaagaaagtcaggagccacgttgtgcctgccgccagccccgacacctccagatgttgcctccatccatcctccgagcttaccgcctcgcccccgcccccaaaccctagaccccctacaatcacgaggaaggggagaacggccgaggaggatgctccgcaaggaaggggaggacggtcgaggatgacgttgttgctcgtcgctgagcatcttcgcgccctcagtgctgccaaggagccctctctatccctgatggcgtcccaaccgttggccgatcgtcggcgatgatgacccagcctccctctccacgtccctgctccccaactcatacaggaattcacaagagcaatatggtacaccaatgccacacattggacaaacaacagttgaagttgatcttttgaattatggtgtgatagaaggtgatgaatcatgtaaacatttctctgaactaaaagtcttacatccatggatgatcaaagatggcatgaatcttacaaaggaacagagattagagaaaattgagtcacaaaaacttgaaaaatatgaagccaaaggtgacaagagacatgacttgaaagatgatcaaagtgtacaggaagaatacataaatgcatattatgaggccttgaggaaaagttggaagaggaagaagcaaaaagcagaatgcagcatgaaggcaagatttttgtccctgatgctcaaagggaacgccaagttgacaataaatacaagcaggatgatgatgaagaaggcattgaataagtattccagctttcttatatggacagtaggaacccaaggtttgctgtgtaatccattatcaacagttgcactcacattagccttgtggcgattcttttcaaaacaggatgatttaaacccatatgttgttccaatggctatgggcatttaacgtcaactagagagtcccttggatatgactacaagtactatcatcaggaggattgttgctaaccatgaagcttacctgtgtattgtcagctttcaaactcgatgaaccaactgagaaagtactgcttatgaagctagagaagcatggaaggagtgttgctgaatcaaaggcaaaagaagaagctggaagagttttgatttgcatgaaggataggtcctcgacacagttcagcagagatgctggctctatgcccaaggtgtggacaggaaaggaggacataaaagccataactaaaactgttcgctcagttgtacgccagatgctaatatttaatactctatatatagaatactgttgaagacgcttctaaagcactagagtattgtagcactgatggaaggccttcgatgaaatgtttccctgaaagttgcatactacatcgctgaagcactacaatattgtaacactgagggaaggcctttgtatcatgacctaaattcatatagggccctctttgatgagggaataaggttgtgtcaacatggaccgtgccactctcatcgagggctaccataacaagattgaagttgaactcaacaagatctgcgttggaatcctcaagctctttgcttcccaccttcccccctcattaatagttccaaagtccaaggtcttctacctcaagatgaagggtgattactacaggatattgctttggaggagttggcccccttatcctattaggctttggctgatgcttaacctctcaactctcctgatcttgctcgtggtctccccaaacagattgacacggtgggaggaaaaagacaatggtcagcaacttactcggagcagaaattttttaattgtggtacccgtggtgctaaaacaattatagagggcagaagacacacgcacgtacgtcaaagaggaagcacgcatcaatcagatcgatcggtcatcaggtcggcaatgagtaagacatcgacgaccggctgacgcagcgtaaccgtaccagtcaaagatggcaatggattgggtgcatgcatgatcagagcctggacctcacctggaggtgggagcaagaaaccaatccactcggcacttccatattacgggagcggagcccagcccaacgaagcggtcctcatgggctttcgctctcgcgttacgggcatgttgattgcacgaggcccacagcgctcgagcatgggccctcaaccaccagccagctctcccgctcccagagtcccagactcccagtgacctgaattcgattgacgccgaccatcgccatccttcccaggtacgtactcgtacaccgccacgtccatcgctgttctccccgccgacccacggcatccgcagcgacgccgacgcgtggcccccgtccagatcacaagacccattcagattcttcaggtgaattgagaccgtgagaggttagacagacaggtagcgcatacggtactgtacgtacacggtataccatgacaaaaacaaacgccagtgaccttcctgttccttactggcggcgaacaagacgacggtgcggtgacacgatggttgccggagttccggtttgtcccaacctccagatgtccatgccacgacaattgattgacttgaacctcccgacgccctgagtctataattgggagtatcatgtcgtgggttctaggttctacgtgcccttatcttaatgtgtgtgtcatttcatttcccattgttgatccgcgagcggagtggatatctgtgttcaactagtgctattaggtaggaatatttgaagcgatcaagtattacacattgtttgtgatggccataaagctattctcaataatagttttatggtaatttcatgcatatttaatagtgtgacacgtcatatgttttatgacatggcataccatttaatagattgagttttattag

SEQ ID NO: 9851 - DNA, 4125 bp, Zea Mays
atggaccttgacgcggctgcagaggaggaggagcgccggcttgaggactacaatgaggcgcaggatgctaggtacttcctggggtttggtgacacccatggagatcctattgaggttgatactgttgccggctctcaaattggcactggaaccgaatccactagcccgtcagaagcagtccctaatcctgatcaggctgctaatgctagtggtagcaacatgaagaaaaggtccaagtgctgggatgactttgatgaattgactaagattgtgaatggtaagaaagtcaggagccacgttgtgcctgccgccagccccgacacctccagatgttgcctccatccatcctccgagcttaccgcctcgcccccgcccccaaaccctagaccccctacaatcacgaggaaggggagaacggccgaggaggatgctccgcaaggaaggggaggacggtcgaggatgacgttgttgctcgtcgctgagcatcttcgcgccctcagtgctgccaaggagccctctctatccctgatggcgtcccaaccgttggtaatatctccgcctcggccatgggcattgcaaccctcgattcaatctctcctcttcgatctcagtatttaagattttgaattagatttgtatattatttttctattatattaggagcaattgaagccattggacattggttgcacaacttgataaagtgaagaatctgcttgcgtctgagtttgggagtctataaacatggggaagagaaaatattggtgcctttgcaattggtgaccctgctgcaactatttttttctaggaattcacaagagcaatatggtacaccaatgccacacattggacaaacaacagttgaagttgatcttttgaattatggtgtgatagaaggtgatgaatcatgtaaacatttctctgaactaaaagtcttacatccatggatgatcaaagatggcatgaatcttacaaaggaacagagattagagaaaattgagtcacaaaaacttgaaaaatatgaagccaaaggtgacaagagacatgacttgaaagatgatcaaagtgtacaggaagaatacataaatgcatattatgaggccttgaggaaaagttggaagaggaagaagcaaaaagcagaatgcagcatgaaggcaagatttttgtccctgatgctcaaagggaacgccaagttgacaataaatacaagcaggatgatgatgaagaaggcattgaataattatacttcacattatcatgtctttacttttggcagtgttgttagtaatgaagttgcttctcatgcaacacttcttattagcaagcagtatgtattggcaatgggttttgcattgctggaacacctgacagaaatttttagtttcccagaagtaaaggcgttctggtttgttagtaatattggccttctaatggtttatgctctatccagagtattccagctttcttatatggacagtaggaacccaaggtttgctgtgtaatccattatcaacagttgcactcacattagccttgtggcgattcttttcaaaacaggatgatttaaacccatatgttgttccaatggctatgggcatttaacgtcaactagagagtcccttggatatgactacaagtactatcatcaggaggattgttgctaaccatgaagcttacctgtgtattgtcagctttcaaactcgatgaaccaactgagaaagtactgcttatgaagctagagaagcatggaaggagtgttgctgaatcaaaggcaaaagaagaagctggaagagttttgatttgcatgaaggataggtcctcgacacagttcagcagagatgctggctctatgcccaaggtgtggacaggaaaggaggacataaaagccataactaaaactgttcgctcagttgtacgccagatgctaatatttaatactctatatatagaatactgttgaagacgcttctaaagcactagagtattgtagcactgatggaaggccttcgatgaaatgtttccctgaaagttgcatactacatcgctgaagcactacaatattgtaacactgagggaaggcctttgtatcatgacctaaattcatatagggccctctttgatgagttgattttgagaagtatgaagggatgattaaggtcatggagaaggtggtaatacagttaattctatggagctcactggaggagcactaccttttgccagttgcttgcaagaatgtaattggaatccgatgtgcttcatggcgcatcgtatcctccattgagtatagggaataaggttgtgtcaacatggaccgtgccactctcatcgagggctaccataacaagattgaagttgaactcaacaagatctgcgttggaatcctcaagctctttgcttcccaccttcccccctcattaatagttccaaagtccaaggtcttctacctcaagatgaagggtgattactacaggatattgctttggaggagttggcccccttatcctattaggctttggctgatgcttaacctctcaactctcctgatcttgctcgtggtctccccaaacagattgacacggtgggaggaaaaagacaatggtcagcaacttactcggagcagaaattttttaattgtggtacccgtggtgctaaaacaattatagagggcagaagacacacgcacgtacgtcaaagaggaagcacgcatcaatcagatcgatcggtcatcaggtcggcaatgagtaagacatcgacgaccggctgacgcagcgtaaccgtaccagtcaaagatggcaatggattgggtgcatgcatgatcagagcctggacctcacctggaggtgggagcaagaaaccaatccactcggcacttccatattacgggagcggagcccagcccaacgaagcggtcctcatgggctttcgctctcgcgttacgggcatgttgattgcacgaggcccacagcgctcgagcatgggccctcaaccaccagccagctctcccgctcccagagtcccagactcccagtgacctgaattcgattgacgccgaccatcgccatccttcccagacaagttttgctgcctatcaagggaagacgttctccagtttctcgtggatgacttggtggttggtgctcttgctcccatcccgctgactcagatattttcccttggagccataaacccgcagtacggttacgtggaagcatctgcgcctgccatggaagcaattcaaaatacccttcaagacccgtgcgccgtcgctgttgtggagacgacgccggatggaactcgcaaactactaggagacatctctactcactggcactggcaaacctgtcagctgggcagttcgtcatgggcgccgacgagaacgggtcaacgcctatctcgatctccccagagcctcccatcgtcaccggtggaggagatcagtcctgggcgctcgcgccaagggcgaagaagttcagcagcaggagcatcgggtttctgaacaacacccagatgccagcgtggcggacacggagcgcgtaccaccggggcaggaccgcaggagcgcgccgctgatgtgcaagaccacgagcaccctcgcggcggtcatggcgcagccgcgcagatgcggacacgtctgagtgacggatgcagagccggaggaggacagagtcctcctcggcgtggtgggctacactacaccgagatcttcaatgccgccgccaccaatactccaatagcacctgcccgagtccaacagcgtcttgatgcaccggcaccacatcgtggctgtacagtagagtgtacttggttgatgtttggctccggtgcacgctgttgcaccgaactgtacaacgtacttggctcctcatttgttgctttgtctcgagagtttgtcttgtagataatcttggtctgataggagcaggactcggtggtatattgttgcattcattttcattgtggagggtacaaaataagaattcgggcttgcctgggtggctagtccattttgcatgctcacctgcactctgtagctgacgattcagagctcgtttgtaacaaaggaaaaattcctgaattctacgtttttttctgtgctttttaactaattcctataaattctat

SEQ ID NO: 9852 - DNA, 4403 bp, Zea Mays
atggaccttgacgcggctgcagaggaggaggagcgccggcttgaggactacaatgaggcgcaggatgctaggtacttcctggggtttggtgacacccatggagatcctattgaggttgatactgttgccggctctcaaattggcactggaaccgaatccactagcccgtcagaagcagtccctaatcctgatcaggctgctaatgctagtggtagcaacatgaagaaaaggtccaagtgctgggatgactttgatgaattgactaagattgtgaatggtaagaaagtcaggagccacgttgtgcctgccgccagccccgacacctccagatgttgcctccatccatcctccgagcttaccgcctcgcccccgcccccaaaccctagaccccctacaatcacgaggaaggggagaacggccgaggaggatgctccgcaaggaaggggaggacggtcgaggatgacgttgttgctcgtcgctgagcatcttcgcgccctcagtgctgccaaggagccctctctatccctgatggcgtcccaaccgttggccgatcgtcggcgatgatgacccagcctccctctccacgtccctgctccccaactcatacaggaattcacaagagcaatatggtacaccaatgccacacattggacaaacaacagttgaagttgatcttttgaattatggtgtgatagaaggtgatgaatcatgtaaacatttctctgaactaaaagtcttacatccatggatgatcaaagatggcatgaatcttacaaaggaacagagattagagaaaattgagtcacaaaaacttgaaaaatatgaagccaaaggtgacaagagacatgacttgaaagatgatcaaagtgtacaggaagaatacataaatgcatattatgaggccttgaggaaaagttggaagaggaagaagcaaaaagcagaatgcagcatgaaggcaagatttttgtccctgatgctcaaagggaacgccaagttgacaataaatacaagcaggatgatgatgaagaaggcattgaataattatacttcacattatcatgtctttacttttggcagtgttgttagtaatgaagttgcttctcatgcaacacttcttattagcaagcagtatgtattggcaatgggttttgcattgctggaacacctgacagaaatttttagtttcccagaagtaaaggcgttctggtttgttagtaatattggccttctaatggtttatgctctatccagagtattccagctttcttatatggacagtaggaacccaaggtttgctgtgtaatccattatcaacagttgcactcacattagccttgtggcgattcttttcaaaacaggatgatttaaacccatatgttgttccaatggctatgggcatttaacgtcaactagagagtcccttggatatgactacaagtactatcatcaggaggattgttgctaaccatgaagcttacctgtgtattgtcagctttcaaactcgatgaaccaactgagaaagtactgcttatgaagctagagaagcatggaaggagtgttgctgaatcaaaggcaaaagaagaagctggaagagttttgatttgcatgaaggataggtcctcgacacagttcagcagagatgctggctctatgcccaaggtgtggacaggaaaggaggacataaaagccataactaaaactgttcgctcagttctgttgaagacgcttctaaagcactagagtattgtagcactgatggaaggccttcgatgaaatgtttccctgaaagttgcatactacatcgctgaagcactacaatattgtaacactgagggaaggcctttgtatcatgacctaaattcatatagggccctctttgatgaggtaattgttgctttggttttcacttttccttacaaccttcgaattatgtggctatgtctgaaaacttaatacttctacagttctcgggtcttcataccattccaatttgtgttagctaataaacaagtcaggctatgtctgaaaccagtatctaatagttctccgcccaacaaggaactgtgcaacataaaaacaaatcttaaacaagttacatgttctgaattttagaaactcaaactccactctaagggctaaccggctaaccgaacatgttatagaacaaactcagtcctaaattgtagacatattggaattctgcgtatgttttttccaacctatcttcaaactatacaagaattattatctaatataaacaatacattgacaataatgtacacaaaaatccatgtatttaatgtgtggacatggtatcatcatgtctgactaacccttttttactttcattgaatgaagttcgtacatgtatttgaggtattttttattttcttcctactataagccttgcttagatactgatctaagatcatctccaagggacagacaaaaaatcctagaggttctcacataagtacggtttagagaagggataaaccgaggaaagcctcccccacaaatacagaaaggctgcctcgaacctatgatttggtgactcagtgaaacaaacaactctcactactgcactaggcctgccattgtttacgagcatccccaagggccttacttaaattcactctctaaattttaatttggtgagccattttaataaaaatatgtttgataggttttttatcttctaacaatttttatgtatcttgtacgcactctagagaaccaacccactcactgctctttatttactgcatgctatttaggtctgctaagcaaaaaatgatattctttctcaatcttttgtcatgtttagataaatttggtggttttaggataaagtttgtgaagggcttcactttttttttctataattagaatttaactcaaaagttttcccttgaaattcaagttgattttgagaagtatgaagggatgattaaggtcatggagaaggtggtaatacagttaattctatggagctcactggaggagcactaccttttgccagttgcttgcaagaatgtaattggaatccgatgtgcttcatggcgcatcgtatcctccattgagtatagggaataaggttgtgtcaacatggaccgtgccactctcatcgagggctaccataacaagattgaagttgaactcaacaagatctgcgttggaatcctcaagctctttgcttcccaccttcccccctcattaatagttccaaagtccaaggtcttctacctcaagatgaagggtgattactacaggatattgctttggaggagttggcccccttatcctattaggctttggctgatgcttaacctctcaactctcctgatcttgctcgtggtctccccaaacaggtttggtttctagatccattacatggagtgtgtagtgtttttcctcttttttgcaatcctcatgatgtgccaccaggtctggtctaatcgttcccctaaaattgtggcctataatcagcttcttggcctatgatccttttgtatgtaggcaaagccaacgaatgaaagggactcactcgcagcaacaaccaaaaagctgatcacgcattctccttttcacatttgttgcatttaattaattcatccaatagcataaattggcactccttttgtgttattgctctttggttggtcttattgttgttgttgtactgcttgccatgtgtattttatcataagtgttgttttggctaatccctaacgatgcaatacatttgagcaacaattcaattgttttgttttttgaacagttattctaaatacccaatgttcacagcatatttcacttcccatggttcactgttttgttgtattagtagctctaattctaaggtgtcaatgaatcttaggcgaaagaattgttcgtagtagtggtccagaacagacttcatactgtgatttacagacttatgttttactagctgagtactcgtgcgttgcaacgggaatatataataacagtacactacgataacttatatacataatatgtgttataccgttatgagaaaatgttttataatcaatttgtgattctggccatacataaattttgttattttaatctatctgtttcaccactacattgcaaccattagtatcatgcagacttcgatatatgtcacgatttgcatggtctcatcattggagagcacgttccacacatgcaggaagaaattcccccgtacatcgttagtcattagacacgtaccaccatatgcttttgcttaaacaaaaaggcaagtgtgtgtgtttgcgaagagaattaaaggcaagtcggcacaaaagctaccccaatggtggcgaggatgacgaactggtcattattgtcggtcctcctctgcgtcacctcctgcgtcgtcaagatgacgc

SEQ ID NO: 9853 - DNA, 4539 bp, Zea Mays
atggaccttgacgcggctgcagaggaggaggagcgccggcttgaggactacaatgaggcgcaggatgctaggtacttcctggggtttggtgacacccatggagatcctattgaggttgatactgttgccggctctcaaattggcactggaaccgaatccactagcccgtcagaagcagtccctaatcctgatcaggctgctaatgctagtggtagcaacatgaagaaaaggtccaagtgctgggatgactttgatgaattgactaagattgtgaatggtaagaaagtcaggagccacgttgtgcctgccgccagccccgacacctccagatgttgcctccatccatcctccgagcttaccgcctcgcccccgcccccaaaccctagaccccctacaatcacgaggaaggggagaacggccgaggaggatgctccgcaaggaaggggaggacggtcgaggatgacgttgttgctcgtcgctgagcatcttcgcgccctcagtgctgccaaggagccctctctatccctgatggcgtcccaaccgttggtaatatctccgcctcggccatgggcattgcaaccctcgattcaatctctcctcttcgatctcaggccgatcgtcggcgatgatgacccagcctccctctccacgtccctgctccccaactcatacaggtgttgtggcgccctcctctccactcccctatctattttgttgtttgatgtctactttcttcgccgctctggttgcggcacgattggtgcaccacctcctcgtgcgaggtgagggcaagcctgcacatgctcaactccatcgacaacctcaccttcatgccactctgggagcatgccgagtggcgatgtgacgacttggtggtctatcgtcgttgcccttcgccaggtgtcgatctcttcgtcagtgaagagcatccaccagttccattcattcatttattatatggtgaatggccacaaaaccatattctatgatggcacaaggtcccaccaagatgcgtagccatgtgcaaaccatatttgtcatgtagccacaagggcccgtcgatctgttttggtttacaatgtggatgaaaacaacatggagctctggcttatgggggcttatcgatgccagcgaagcccgtgggagcaattgaagccattggacattggttgcacaacttgataaagtgaagaatctgcttgcgtctgagtttgggagtctataaacatggggaagagaaaatattggtgcctttgcaattggtgaccctgctgcaactatttttttctaggaattcacaagagcaatatggtacaccaatgccacacattggacaaacaacagttgaagttgatcttttgaattatggtgtgatagaaggtgatgaatcatgtaaacatttctctgaactaaaagtcttacatccatggatgatcaaagatggcatgaatcttacaaaggaacagagattagagaaaattgagtcacaaaaacttgaaaaatatgaagccaaaggtgacaagagacatgacttgaaagatgatcaaagtgtacaggaagaatacataaatgcatattatgaggccttgaggaaaagttggaagaggaagaagcaaaaagcagaatgcagcatgaaggcaagatttttgtccctgatgctcaaagggaacgccaagttgacaataaatacaagcaggatgatgatgaagaaggcattgaataattatacttcacattatcatgtctttacttttggcagtgttgttagtaatgaagttgcttctcatgcaacacttcttattagcaagcagtatgtattggcaatgggttttgcattgctggaacacctgacagaaatttttagtttcccagaagtaaaggcgttctggtttgttagtaatattggccttctaatggtttatgctctatccagagtattccagctttcttatatggacagtaggaacccaaggtttgctgtgtaatccattatcaacagttgcactcacattagccttgtggcgattcttttcaaaacaggatgatttaaacccatatgttgttccaatggctatgggcatttaacgtcaactagagagtcccttggatatgactacaagtactatcatcaggaggattgttgctaaccatgaagcttacctgtgtattgtcagctttcaaactcgatgaaccaactgagaaagtactgcttatgaagctagagaagcatggaaggagtgttgctgaatcaaaggcaaaagaagaagctggaagagttttgatttgcatgaaggatagctgttgaagacgcttctaaagcactagagtattgtagcactgatggaaggccttcgatgaaatgtttccctgaaagttgcatactacatcgctgaagcactacaatattgtaacactgagggaaggcctttgtatcatgacctaaattcatatagggccctctttgatgaggtaattgttgctttggttttcacttttccttacaaccttcgaattatgtggctatgtctgaaaacttaatacttctacagttctcgggtcttcataccattccaatttgtgttagctaataaacaagtcaggctatgtctgaaaccagtatctaatagttctccgcccaacaaggaactgtgcaacataaaaacaaatcttaaacaagttacatgttctgaattttagaaactcaaactccactctaagggctaaccggctaaccgaacatgttatagaacaaactcagtcctaaattgtagacatattggaattctgcgtatgttttttccaacctatcttcaaactatacaagaattattatctaatataaacaatacattgacaataatgtacacaaaaatccatgtatttaatgtgtggacatggtatcatcatgtctgactaacccttttttactttcattgaatgaagttcgtacatgtatttgaggtattttttattttcttcctactataagccttgcttagatactgatctaagatcatctccaagggacagacaaaaaatcctagaggttctcacataagtacggtttagagaagggataaaccgaggaaagcctcccccacaaatacagaaaggctgcctcgaacctatgatttggtgactcagtgaaacaaacaactctcactactgcactaggcctgccattgtttacgagcatccccaagggccttacttaaattcactctctaaattttaatttggtgagccattttaataaaaatatgtttgataggttttttatcttctaacaatttttatgtatcttgtacgcactctagagaaccaacccactcactgctctttatttactgcatgctatttaggtctgctaagcaaaaaatgatattctttctcaatcttttgtcatgtttagataaatttggtggttttaggataaagtttgtgaagggcttcactttttttttctataattagaatttaactcaaaagttttcccttgaaattcaagttgattttgagaagtatgaagggatgattaaggtcatggagaaggtggtaatacagttaattctatggagctcactggaggagcactaccttttgccagttgcttgcaagaatgtaattggaatccgatgtgcttcatggcgcatcgtatcctccattgagtatagggaataaggttgtgtcaacatggaccgtgccactctcatcgagggctaccataacaagattgaagttgaactcaacaagatctgcgttggaatcctcaagctctttgcttcccaccttcccccctcattaatagttccaaagtccaaggtcttctacctcaagatgaagggtgattactacaggatattgctttggaggagttggcccccttatcctattaggctttggctgatgcttaacctctcaactctcctgatcttgctcgtggtctccccaaacagattgacacggtgggaggaaaaagacaatggtcagcaacttactcggagcagaaattttttaattgtggtacccgtggtgctgtaagtttcatctcatcctcttgtagttcacacttgaacaaagtactctttagattctatacaggcagcgattgcttgtgcaattatattccacttcattcctaattaacaatttgggtcttatgattgacgactttgactttatcaccataaataaacctgacacacgaattatatctggattctggaacaggttcaataagagagcatcatagtgttgcataaataagtgtgcttatgattcatatttgctcattgcaaattggagttatttgtgttgtttctttgtatactcaacaaagagatgttaaccacttgtgtttatctcattgccacactcagttatgtcacgtaacttcattttcatgttttattttgttccagcaatgtagtttatctttgttttaatagctctttctttgtaaaacaacattttgttgtggttattatgcggataagagaacctaaaactacaacactgatgtttgtgtgacataagaga

SEQ ID NO: 9854 - DNA, 4924 bp, Zea Mays
atggaccttgacgcggctgcagaggaggaggagcgccggcttgaggactacaatgaggcgcaggatgctaggtacttcctggggtttggtgacacccatggagatcctattgaggttgatactgttgccggctctcaaattggcactggaaccgaatccactagcccgtcagaagcagtccctaatcctgatcaggctgctaatgctagtggtagcaacatgaagaaaaggtccaagtgctgggatgactttgatgaattgactaagattgtgaatggtaagaaagtcaggagccacgttgtgcctgccgccagccccgacacctccagatgttgcctccatccatcctccgagcttaccgcctcgcccccgcccccaaaccctagaccccctacaatcacgaggaaggggagaacggccgaggaggatgctccgcaaggaaggggaggacggtcgaggatgacgttgttgctcgtcgctgagcatcttcgcgccctcagtgctgccaaggagccctctctatccctgatggcgtcccaaccgttggtaatatctccgcctcggccatgggcattgcaaccctcgattcaatctctcctcttcgatctcaggccgatcgtcggcgatgatgacccagcctccctctccacgtccctgctccccaactcatacaggtgttgtggcgccctcctctccactcccctatctattttgttgtttgatgtctactttcttcgccgctctggttgcggcacgattggtgcaccacctcctcgtgcgaggtgagggcaagcctgcacatgctcaactccatcgacaacctcaccttcatgccactctgggagcatgccgagtggcgatgtgacgacttggtggtctatcgtcgttgcccttcgccaggtgtcgatctcttcgtcagtgaagagcatccaccaggtattcccacccctcctctgacctatccgaacaacactgctcatttacacgttagagcagcttgtctaacgggcattctgcttcccagttccattcattcatttattatatggtgaatggccacaaaaccatattctatgatggcacaaggtcccaccaagatgcgtagccatgtgcaaaccatatttgtcatgtagccacaagggcccgtcgatctgttttggtttacaatgtggatgaaaacaacatggagctctggcttatgggggcttatcgatgccagcgaagcccgagcaattgaagccattggacattggttgcacaacttgataaagtgaagaatctgcttgcgtctgagtttgggagtctataaacatggggaagagaaaatattggtgcctttgcaattggtgaccctgctgcaactatttttttctaggaattcacaagagcaatatggtacaccaatgccacacattggacaaacaacagttgaagttgatcttttgaattatggtgtgatagaaggtgatgaatcatgtaaacatttctctgaactaaaagtcttacatccatggatgatcaaagatggcatgaatcttacaaaggaacagagattagagaaaattgagtcacaaaaacttgaaaaatatgaagccaaaggtgacaagagacatgacttgaaagatgatcaaagtgtacaggaagaatacataaatgcatattatgaggccttgaggaaaagttggaagaggaagaagcaaaaagcagaatgcagcatgaaggcaagatttttgtccctgatgctcaaagggaacgccaagttgacaataaatacaagcaggatgatgatgaagaaggcattgaataattatacttcacattatcatgtctttacttttggcagtgttgttagtaatgaagttgcttctcatgcaacacttcttattagcaagcagtatgtattggcaatgggttttgcattgctggaacacctgacagaaatttttagtttcccagaagtaaaggcgttctggtttgttagtaatattggccttctaatggtttatgctctatccagagtattccagctttcttatatggacagtaggaacccaaggtttgctgtgtaatccattatcaacagttgcactcacattagccttgtggcgattcttttcaaaacaggatgatttaaacccatatgttgttccaatggctatgggcatttaacgtcaactagagagtcccttggatatgactacaagtactatcatcaggaggattgttgctaaccatgaagcttacctgtgtattgtcagctttcaaactcgatgaaccaactgagaaagtactgcttatgaagctagagaagcatggaaggagtgttgctgaatcaaaggcaaaagaagaagctggaagagttttgatttgcatgaaggatagctgttgaagacgcttctaaagcactagagtattgtagcactgatggaaggccttcgatgaaatgtttccctgaaagttgcatactacatcgctgaagcactacaatattgtaacactgagggaaggcctttgtatcatgacctaaattcatatagggccctctttgatgaggtaattgttgctttggttttcacttttccttacaaccttcgaattatgtggctatgtctgaaaacttaatacttctacagttctcgggtcttcataccattccaatttgtgttagctaataaacaagtcaggctatgtctgaaaccagtatctaatagttctccgcccaacaaggaactgtgcaacataaaaacaaatcttaaacaagttacatgttctgaattttagaaactcaaactccactctaagggctaaccggctaaccgaacatgttatagaacaaactcagtcctaaattgtagacatattggaattctgcgtatgttttttccaacctatcttcaaactatacaagaattattatctaatataaacaatacattgacaataatgtacacaaaaatccatgtatttaatgtgtggacatggtatcatcatgtctgactaacccttttttactttcattgaatgaagttcgtacatgtatttgaggtattttttattttcttcctactataagccttgcttagatactgatctaagatcatctccaagggacagacaaaaaatcctagaggttctcacataagtacggtttagagaagggataaaccgaggaaagcctcccccacaaatacagaaaggctgcctcgaacctatgatttggtgactcagtgaaacaaacaactctcactactgcactaggcctgccattgtttacgagcatccccaagggccttacttaaattcactctctaaattttaatttggtgagccattttaataaaaatatgtttgataggttttttatcttctaacaatttttatgtatcttgtacgcactctagagaaccaacccactcactgctctttatttactgcatgctatttaggtctgctaagcaaaaaatgatattctttctcaatcttttgtcatgtttagataaatttggtggttttaggataaagtttgtgaagggcttcactttttttttctataattagaatttaactcaaaagttttcccttgaaattcaagttgattttgagaagtatgaagggatgattaaggtcatggagaaggtggtaatacagttaattctatggagctcactggaggagcactaccttttgccagttgcttgcaagaatgtaattggaatccgatgtgcttcatggcgcatcgtatcctccattgagtatagggaataaggttgtgtcaacatggaccgtgccactctcatcgagggctaccataacaagattgaagttgaactcaacaagatctgcgttggaatcctcaagctctttgcttcccaccttcccccctcattaatagttccaaagtccaaggtcttctacctcaagatgaagggtgattactacaggatattgctttggaggagttggcccccttatcctattaggctttggctgatgcttaacctctcaactctcctgatcttgctcgtggtctccccaaacaggcaaagccaacgaatgaaagggactcactcgcagcaacaaccaaaaagctgatcacgcattctccttttcacatttgttgcatttaattaattcatccaatagcataaattggcactccttttgtgttattgctctttggttggtcttattgttgttgttgtactgcttgccatgtgtattttatcataagtgttgttttggctaatccctaacgatgcaatacatttgagcaacaattcaattgttttgttttttgaacagttattctaaatacccaatgttcacagcatatttcacttcccatggttcactgttttgttgtattagtagctctaattctaaggtgtcaatgaatcttaggcgaaagaattgttcgtagtagtggtccagaacagacttcatactgtgatttacagacttatgttttactagctgagtactcgtgcgttgcaacgggaatatataataacagtacactacgataacttatatacataatatgtgttataccgttatgagaaaatgttttataatcaatttgtgattctggccatacataaattttgttattttaatctatctgtttcaccactacattgcaaccattagtatcatgcagacttcgatatatgtcacgatttgcatggtctcatcattggagagcacgttccacacatgcaggaagaaattcccccgtacatcgttagtcattagacacgtaccaccatatgcttttgcttaaacaaaaaggcaagtgtgtgtgtttgcgaagagaattaaaggcaagtcggcacaaaagctaccccaatggtggcgaggatgacgaactggtcattattgtcggtcctcctctgcgtcacctcctgcgtcgtcaagatgacgc

SEQ ID NO: 9855 - DNA, 576 bp, Zea Mays
tccctacaggtttcgagggcttattctctgcagcacctcaatatcggtggaacgttcatcacagatgaatccctctacgcagtcgcaaacagctgcgcaaatcttaagagcatcatcctgtggagctgccgccacgtgacggagggcgggctggtggcgctggtgaacaagtgccggcgagcttggtgggcctgctctccatcagccccgccctggagatcaggtccaccgcacgcatcctcaacctcaacctcaacgccggggtgcaggtctcctgatctgtcacaaggcccagaagacagtgccactggagatcgacgaccaggctgcagccaaagcgcagagaagcaaacgcaccaagaagcccaatgccaagtacgttggaggcccatgggtgaactaggtctattactgtagcacataaatacttgtctgtaataagtgaacggcagactggaacatacctgttggcggcggctggcttgttgcctgtccggatcctcatacgcctgtgttgaaccctgatcggagtaaaatcctaccaccaccaattgatccaaaaacagattccagtct

SEQ ID NO: 9856 - DNA, 997 bp, Zea Mays
cctttttatggtgtgatctgaaccaaccaagtgtagtagctgctggtggaggccaaggaggagcggctgcggctgagcgcggaggaggtggcggtggtggagcagctgcggtccaacgcggagtactacgtgtgctcgtgcatgaaccggaaccccggcggcgcgaagcacaacgccggacgcaccccggcggggctgctcttcatccggccatggaacaacctgcagtacgtctccggcgccgccttcctcctcaccgtctactcggacgtcctcgcctcgctgggccagcccctacgctgcggctccggcgacgacggtggcgaacccgccgccggcgacgcgggcgacgtgctggctttcgccaagtcccaggccgactacatcctgggcacgaacccgatgcgcaccagctacctggtcggatacggcgcggcgtacccgcggcgggtgcaccaccgcgcggcgtcgagcgcgtcgtaccggcacgaccgggacttcatcggctgcctgcaggggttcgactcgtggtacagcgcgcggcaggagaacccgcacgacctcgtcggcgccgtcgtcggcgggcccaacggcgaggacgtcttcaacgaccaccgcggcgcgtacatgcagactgaggcctgcacgtacaacacggcgcccatggtcggggtcttctccaggctcatgcagctggaggggcagtcgccacgcccggcgccggcgccggcggaggatctttgataggagaggtcgttttccttgaaaggttcccagcgacaagtggtggtgcgaaataaacttttcaaaaaggattaaaaaaagtgatattgatcgtttaggctggatgtatacatgattctttttgttgattcctagatactaccatatttgtttcatgtctttgcacataacaaaagaatcgaaaagaaggatgtaaatttcaaaaatgaactcgatctgttatttggctcaacaaatatgtttttttgacaaa

SEQ ID NO: 9857 - DNA, 2028 bp, Zea Mays
cgcctctactgctgacgagagggaagcgagcgaatctggtgatccgtgataacgtagttctcaacaaaacgaaccggtttcatcgaccgctctcgcttgcaaagaaaaagaaataaagaaattggtccagtagccctggaagaattgttctcctggattgaattcacaaaacaacttcccagctgctcaggtctccatcggcctcgagccctttgccggcgacgagcactcacaacaccagggtgtaacaatgtcttcttcaatggaatcgtcataccttcctgctacaactgagtcattagcccaagctcaagaggctaaggatgcttcagagtccatttcaatcctttaccgtgtcattcaggacccatcttcttctgctgatgcactgagaacaaaagaagttgcaattacaaatcttacaaactacctcactaaagaaaacagagctgaggagctgcgtaatcttttgacccagctcagaccattttttgcagttattcctaaggcaaagactgcaaaaattgtccgtggaataattgatgctgtcgccaagatacctggaacatcagatcttcagatttcactctgcaaggaaatggtagaatggacccgtgcagagaagcgtactttcctccggcaacgtgtggaggcaaggttggcagctctcctgttagagaatcaggagtatactgaagcccttaccctgcttactagtcttatcaaggaagtcaggagacttgatgacaagttacttcttgtggacattgaccttttggaaagcaaacttcacttctccctgagaaatctgccaaaggccaaagcctccttaactgctgctagaacagcagcaaatgccatttatgttccacctgctcagcaaggcactattgatctccagagtggaatcctccatgctgaagaaaaggattacaagactgcttacagctacttctttgaagcatttgaagctttcagtgcactggaggacccgaaggccatctttagcctgaagtacatgctcttgtgtaagataatggttaaccaagctgacgatgttgcaggaataatctcgtctaaggctggcctaaaatatctgggtcctgatgttgatgctatgaaggctgttgctgatgcatactctaaaagatctctcaagtattttgaaactgcccttcgtgattataagtcccagctggaggaggaccctattgtccacaggcatctttcttctctgtatgatacactgctggagcagaatctctgcaggttgattgagccctactcaagggtggagattgcacatatagcggagatgattgaattgccgattgaccatgttgagaagaagctgtcgcagatgatcgttgacaagaaatttgctgggacactagatcaaggtgctggctgcctcattatctttgaggattctaagaccgaggaaatcttccctgccactctcgaaaccatttcgaatgtcgggaaggttgtggacagcctttatgtgaggtcggccaagaagaaatttgctgggacactagatcaaggtgctggctgcctcattatctttgaggattctaagaccgaggaaatcttccctgccactctcgaaaccatttcgaatgtcgggaaggttgtggacagcctttatgtgaggtcggccaagatcatggcttgaaagcagctagtcttacctgtttgctctgatttcatttccagtctgtcgatgtcctcagacatttattccttcaatattgacagtttattgtgaccgctacaggttcatgtgaccaaaggctagctatttttacgactgaatgagttatgcatgtattggtcttttaatatcagcgtgcagagtcggacggatgttattgtgtgttaattaatctaccatgttatcgaaatgcatgtctttagctccactgcggcttctgtctacagatggacaattagcacttatacgatgtgctgaattaggcacaacacaaaaaagcaccaggctaaccgtcatctcggcccgagcac

SEQ ID NO: 9858 - DNA, 958 bp, Zea Mays
cttttctccagctcatcctccctgcctccgatctcgggagcaactgaagcatgtcttggcggtgggctttcgcgcgccatgtcgcccaggcgcagaggctcctgcccacctcgtcggccggcggtggcactggcctcctgggtcggcaccaccaccacatgcccctcgcctcccagattcggagcaaggtccccaaactggcatcaacagctgagtactttttcaaggtgggagtagagggaaaaagattccaacctacggttttgttgctcatggcatcagctgtgaaattctctttgtcagaatcaacagaaggcaaagttctcagtatattggcagataaactccgctcacggcagcagaacattgccgagataactgaaatgattcatgttgcaagccttatgcatgatgatgttcttgacaatgccgatactaggtgtggcgtcagatcattgaatctcatcaagggaaacaagctttctgtgctggctggtgacttcctgctgtctagagcatgtgtggcccttgcagcacttgggaacacagaggtggcttctctaatggcaactactgtagaacatctagttactggtgaaactatgcagatctctacaagcacagagcaacaacgaagcatggagtactacctgcagaagacatactacaaaacgtcatcattgatatcaaatagttgcaaggcggttgctattcttgcaggacacacagctgaggtctcggtgcttgcatacgaatatggtcgaaacctgggtctagccttccagttaattgatgatgtacttaatttcacaggcacctctgcatcccttgggaacggttcattgtctcatattcgccatggaatcattactgccccaatgctatatgcgatggaggaattcccgcaactactagaagttgttgaccgagggtttggtaatcctgcaaacgttgaaat

SEQ ID NO: 9859 - DNA, 1060 bp, Zea Mays
caaaactagtaccaaaagggaaaaacgatggagtcctccgaggcgggctggcactcgtttgatccgtcagtcgccgtggaggactccgaggcaatggcccagctgctcggggtgcagtactctggcaacgagcagaagcagccaacaacgccgacggccatggccatgtgctggcctggccaagaagctgacgaccagcactacagctcggccgcggcgtacccgtactgcacgcagatgcagcaacccgacccgggtgcaagtgcaagctgctacgactatgactactactatggcagcaacacgttcacgatcaccggcgacttcttcgtgccggaggagcaggtggcggaccccagcttcatgctcgatctgaacctcgacttcgagtaccaccaggaaggcgagggcatcggccacggcggcggcggtaacggtgaaacggcgccggtgtgcaagaggaggcagctggaggatcagaagaagggcgagaacaccacgtgcaccgtcgttccaaagaagaaatcgcgatccaccgcagtaccggcgcagaagaagggcaagaaggcgcacaaaggcgcgtgcagccgaggcaaccaggaggagagcaacggcggcgacgacggcaataataatgttgcacagccgcagcagtgctccgacaactactacctgtctgacgacgactcgctggagatgaccgccgcgtgcagcaacgtgagctcggcgtccaagaagtcgtcgtcgtcggcagcaggtgggaaggccagggctgggcgtggggctgccactgatccgcaaagcctctacgccaggaaaaggagagagcggatcaatgagcgtctgaaagtactgcagactcttgttcccaatggaaccaaggtagatatcagcacgatgcttgaagaggcagctcaatacgtcaagttcttgcagctccagatcaagcttttgagctcggatgatatgtggatgttcgctccgatcgcctacaacggggtcaacgttggcctcgacctcaagatctctccaccgcaacaatgatctacgccgatgtgaa

SEQ ID NO: 9860 - DNA, 911 bp, Zea Mays
gtccgattgtgcgctgtcgcagcctctgccctctcccagcccgctcctccatctccggtgagacgcgaattgaatcgcatcgaatccatgggcagctcctcgaataccaacacgagcggcggggccagcgacaaggaggagaagaagaaggaggacaagatcaaaggcaaggactcgtcggggccatccttcaaggagaacgaaagggtcctcgcctaccacggccccctcctctacgaggccaaggttcaaaggatcgaaaaccatgaagatgaatggcgctactttgtccattatctcggttggaataagaactgggatgaatgggttgcaaatgaccgcttgttggaattgacggaggaaaacgtgcgcaaacaacaagagcttgataagaatcaggtagttgacaaaacaatgaagtctggacggtcaacacagcataaaccaaaagtctccaatgcggatgcaaaagctgataaagatgacactaagagtctcatttcagtgaaggggaagaaacgtaaaagtcagcttgggactgagtttcctttgccactgaagaagcaacttgtggatgattgggagtttgttacgcagatgggtaagcttgtgaagctaccacgatcacctactgttgatgatattctaaagaagtacttggaacaccgggcaaagaaggatggcaagataaatgactcctatgctgagattctgaaaggattacgctgctactttgataaagcattgcctgcaatgcttttatataagaaagagcgagatcagtatgctgaagaagttaaaggtgatgtctcaccatcaactgtatatggagctgagcatctattgcgcctttttgacttactatggtgcgaggtagcccctcctgcacggcgccacggccatcatcttgc

SEQ ID NO: 9861 - DNA, 1364 bp, Zea Mays
gtccgattgtgcgctgtcgcagcctctgccctctcccagcccgctcctccatctccggtgagacgcgaattgaatcgcatcgaatccatgggcagctcctcgaataccaacacgagcggcggggccagcgacaaggaggagaagaagaaggaggacaagatcaaaggcaaggactcgtcggggccatccttcaaggagaacgaaagggtcctcgcctaccacggccccctcctctacgaggccaaggttcaaaggatcgaaaaccatgaagatgaatggcgctactttgtccattatctcggttggaataagaactgggatgaatgggttgcaaatgaccgcttgttggaattgacggaggaaaacgtgcgcaaacaacaagagcttgataagaatcaggtagttgacaaaacaatgaagtctggacggtcaacacagcataaaccaaaagtctccaatgcggatgcaaaagctgataaagatgacactaagagtctcatttcagtgaaggggaagaaacgtaaaagtcagcttgggactgagattcaggacaaggaaaaaagatcatcacatagtctactagtgttgcagtttcctttgccactgaagaagcaacttgtggatgattgggagtttgttacgcagatggcttgtgaagctaccacgatcacctactgttgatgatattctaaagaagtacttggaacaccgggcaaagaaggatggcaagataaatgactcctatgctgagattctgaaaggattacgctgctactttgataaagcattgcctgcaatgcttttatataagaaagagcgagatcagtatgctgaagaagttaaaggtgatgtctcaccatcaactgtatatggagctgagcatctattgcgcctttttgtttgcagtaaaattgccagagctacttgcttctgtcaatatggaggaagatgcgttgaacaagctacagctgaaactgctggacgttctcaaaagaatcagatcaccttctttacctctgcgtacgatggttcttgtaaaggtgcagatgaggataaaaccaaatgattgcatgtgaacgttttatatcatgtaacatctttcgatggacttgtctggcactattgttgatatgaatgtcgcttaggacaacaatcggtttatgtaggatagatgctgcagattcctgaaagacggtacttgaactgcccggagcatgttgtattttcttaagatgctggaactaagacggcttagttgaattttcactatcaagtgagtctcggtcttgccccaaaaagaatgttttgtacctcctctgtcccaatttatacgacaatttataattcgtatgacttttttggac

SEQ ID NO: 9862 - DNA, 1460 bp, Zea Mays
ggaagacagcccgtcgttctcgcgtggcggcgtcactagctaaccctagatcaagacgagtgcatccaccgctctccacgccgccgccgatctcgtcgagaggcatccacgactctccacgccgccgccgatctcgttcgtccagcgtcaagaatgtttggaagaggatctcctaggatgaacctgatccaagctgcagctatgcaaagagtatcccctagatctactactaacaagcgcaagaagagaacatcaccaaaagttggtcgtcttagagcaaactggaatagtggactagaaaagggtttagttgaaattcttcaagaccacaacaatgactgttataagggccaaaatgggtggtcatcggaagcatggaatagaattgtcaagttattccatgagaaattcccttatgtcacatttacaaaatgccaaatccaagataaagagaaagagttaaagagagactacaaggctcttaaagaggcaagacaacaaagtggggtatcatgggatgagcggttgtgtagaatagaggcagaagaacccatttggaataacctcaccattagtaacgagagacttaagaagtttcggactaaatctttcccactatttgaggctttaggagagctacatgatgggaatattgctgagggaaccatgaattttacttctattgagccttatcgacctccagtcacacaaccttgtcaagagtattagatccaatagcccctacatcagtgagcaaaagggcaaaaaatgttggtgctggtagttcaaggacaagaattgacaagcgtggacaagatgggaaggtggttgagatgatggaaaggtttctagagatgaaagaaaaacaagatgaggtggagaaaagggcgacaactaatgcaaatgaggatgatttccctattacaacatgcattgctattgtggatggaatggaagagctttctgatgatgagaaggttgatgcttatgatgtgtttaaggatgcccaaaacagggccattttcatgattgccaaagatgctacacgcataaaatggttgaggaagaagattgctagaacatgatatatgatactgcttatgatgttgtttgaaacttgagggatcaaagaaaatgcaacgaagaatttggaagaccttgaaattattactagcaattgtttgaaagcaatctagtaagcgaactttcagttggaacctgtcatggcacttgtgaaatcttcattttttataagcacctctgaatgtgatccttcttgtcattaaatcaagactacaaagatggatgtttatttaatttgccataagcacctctgattgtaatacttcttgttattaaatcaggactagaacgatgaatgtttttttctaagcacttttgaatgctatgttaatttgcacattcgatgtgccatggtcagtatttgtgctaatttttca

SEQ ID NO: 9863 - DNA, 1164 bp, Zea Mays
aaagcctgtctagaaccaaacacccctctccaccgactgcaaataatccgactcccactgctgggtgccctgtcccctacctcgggttccgcgcagaggaaggtggagttgctgagtaggctccgatcaccgtatttattgggcctgattggccattgttcggaaggtgaacactgtctacttgtatatgagttcatggccaatgggggtctccaggagcatctctatccaaacagaggttcatgtggtggaatctcaaaattggactgggacacaagaatgagaattgcacttgaagcagccaaaggtttggaatatcttcatgaacatgttaatccacctgttatacatagagacttcaagagtagcaatattctcctggacaaggacttccatgcaagaatttcagactttggtctagccaaacttggatctgatagagctggtggtcatgtctcaactcgagttttgggcacacaaggctatgttgcaccagagtatgcattggctgggcatttgactaccaaatcagatgtgtacagttatggtgttgtgcttttggaattgcttactggcagagtaccagttgatatgaagaggtctcctggagaaggtgttttagttaactgggcattgcctatgctcactgaccgagataaagttgtgcggatcttggatccagcatcggaaggtcaatattccttgaaagatgctgtccaagtggctgctattgctgccatgtgtgttcaaccagaggctgactataggccattaatggctgatgttgtccaatcgctggttccacttgtcaagaaccgttataatcagaaatcttgcaatcccaatgtgcaaccatcgaagccacttgactaggagaaaagctagtgtttgatctgcagtttgtgctcgtccttctggaacccttctcgagttctcgtctataacgaactactgttgagacagattcacacgcttcctaacaatgatttcgtctgctggtgccctcctgattttgttgttttttgtaggggtgtgttgtgtgcaggtaggttgcaaatttaaaggggatatagttgaacggtcctgagaacttatttgagtctgaaggcaagtttctgtcacctaaaattaggtgcatgttgatggtgggctgttgggattaat

SEQ ID NO: 9864 - DNA, 1251 bp, Zea Mays
gttcgctcctcgcaatgggagcggagcggagcggacccaaaaactcgaaaagtcgaaatccaaacccgctgatcagcttatccccttcgcaggagccaggacggacgaactgcgagtacacgagagaggacagaggagaggagacacaggcgacacgcgccatttgggagagggaaaggaatggagctgacgtcttcttcccgctccgtgctctcctcctgcaaccggccggtcgctcgagctctttgcaggacggcgtacccgggtgcaaggaggaaggagaagggaatagtatgtatcttgagcgaggagaaagaagtggtacaaaggacgatccggaggcgagctgccttttctttgttgctggcttcgccggtgctatcagtggcgttctcggcctatggaaagagtaaaaccatgaacccttacgatgaaaggcgtctgcttcagcagaataagaagattcaggaagccaaccgtgcccctgaggatttcccaaacttcatcagagaaggcttccaggtcaaagtagtgacaccggacaactatattacacgggcctctggactaatgtatgaggacattaaagtcggtacaggcgactctccaaaggatgattatattccattatgtgggctacaatgaagcaggacgaagaatagatagcacctatattcagggttcccctgcaaaaattcggttagggaacggaacactagttccaggttttgaagaaggcatacgggacatgaaaccaggtggtaagagaagaattataatacctccagagcttggtcctccttgcgaagcagttcgaagtgttcgatgtggagctactggcggtgcaggactgccagcggaggacgatagcattttactctgatgtcgtgtgcagctgagcttcggtttgtctagtcttccgcctatggcacatcgcagcagcatcctgcacttttggctgctggtctgagttgccgtccaattgtgtatatatatagccagctgttgttactgcggctactgatgatgggcaatggtagtgtgttattagttcttcatttttgtcttgaatctcctgatggcgggatatgcgcatttggtgtgtctgtttagaagttggcatgtgtaccttgatgttgaggttactcctggtcctacctctaccaaggactccacaccatctgactctgcttcttgttcagtactaattcttgcgagtttggtggcggtttttgtaaactattttcaaat

SEQ ID NO: 9865 - DNA, 1134 bp, Zea Mays
cgggtgagcttcacgggttggatttgaattggttacttcatcgatgtctcaagggaacacaacaaaggcatctgagtgctctactcctgcaattctgaatatgtccgatgataatggtccgtctgagatgggtgttggtcagccaatggttgttggcaggaagctgcttccaccaattgtaccaggtggtgaaccaatttttgtgtgtgaaaagcagtatgctgctatccttcgtctgcgtgaacgccggcttcgtgccaaagaagcaagggagcgaaggttgctccaagccaagaagaaccgtccaagaggtcctaatgggcgttttgtcatgatcaaggacaatcaggaagagcccaatggaggaagcatggtggaatgcaaccctgccccaggagacagtcatcagcacttaatcacaaccagtggataccagcaagtgaccactggtggcagtgaggcgcaaagcagcatcccattaggtttctattggtatgttttcacaaccagtgaaggtgggcaaagcagcacccctgctggaatgggtttctactatcccttcaacacaaccaatggcggggaaaatgtcggtggcgtcgcctctggcagtgaggtgccaagcagcaatgccccaagcggcttcttttggcccctcatcatggccagcagcgaggaaaacaatggtgaggtcacctacggcagcatggtaccgatcagcaaccctgcaggatacttctgttggcccgtggctgtgaccaatgaacacggggaagacactggtgagtctgccgatgggggcgaggcgccaataagcaaccctgcaggagacttctgcagttggcctgttgtcgcaaccaacgacgatgaggaaaatgtcggcgaggtcgcctacaacagcgtcctgaacctcgaatcacctgaccacaccgacctcctcaggatcatgatgggcaacaggtacagcactgatgaagcctcggagcagttccagaacgtggcccgcctccaggctcctggcttcaccgccctcctaaccgtcatgaacaacgcagggtacggtccggctgcggactgtggcccccacgatgcgcacaaagtgatgacaaggttagaagggtggtagaggtagaccag

SEQ ID NO: 9866 - DNA, 2005 bp, Zea Mays
caagttgcatccgccctgcgccaagaaaagccatcgttcttcccacaaacgcacacatagaagcatcattcccctctcggctagcttcttcctctctctccctcctcctcctcttcctcttcctcctcccttgggaaacctgctgcctttgagctttcttcttcgagagctcccaccagatctcctcctccttaccttctttggcacgttcggcggcgcgcgcggagaaagatagatcccgccatcgtcgtcgtcggtccttgcttccgatcggagggccacaaccacaacctctcgctccatagcgtgcaagcgcgagccagggtcaagaagagagctagctagctataggccggagatcgatggggaggggaaagatcgtgatccgcaggatcgataactccacgagccggcaggtgaccttctccaagcgccggaacgggatcttcaagaaggccaaggagctcgccatcctctgcgatgcggaggtcggcctcgtcatcttctccagcaccggccgcctctacgagtactctagcaccagcatgaaatcagttatagatcggtacggcaaggccaaggaagagcagcaagtcgtcgcaaatcccaactcggagcttaagttttggcaaagggaggcagcaagcttgagacaacaactgcacaacttgcaagaaaattatcggcagttgacgggagatgatctttctgggctgaatgtcaaagaactgcagtccctggagaatcaattggaaacaagcctgcgtggtgtccgcgcaaagaaggaccatctcttgatagatgagattcacgatttgaatcgaaaggcaagtttatttcaccaagaaaatacagacttgtacaataagatcaacctgattcgccaagaaaatgatgagttacataaaaagatatatgagactgaaggaccaagtggagttaatcgggagtcaccgactccattcaactttgcagtagtagaaaccagagatgttcctgtgcaacttgaactcagcacactgccacagcaaaataacattgagccatctactgctcctaagctaggattgcaattaattccatgaagaagagtaaaactgccgtcttatgatgctgaaggaaactatttattgtgaagagatgatactcagagaaagacatatttgtggcagggagatttgagatatgaacttataaatgtaatgcaaataattttcagaccggaatggggtcgtggaattcagaggatgattgctttctagttgcatttgatgtttgatgagacttttctcatgtgaaacgtttattaaaacttcaaaatggtgcagatgttgctactacacttgttaggcttgtataaatatctgaccatgtgtactagcattacgaaaacagaaaagaagacagacagccctgtcgaacatcttgacgtgtttctaaaaggtttgataggggacaatgatgcgatctaggagtacaaacagagtctagtttccactcagttgagttttatattgctctcaagcgttatcaagggtttagtaggatacagatataatatgaagatgcagttagatgtattggtcatttgttgggccatatgggaaagccaaagcacagcctgattcgacaggaaaaataatattatacccatgtaaaatactctcaagcctgtgtttatttgaagtattaggcaggtttatacaaatcagggctaaaggaagctaccgtcgaaagggctgggcgtcattccacaggcagccatcaggatcgtgacattgcaggtgcaggtgcatgagacattgaatctgatcaagtgctaggaagcaagctactgtgttcaggtccagcacggaagtggaatacaaagttctaaccaatgccatcgccaagatcatgtgggtacagaaattgtttactgagttgggcatacaacatccacagatggctcatccagtaagcgataacctgggggctaagtatttgttgtcaaatcctatcttcc

SEQ ID NO: 9867 - DNA, 1389 bp, Zea Mays
tgagttccgacgttgcccgggaggggtggggaggggagcggcccatttggatttggaagcatcctcggcggcgagcggcggcgtcgcattcactctcatctctctctcacacagattccggctccttttccctctcccccaattcaaaatcaacccccctcgtcgcaaggccacaacaactccactcctccccatccctagctagccactagggtttgccagcctttgcagcgtcgcgctcgcgtctcatgcccttgcccatcgacggtagacgagagcgagcggtctgtgttcgtggagcaggggccggcgccatggagatcaacatcgtggacaagtacgagaagctggagaaggtcggggagggcacctacggcaaggtgtacaaggcgcaggacaaggcgacggggcagctggtggcgctgaagaagacccgcctcgagatggacgaggagggcatcccgcccacggcgctccgcgagatctccctcctcaacctcctctcccactccatctacatcgtccgcctcctcgccgtcgagcaggccgctaagaatggcaagcccgtcctctacctcgtcttcgagttcctcgacaccgatctcaagaagtacctcgacgtctaccgcagggggcccagcgccaggccgctccccgcgacactcatcaagaatttcctgtatcagttatgcaaaggagttgcacactgccatagccatggtgtccttcaccgggatttaaagccacaaaacctgctggtggacaaggagaagggtatactgaagattgctgatctgggactcggtagggctttcactgtgcccatgaaaagctacacccatgagattgtgaccctttggtacagagctcctgaagttttgcttggagcaacacattactcaactggcgttgatatgtggtctgttggatgcatctttgctgaaatggcccgacggcaggctctctttcctggtgactcggagttgcaacagttgcttcacatcttcaggttgctgggaacacctactgaggaacagtggcctggagtgagtgatttaagggactggcatgagtttccacagtggaagccccagggtttggcacgtgtcgtcccaacactggaacctgaaggagttgaccttctatcgttcaagcaagcattatcaaagtcgagcaaccaagctgaaattcataagtagaaaaaaatgatatctagaacatattgggattaggggctctagctgagtagattagatggttgtactaacactccttaggacttgggtcttcttttgacaaaatgttcaaggagtttgaatgatatgtattggacatgacagtcaagtttggagcatgaaagaaaccaacatacacggtgttccctagggt

SEQ ID NO: 9868 - DNA, 1954 bp, Zea Mays
gatccgaagtcgcctcctcgtccttccttcgctagatgttctccttcgccggcggtcttgttgctagaggcgcccccgacctgtgcatccgtttcaacgccaactcctccaccagctaactcattcggagtaggtttagaaattgattgggattcaattcagctagaccctagatgggaggaggaagactacaagaagttgttaacgtggaagtggtgtatgatacactgggcctgacaaatgaggtgatgggtggaaccaattgtgatggttggcaaaacgattatggtgatgcaggggcagctatagaatgcaaggacattgacgatgacattgtaatgtttgatatgaaaaatccagttatgaggcttggtaacatatatatatagtagcatgaaggagtttaggctcgcaatgatccaatatgcaattaacaaggaatttgagctaggcattgaagctactagtactcgaaggtatagaggttattgtaaaggggatgattgtccatggagtattcatgccagaaaagaagtagaagaatcgcctatcatcattgttactgccatgacagatatccacacttgtacatctagtggtaggtgaaggacaaagacacctactagtggttgggttgctgcccaagcaatacctctcttgaagaagaaacctggcatgggagccaaggagttgcaaaatgcactacatgacacttataatgttcagattgcatatctaactctttggagagggagagagaaggctttgtatgagttgtttggtagttaggaggatagtttccaactttgttctcttggaaggaagctgtgttggagaaaagtttaagaaagcttacgagggaagaatagagcaactaggagataagtctttttggccaaaagtggagatggcaaatgaggtgggggcaccactgggtaggagaggtgtgggcagacaaaggaaaaatagaatcaaaggttgcctagaaggcggtaggggcaagaaagcatgtgcaaacgaaactgtaaagcaatggaaggccaaggaagcagcgacattactcaaaaatggtttcctcgcgacgacagatttacacaagaacctagaacaccgcatttcgacaaagttatacaagaccctggtacaccacatgaacagccatcgtcttcgcagccacttccaagggtattgataaaaaaaatcactccaagaaagaggaagtcggttccactaagcatggacgagatgtagtatctgttagttgtatcatccatgtgttgtcagcatgtgactgcagacatgtgccatgtatcagacttattgtatcagactacgttcagcctacttgttagtagctgagttattgtgtttcctactacgttcagactacatctatcagacttattacatctcgttcagacttatgtgtttcctgtttgtgccatgtatcagtggaagtctcaatgccctgggaaaagaagaagagagccacgagaaaggaaggggcaaaactggaagtctcaatgtcgctccctggttaacgcccagcgttctcagttccaaatgtgaaagaacatcagctttcaaccattgatagtcatggatctcctcctcttggtggtggtactatcacaggcagcaaattgggtagataatggtatggtgaagaggataagggatgtttcgttctccaggagagtatctccatagttggaaagccacattatatatgatgcacgtgggtttgggatccacttgtggaattttgttttatcatactttcctgtgggttttggaatccactatgatactagcaacaggctagacacatgaatctagagaatgtttcccacagttcgtattgtgcctaggggaaaactataaatggaaaaggtgcaaaacagaaatttgaaccataagactaatttatataagcctagtagtaaaagactcc

SEQ ID NO: 9869 - DNA, 1572 bp, Zea Mays
cttctctgtttcctccatcttttggcccatctgcaccctctcggtcgccgcgcgctccgccatcgaagcagccaactccgaccgaaccatcaactgttgttgggcgcgttccacttccttgagccgagcgcaaaccgcctccagagtctccatcatccgcccccaactctcctgcgttcctcgatcgtgatccgccatggcgttcaggatgaagcgggtctggacggatggctttgcagcgggcgccgtgatgaagcagtccgaacgccgggaagacgactccgccctgcgctcaccggaagccgcgcttgccgttgaagaccccaccgccgaggaccttgaatccgataccactgtcacaacccagggacggtggaacgcaagccaccgtcgtgagctgttgccaggcggaagaacaacttccagatgcgtttcaacaggtatggtggaatactttctatatttcttttctgtccattctctagtatttgtccagtatttatagtgcaacactaggctaatacagcccactagaaatatggccacaataggcccaattcacagattacatcttcattacagttgattacccagtaatcaagtagcactcctgacaccgccctgcctctctcgctccaccgtctcatcagcttcatggaaggggggaggtctcgcttcgatttccattcagattttgtttgttgaatgtgttttccagttatgtgtcaaattgctgtgatcgtaggaaacgtgactgacgacaagagggtctacgaagtatctgcagtgaaggtggctgcgtgggcacggattctgagcgcgggtgacgagtgcctcgcctttgaccattgtccattgtccattgtcagaatgctagggaaaccgtgaaggactttggctctgcgtttggtgtgccacataaccacacgggcgcaagggaaggaagcttgagaaggcaagggggaggaggaaaacctctgcttccacctcggaagagaagcaacgaaacaacgaagagatgaaagagaatagcatcaaagaggggtgactgggctgtggcaccgaggtaacacggctcggcgtcatagatcttggcgttgaggtgcgtccttcgctggcaacaacagactgacgtggcgtcgacgtggccgagctcaagtcatgattcatggcactgaggtccagtcaaaatcggcacctgggcatgcatgttacgacgttacgtatgtagcgagcatgcatttggacttttggagcctcgtcgttttcgtactctagccatgcacctactaatgttgtctttgttgcttcaaccccaaccggtatggatgatggatcgcttcctcagctccctctttttttttcctttttttacagcagctagctagcaaggccctttttgaagcaccatgatcattcagccggggacgccgcagatgctcacttgtaacctacacatggcgccaatgcaaggtagcagcaagtaaaaaaaggcccgagagtaggagcgagtggtggtagtaaaaagctagctggaccgagccgaggagacgtacgaaaactgaccgccca

SEQ ID NO: 9870 - DNA, 1592 bp, Zea Mays
cttctctgtttcctccatcttttggcccatctgcaccctctcggtcgccgcgcgctccgccatcgaagcagccaactccgaccgaaccatcaactgttgttgggcgcgttccacttccttgagccgagcgcaaaccgcctccagagtctccatcatccgcccccaactctcctgcgttcctcgatcgtgatccgccatggcgttcaggatgaagcgggtctggacggatggctttgcagcgggcgccgtgatgaagcagtccgaacgccgggaagacgactccgccctgcgctcaccggaagccgcgcttgccgttgaagaccccaccgccgaggaccttgaatccgataccactgtcacaacccagggacggtggaacgcaagccaccgtcgtgagctgttgccaggcggaagaacaacttccagatgcgtttcaacaggtatggtggaatactttctatatttcttttctgtccattctctagtatttgtccagtatttatagtgcaacactaggctaatacagcccactagaaatatggccacaataggcccaattcacagattacatcttcattacagttgattacccagtaatcaagtagcactcctgacaccgccctgcctctctcgctccaccgtctcatcagcttcatggaaggggggaggtctcgcttcgatttccattcagattttgtttgttgaatgtgttttccagttatgtgtcaaattgctgtgatcgtaggaaacgtgactgacgacaagagggtctacgaagtatctgcagtgaaggtggctgcgtgggcacggattctgagcgcgggtgacgagtgcctcgcctttgaccattgtccattgtccattgtcaggttgatggtcatctattgataatgctagggaaaccgtgaaggactttggctctgcgtttggtgtgccacataaccacacgggcgcaagggaaggaagcttgagaaggcaagggggaggaggaaaacctctgcttccacctcggaagagaagcaacgaaacaacgaagagatgaaagagaatagcatcaaagaggggtgactgggctgtggcaccgaggtaacacggctcggcgtcatagatcttggcgttgaggtgcgtccttcgctggcaacaacagactgacgtggcgtcgacgtggccgagctcaagtcatgattcatggcactgaggtccagtcaaaatcggcacctgggcatgcatgttacgacgttacgtatgtagcgagcatgcatttggacttttggagcctcgtcgttttcgtactctagccatgcacctactaatgttgtctttgttgcttcaaccccaaccggtatggatgatggatcgcttcctcagctccctctttttttttcctttttttacagcagctagctagcaaggccctttttgaagcaccatgatcattcagccggggacgccgcagatgctcacttgtaacctacacatggcgccaatgcaaggtagcagcaagtaaaaaaaggcccgagagtaggagcgagtggtggtagtaaaaagctagctggaccgagccgaggagacgtacgaaaactgaccgccca

SEQ ID NO: 9871 - DNA, 2148 bp, Zea Mays
ggctccacgaccacgagcccaaccgggtagcttcttcttcgtccgctgttacccacaccgcgggaagcctccatgcgatcccctgggcggcgcctaccagcgccggcgcggctcgtcgcggctgccctcctcctcgcagctctcaccgggggagccgtcggcgccgatgggtacgggcgggcgaggagggtgtacatgaagaacaaggtcctggagatcatgatgaattgaagcctcttactaaaagtttcacggactcgcttagtgagcttggcaatttaaatgtattaaagtattgacaactataaggattttggtctgtattatataaatttaaggtaccacaacttaatgttacccatgattccctttttctagcttgaacacttgccacaggattatagtggatccgcgttgacactggttgagtcattatcaagagtttgagagaggagttctctggctttcagaaaatctgacatttgatgttgatgctcggattaatctttttgagtgtaacataagacttcttggggggcttatttctgctcatattcttgcaaaagactacagcagccagtttaagcatgggctgtatcaagatcaattactacgtcttgctgaaagtttaggcaatcgttttctaccggcatttgagacacctactggattgccgtattcatggattaatcttaagtatggggtgatggaaaatgaaacaactgaaacaagcacatcagggtgtggctcccttatacttgaaatgggtgtgttgtcacgtttgactggtgattctagatatgaagctgcagctcttcgtgctctccgcaagttatggagcatgagaagttcactgaatctagtaggcaccacacttgatgtttttactggcaagtggattcagtattcatccggaattggtgctggtgttgattcattttatgagtatctgattaaagcatatattcttttcggaagtgatgagtactgggatatgtttcattcagcttatcttgcggtgcagaagtacttccgacatggtccatggtatcatgaggctgatatgaggactggagaagcaacgcactggcagctaactagccttcaggctttctggccaggtcttcagacacttcttggagacgtaactgctgcaaatctatcacaccgtgagttttacaatatatggcaaagatttggtgtgctacctgaaagatatcttttggactatggaatgttgcatcctacagagaagtactatcccttgcgtcctgagtttgctgagtcaacattttatctttatcaagctactaaagatccttggtacctagaagtgggtgaaaccattgtgaggtcacttaattactatactaaagtggatggaggttttgctagcatcagagatgtttcaacaatgaaacttgaagatcaccagcacagcttctttctttcagaaacgtgcaaatatctttttcttctgtatgatgattcattcttgaggaatcaaaattacatatttacaacagagggtcatccccttccaataagaagcacgtggcatgagaaatttcctgcagcatatgttcccagcaattggacatctgttaaggatgagatccaaccaattcgcgcgagcgcattatcgtctcaagtttgtcccgagacgattttcggaagaagtgttggtaccccatgggagagtgcgtgccatgttccagatgcgcacgctagccacagatgcaggactgacgatgactgtggaatagaagcaataacatgcaagaagaggacctgcagtatggctggctactgcggcttatttttttataatggaaacaagagttccggctttagcatgataatgcgtacagccaatacaagtcgattattacaattaagaactgctgcatgaatagtgatactaactcaaaggaactaaattacaatactatgactaacactagtcatactcaattcttgaatttgagcgccatccatggtttgcgaagacttccatcgccaccacttccaaaacttgcgaagcaatgaggatttgttgttgcgattcctccttttgtagcagtctccagaatcttaaccagtgagtacatctgaaaataacctgcacaattgatggaattggtttat

SEQ ID NO: 9872 - DNA, 2654 bp, Zea Mays
ggctccacgaccacgagcccaaccgggtagcttcttcttcgtccgctgttacccacaccgcgggaagcctccatgcgatcccctgggcggcgcctaccagcgccggcgcggctcgtcgcggctgccctcctcctcgcagctctcaccgggggagccgtcggcgccgatgggtacgggcgggcgaggagggtgtacatgaagaacaaggtcctggagatgttttaccatgcctatgacaactacatgacttatgcattccctcatgatgaattgaagcctcttactaaaagtttcacggactcgcttagtgagcttggcaatttaaatgtattaaagtattgacaactataaggattttggtctgtattatataaatttaaggtaccacaacttaatgttacccatgattccctttttctagcttgaacacttgccacaggattatagtggatccgcgttgacactggttgagtcattatcaagtcttgttgtcttaggtaacctcacagagtttgagagaggagttctctggctttcagaaaatctgacatttgatgttgatgctcggattaatctttttgagtgtaacataagacttcttggggggcttatttctgctcatattcttgcaaaagactacagcagccagtttaagcatgggctgtatcaagatcaattactacgtcttgctgaaagtttaggcaatcgttttctaccggcatttgagacacctactggattgccgtattcatggattaatcttaagtatggggtgatggaaaatgaaacaactgaaacaagcacatcagggtgtggctcccttatacttgaaatgggtgtgttgtcacgtttgactggtgattctagatatgaagctgcagctcttcgtgctctccgcaagttatggagcatgagaagttcactgaatctagtaggcaccacacttgatgtttttactggcaagtggattcagtattcatccggaattggtgctggtaaaactttcaatacttacccttgtgatttattgatcatgtgcttatttgatgtgtttgtagcattattagagcatatgctgttatgttgccttcactgttacattttagcatctttatttctaaaaacagataattagccgctttgtgaaatttctaattagaaaatattaggcacaatagtgatttctagtaacatggttgcaggtgttgattcattttatgagtatctgattaaagcatatattcttttcggaagtgatgagtactgggatatgtttcattcagcttatcttgcggtgcagaagtacttccgacatggtccatggtatcatgaggctgatatgaggactggagaagcaacgcactggcagctaactagccttcaggctttctggccaggtcttcagacacttcttggagacgtaactgctgcaaatctatcacaccgtgagttttacaatatatggcaaagatttggtgtgctacctgaaagatatcttttggactatggaatgttgcatcctacagagaagtactatcccttgcgtcctgagtttgctgagtcaacattttatctttatcaagctactaaaggtgcacccaatacacaccagaaggatatattcgttttatcttcatccagctctcatgttttcatctagggttgatgtcctattgagctcatcatatatgacttacttgttctttgtagtcatgccagttttcttattatagaaacacttaagtcacccactcacaagttttactaacttctctttttttcccctctccatcccttgatttctgaaacacttctcttatagatccttggtacctagaagtgggtgaaaccattgtgaggtcacttaattactatactaaagtggatggaggttttgctagcatcagagatgtttcaacaatgaaacttgaagatcaccagcacagcttctttctttcagaaacgtgcaaatatctttttcttctgtatgatgattcattcttgaggaatcaaaattacatatttacaacagagggtcatccccttccaataagaagcacgtggcatgagaaatttcctgcagcatatgttcccagcaattggacatctgttaaggatgagatccaaccaattcgcgcgagcgcattatcgtctcaagtttgtcccgagacgattttcggaagaagtgttggtaccccatgggagagtgcgtgccatgttccagatgcgcacgctagccacagatgcaggactgacgatgactgtggaatagaagcaataacatgcaagaagaggacctgcagtatggctggctactgcggcttatttttttataatggaaacaagagttccggctttagcatgataatgcgtacagccaatacaagtcgattattacaattaagaactgctgcatgaatagtgatactaactcaaaggaactaaattacaatactatgactaacactagtcatactcaattcttgaatttgagcgccatccatggtttgcgaagacttccatcgccaccacttccaaaacttgcgaagcaatgaggatttgttgttgcgattcctccttttgtagcagtctccagaatcttaaccagtgagtacatctgaaaataacctgcacaattgatggaattggtttat

SEQ ID NO: 9873 - DNA, 2809 bp, Zea Mays
ttcataatctttcttctgtcggatcttgttgtgtgcgcctgggtggtgtatccaaccgacgttgtctagagatgttgtaaacacgaagcctagctcttctaatttgacgagttctgaactgaagttgtaaaacgaatccttacaatgctaatcttttttatttgttgggtcaaatgccaacatttcgagctcacttgtctctggcctaggattggaccattggagtgatacagatacacctcgcaagtcgcaacaaaatttccatgccaacgtggttggcaaaatctgatagcactttgagcttagcttctagtaccactgttatttgacgttcttttgttctttcttggatggttagcttcttatgaactgagttgactttaaagctcttccatatttatgttattaaagatgaatagactgtagaggttggtaaaattgacatcttcagttttatgcttccagggcagagcactgttgcatagcctctcaggaaatctatcttcatggatcatcgatgctatttacagtgatatgtgataggctggcatatttagtgttgtcaatcaagattcaagggttcagcataacctagccacattaaagctgctaacttttgtattgttgccgctctcaagattcagtgctgttttaccatgcctatgacaactacatgacttatgcattccctcatgatgaattgaagcctcttactaaaagtttcacggactcgcttagtgagcttggcaatttaaatgtattaaacttgaacacttgccacaggattatagtggatccgcgttgacactggttgagtcattatcaagtcttgttgtcttaggtaacctcacagagtttgagagaggagttctctggctttcagaaaatctgacatttgatgttgatgctcggattaatctttttgagtgtaacataagacttcttggggggcttatttctgctcatattcttgcaaaagactacagcagccagtttaagcatgggctgtatcaagatcaattactacgtcttgctgaaagtttaggcaatcgttttctaccggcatttgagacacctactggattgccgtattcatggattaatcttaagtatggggtgatggaaaatgaaacaactgaaacaagcacatcagggtgtggctcccttatacttgaaatgggtgtgttgtcacgtttgactggtgattctagatatgaagctgcagctcttcgtgctctccgcaagttatggagcatgagaagttcactgaatctagtaggcaccacacttgatgtttttactggcaagtggattcagtattcatccggaattggtgctggtgttgattcattttatgagtatctgattaaagcatatattcttttcggaagtgatgagtactgggatatgtttcattcagcttatcttgcggtgcagaagtacttccgacatggtccatggtatcatgaggctgatatgaggactggagaagcaacgcactggcagctaactagccttcaggctttctggccaggtcttcagttctactgtactgaacagacacttcttggagacgtaactgctgcaaatctatcacaccgtgagttttacaatatatggcaaagatttggtgtgctacctgaaagatatcttttggactatggaatgttgcatcctacagagaagtactatcccttgcgtcctgagtttgctgagtcaacattttatctttatcaagctactaaaggtgcacccaatacacaccagaaggatatattcgttttatcttcatccagctctcatgttttcatctagggttgatgtcctattgagctcatcatatatgacttacttgttctttgtagtcatgccagttttcttattatagaaacacttaagtcacccactcacaagttttactaacttctctttttttcccctctccatcccttgatttctgaaacacttctcttatagatccttggtacctagaagtgggtgaaaccattgtgaggtcacttaattactatactaaagtggatggaggttttgctagcatcagagatgtttcaacaatgaaacttgaagatcaccagcacagcttctttctttcagaaacgtgcaaatatctttttcttctgtatgatgattcattcttgaggaatcaaaattacatatttacaacagagggtcatccccttccaataagaagcacgtggcatgagaaatttcctgcagcatatgttcccagcaattggacatctgttaaggatgagatccaaccaattcgcgcgagcgcattatcgtctcaagtttgtcccgagacgattttcggaagaagtgttggtaccccatgggagagtgcgtgccatgttccagatgcgcacgctagccacagatgcaggactgacgatgactgtggaatagaagcaataacatgcaagaagaggacctgcagtatggctggctactgcggcttatttttttataatggaaacaagagttccggctttagcatgataatgcgtacagccaatacaagtcgattattacaattaagaactgctgcatgaatagtgatactaactcaaaggaactaaattacaatactatgactaacactagtcatactcaattcttgaatttgagcgccatccatggtttgcgaagacttccatcgccaccacttccaaaacttgcgaagcaatgaggatttgttgttgcgattcctccttttgtagcagtctccagaatcttaaccagtgagtacatctgaaaataacctgcacaattgatggaattggtttat

SEQ ID NO: 9874 - DNA, 828 bp, Zea Mays
aggcaatcaaatggagatgcaagcctaggattgacaacagaagatgtgatcgaggaatggaagctatttttctttgcaggcatggagacaacatcagtcctacttacttcacttgttgtgctaagcatgcacccagaatggcaagagggagcaagcgaagaagttttgagccactttggaagaaccagaccagattttgatagcttgagccgtaagtgcaaaaccaaggtaaccatgattctccatgaggcccttaggttgtacccaccggcaacctttctaaccagaagaacttataagaaaatggagctcattggaattaaatatcttgcaggagtggacctctttctgcctgtcatcttcattcacagtgatcccaacatttgggggaagatccagaaaggtttgacaatggcatctccaacgcaaccaggcatcagactgctttctttccgttcggagggggggcccaagatctgcatggccagagctttgcgttgctggaagccaagatgacagtatgcaccatgctctgtgcttctcctttgagctctcccattttacacccacgcgtcatagaccgtgataacactaggctgaaaaagcattgaccgagatgctccttctatgctgctgctgaatactacttttgttactgatcgtatatgtagaaaagtcaagaatgtcttaacagcttagaaaaggagaaaatattgatgtttgtcattttgtatcatagttttatactaatttttaactcccgtagcaacatatggacatatttgtacataagttatcgtattattatatattcccgttacaatgcac

SEQ ID NO: 9875 - DNA, 1882 bp, Zea Mays
ctgcgccgtctccctcggtgactccgacatcgtcatcaccaaggtactctgcatgtgtgtgaagccgtctccgcctccaccaccctcggtatggacaatcgattcctcttcatctccctctcgttgcgtcgtctcctgttgcgatgtggatcgtcgatgcgaatggaatgcggtgtgtggtgtaattctggtggtttttgtgacctacgagtcatctccttaattccaatctggtatttattagtatgggtgaattgtcatggatttgtgatactccactgttctggggaatgcatatgtttttcagattgttaatataactctgcttcctgtgagaatacaggatatgtttttcatgtcatggcccatgggctctgaaaacttatgttagactttgccccggtttctaattgcaggcagtgagtggtatgagtggttgctttcaaattgcctgatgcacaatccctgcatgaggggcctccttttgtcagtgcaaacagttttctgttttatcaatattttccatttttaactgccacgtactgttgtttacatatagagtcaatatgtttagttgtatgtgtcctgtattgagccaattagcatttcttgatttatttattgtggcagcatgtggatgagccaactgctttctactgtttaagacatgtctgtacctatcactctgcatgtgtttccatgcatttcagttgggatttggtccagccaatgtgctatcttcgaacattctacatacccattcttgtggtagccacattaataaattgataatttgtgcgttttgaggtatctgatcttttatcacaacagagcaatgcttcacacacaactttggtgctgatcaaaatgcatattcaccacaatctacagactctgatattgttcttgatgattaagtagtttgggaatctgcaacattttccaaaccatcattgttggagctgatatttttccttttcatttctcgtagcctggcttagaaaacggaaaattgtaattattgactgcttgttggcaggatactgctagatcagatgcaatttgggcaataccggatcatttttagaaagtgttcggagatcaaccatggctaatggcttcattcgtggttccaagattctctttatattttttacatttttctatcattgatgaaaatagaggttttgatacaaataattcactctacctactttaatttgagatctaaatgtttttattctcttgtttattccttgttcattaaaaatagagagtagagttatctctttgaagtactgaacatatcacttgcctttttgctttttctggaatccgatgctatttgggcaataccagaccattttgattttaatccatttctgcaccaataatatttttccctaacagtgatgcatttttaccttgtaatctgaagtctcattttgaagagaaactaagggacacgggtgcggcgtcccctccatctcaactccaccgactaccgctcttcttgctctccgccggaggcctccttccagttgcaggtgtaggtgcggcggcttgtcactggagtttaggtccaaagtgatatagcattacatcccagctggaggaggtcagcgaccaaagtacatttgcaacgtaaattgttttacataaaacggtgaagctgtgacgatggtacagagaggcgcgctccggcagcgctctgcttttttagatgaagattcaacttcgatagagaacaggctgattgcttggatgatttggattttgcaattatgcatgagatgagcaaattgtcataccgggttatggaggaagatgttatccgttaatcagctgaagtcctcaatccaactccaccttgatggttcaa

SEQ ID NO: 9876 - DNA, 3359 bp, Zea Mays
ctccgcgcccgcccacggatctacaacagcgagcgccgccgcctcgcctcggcaaacccggctccagggcgacagctcccgccagtgggacctcgtgttcagcgtcgtgaagccgtccgtgatccagctgcgggggcaccaaggtcagcgtcttcatcgccagcaacgacaccgagcaggcctgcgacttcaggatcaccggcatctaccacgacggcgcctgcgccgtctccctcggtgactccgacatcgtcatcaccaaggtactctgcatgtgtgtgaagccgtctccgcctccaccaccctcggtatggacaatcgattcctcttcatctccctctcgttgcgtcgtctcctgttgcgatgtggatcgtcgatgcgaatggaatgcggtgtgtggtgtaattctggtggtttttgtgacctacgagtcatctccttaattccaatctggtatttattagtatgggtgaattgtcatggatttgtgatactccactgttctggggaatgcatatgtttttcagattgttaatataactctgcttcctgtgagaatacaggatatgtttttcatgtcatggcccatgggctctgaaaacttatgttagactttgccccggtttctaattgcaggcagtgagtggtatgagtggttgctttcaaattgcctgatgcacaatccctgcatgaggggcctccttttgtcagtgcaaacagttttctgttttatcaatattttccatttttaactgccacgtactgttgtttacatatagagtcaatatgtttagttgtatgtgtcctgtattgagccaattagcatttcttgatttatttattgtggcagcatgtggatgagccaactgctttctactgtttaagacatgtctgtacctatcactctgcatgtgtttccatgcatttcagttgggatttggtccagccaatgtgctatcttcgaacattctacatacccattcttgtggtagccacattaataaattgataatttgtgcgttttgaggtatctgatcttttatcacaacagagcaatgcttcacacacaactttggtgctgatcaaaatgcatattcaccacaatctacagactctgatattgttcttgatgattaagtagtttgggaatctgcaacattttccaaaccatcattgttggagctgatatttttccttttcatttctcgtagcctggcttagaaaacggaaaattgtaattattgactgcttgttggcaggatactgctagatcagatgcaatttgggcaataccggatcatttttagaaagtgttcggagatcaaccatggctaatggcttcattcgtggttccaagattctctttatattttttacatttttctatcattgatgaaaatagaggttttgatacaaataattcactctacctactttaatttgagatctaaatgtttttattctcttgtttattccttgttcattaaaaatagagagtagagttatctctttgaagtactgaacatatcacttgcctttttgctttttctggaatccgatgctatttgggcaataccagaccattttgattttaatccatttctgcaccaataatatttttccctaacagtgatgcatttttaccttgtaatctgaagtctcattttgaagagaaactaagggacacgggtaacatttacatgtttttttgtagaatatctgtgtttgtaggcaacctgtctaatcaatacttgtctcacagcatgtggactgcatatcacttaccttttcgcttcttctggaattcgatgcaatttgagcaatatcatatcattttgattttaatccatttctacaccaataatatttttctaacagcgatgccttttttacgttgttgattgaagtctcattttggttcaatggaggaacctgaacatcttgagatgagggtggatcgcttttaaaaaatttctcatgttgcaggtgcggcgtcccctccatctcaactccaccgactaccgctcttcttgctctccgccggaggcctccttccagttgcaggtgtaggtgcggcggcttgtcactggagtttaggtccaaagtgatatagcattacatcccagctggaggaggtcagcgaccaaagtacatttgcaacgtaaattgttttacataaaacggtgaagctgtgacgatggtacagagaggcgcgctccggcagcgctctgcttttttagatgaagattcaacttcgatagagaacaggctgattgcttggatgatttggattttgcaattatgcatgagatgagcaaattgtcataccgggttatggaggaagatgttatccgttaatcagctgaagtcctcaatccaactccaccttgatggttcaactgctgttgtcgaggacattggccgccagctgctgacctatggacgaagaattcctaccccagagctttttgcaagaatagatgttgttgatgcaagcattgtgaagcgtgttgcaaaccgcttcatctttgatcaggcggccaccacaggttcggtccagctggaggcaatggtggtgatagagatggtggtcacggagccaacaactcatggccggggggagcacgtcaaggcaccgccctagcccaaacccgagacggattacttcaccgagaaaagaaatctgtggagccagagcttgaaaatatcgatgtcgtggggaggatgtttggagactggagtgtccatgcgctggggtcatcaaagtcgttggacaatacgtctaaggagtgttgtcttcccgttaatcttgcagcacatatatgcaagcagtcctacaatcattcaaaattaggagcagcgatatcatgggacgatgctctgcgatcgagcatgagacactttcagcacaagtactacaacctgttcacctgcaactggcacttgtttgtggcgagctgtctgaaccggcttgcctacaatggctccctggagtggaatgtcttgaacgtggctgcccttgtctggtttcatggctgatgggtggacagaatgagtactattctagcaaccgagcagatcatcagaaatccagaattatcaataattatctaacgtctgcatcccgaactagaatcaccacaccggtctgtcatgaccatgagaacctacaacaaagcagatctatgttttatacaaattttttactcccgtcgcaacgcacgggcactcacctagtaatcttatatgagtagaatagaccgcgacccattttatattaaattttggcatttgatgattaagataactatttaaagtaacattttttgttactgcctatgattataattcaaaggatg

SEQ ID NO: 9877 - DNA, 1033 bp, Zea Mays
agtcatcctcgctcgtgggccgtggcgtctgcctgactgcctgtcttgcagttgcagaccgtccaaaacctggtggcctagtggcgatcggcggccggcatcagcgatggagtaaagggtgcagcacgacagcacgccagcggccagcagggggcaccgggcaggtgggcagcagcaggggacaggacattaaaggtcttgaggcagataaactggagtgcaggctctatgtagggaacctagacttcaggatgtcagagtccgatgtaatcaagatgttttccccttttggaaagattacagccgaggattttctgtggcacacacgcggtccaaagagaggcgaaccccggggctatgcctttgttcagtacaccactaaagaggaagctcagttagcaaaggagaagatgaatggaaagttaatctgcggacgcccaatggtagttcaccttgctagtgagagaagttctctaggctcttcaagttcacatagagcagtcaaagacaagaaattggcaggtggttcaggtgccaaatcacaatatactgatacagctgcaaagatagctgctataaaaaataagttgaaatctctggaggatgggggatgtagcacaaaaaaaccaagacttaatccagacaacttgacagaaatcagggaacagtctcataagaagttttgaagcgaggattttttttcgttctctggaacattgagtgcttttgccctctcatactggtgacacttctaaagctgctgctattctataattctagcttcagttagtcaagtgagtcacaagtgtagtgtttccacagtgtatcaaatatgtacaatagtttgtaccgatcatctttttcctgaatgaattgcccttttgatgggggaatcattgtgactacatactgttttgttattgacaacatattctcagtgtgcccctgttgaacatatgtttccttaacttaattgtgtcgcattagtttatccacctatacttaaatcgctgaccacacttttctagaaata

SEQ ID NO: 9878 - DNA, 583 bp, Zea Mays
ccggtttgaagtttcctctcccactactgcccagtacgaatcccggtcttctaccctccggatcaaaccttggcgggacggcgcaacattggcgagtggcgaccgaggaggcggagcgaagtgacatcgcagcgcagcctcgacggaaaaagaaagagcagcaataccaccattcttgcttccattggaaagtgcagcgttcagttactggtaaccccgcaagctgattgaaaatgatggatatacactgcatctgaatagtgtgagaatccactagttgcaagctgattcaaatagtttcagtttgagtttcagtttctgcttgagattgtcaccattcttacaagtgtatccatggtttatataaacaaatacactagttgcacatttggatgtaaatatatgagcagttcatgtttctgcaatagaatacactagttcattgtctgaaaaaatatgaagtgaggcatatttaatagaaggctttgatagcaatgtggttcatgaggtaaatgatgaagttgatgatgtactcactgaaaggaatgaagacgtgcttacaagcgcagattgactcatgaaa

SEQ ID NO: 9879 - DNA, 1294 bp, Zea Mays
cggcagttcccacaaacatcttccccaacctcgtactagccggctgcgagatccaacgacctccgcacggcagttccattagagatgcctctagggaagagatccacacgactatcctagaaatccgaagaaatcataccaaggtcaaatagaatgggcaggcaacttgaatcgttaagcagaggactgggaatcaagattccaacccaaatcactgaagggaacaaaagccagagccacctattcaagctactaagtttgcattagagctagagggatggtcgccaaggccagggatttactgtcgaggtgtacaagtccatggcagtggctgtttgtggagattagaagctgatgagggagtctcgtagcagaacttcaatgttgagatatggaaaagctacatatgtatcaagatatgtgaagactgtccgcctcaaacaagaggagtattttggtggagcgaagtttatgaagggcatggaggtactgctggtaacaagttctggatgtcattaggtctaccattgatagctactgtgaactgtgctggtaacactggagccaagaacctctacatcatttctgtgaagggaatcaagggcgccttaacaggcgtccttctgcctgtgttggtgaccatggagaatggaaagcctaaccttaggaagaagaagcaagacaaatataaggatgctgaacctagtgcaatagatctttttaaggagatgcattgcagcaaaaagaaaggttttagcaaaaatgttcagaaagctattgttgatatggaagaaatggtggcaacatcagttcaagatggacaacaaccgaaatatcctacagaagttgtttatagtgtgcaactgggctccagtgtgttcttatgcaatcttggtctttagtccgtctccaagaaaagctcaacatcaatagtttttataaaggttcaacaacttcaggatcgactggaggccaagaagcaagaaaaagatggactttgggaagaagtgtaaaccttaaatgctcaggcagtcatctcaggagaccattgatagtatgaagaggtcgaccgaagaaaataacaatctccttagtcaactgttaagcttcaatagaggccaagtgcctccatctcaagtctacttgaccactataggatctgcagccttatggttgctatagtagctagttacaatagctctggatttgaatttataggattattttcaattaagcttaatgtttaattccttgagttgaagttataggattttctttggatcttatgtaaaag

SEQ ID NO: 9880 - DNA, 1084 bp, Zea Mays
ctgagctgatcacgagtctctcagcgagtgctggagagcccactatgtccgccgccggcggcgacctgccggagactgtggaggtgacgctgcgcgccgtcggcccgtcccgtccaaccaccctccgcctccctccgcttctctcggtcgccgagctgcgcggctgcatcgcgcgcgaacgccgtctagcaggcacggaagaagttcgactccgcttgatcctgcgggggaagacgctcccgcaccaagacgacagccatgtcactctccgcgatgggggtgggtgccctaaatctgaaccccttatgtcttcattggcgatgtgcgagagatactcttatagtcgccgtggcacctaagcctcctgttaatcatcttcttgatgatgacgttgaggacgaagaagaggatgaactgaagttcagaataccacaaacgacaaccttgtggaagaggaaattttttatgtttcttcgagacaaattgagattgcctgatatcattttgatggcgctgttttctctcagtatgaaagcatggattatcattgcaatgtggttcctattggcaccgattgctcagaagtacgacattggacctttatatataattggtactggtttcttgatcatacttattaatctcggaagacgacagcaaggtgatgttagtgcatactccatattcaacgaagattttagggagctgccaggaacacttaatgcagatcgcattgatgcagacatccgggcaggtcaattttaagcccttactgggcattgcagagatagggaccatggtatgctgagatttgtacagaagcgtactgggcattgcatttgtttgtgcatggaaagcagtgtggagataaaggctgtgcccctctaaggttaaggtcaaataaatttctgacctgtaagtgaaaatgttgcctggttacaattggaaattaccgtgatactttgcagatctgtacttgtgaaaccaaaagagcagagtagcttaagactggcaacaaagtgattttattcctctcttgcaagttcttgtgtccgctatgagccacaaagtcctatatagcaac

SEQ ID NO: 9881 - DNA, 576 bp, Zea Mays
attttcttgcaaggaaacaagtttaaccgcttaaaaaggctggaagagaatgttccctgcttcgtcggcttctcggtcgggacgcgtaactgacgcctcccagacctccccttcctcctccccgcgttcctagtgcgacgatgcgctctcgccttcctccccattgctaccttgtccctcctccgatgtgccgcgcccaacgcggcgttcctggtcctgctcctccttgaccgtgtgctggaactggaagtggtgagcagcggcgttcctggtcctcctccttgaccgtgtgctacttacgaggataaacgatgctccatagatcatgaagcagatgcccccgccacctaaggatttggagattactatagtgcaagtagagtgtagtgatcaatgggtcctgataatgttcaaaggctacaagcattagccgggacatagtccaagcctgatacaggaaaagtgtcacttaacattatgtccaactttgttttgtttgtgatacgagttgtataactatttaagcaattatgtagctatttttatttcagtttcactagcattgtctagaacacg

SEQ ID NO: 9882 - DNA, 870 bp, Zea Mays
cagagggcacaactacaaatggggattatctccttccattcaaaacaggcacgtcatgtatttctgctgctctgtcaatttgtaaattacctagaggtggtccgcttaccagtttactatccttctgagcaagaaaaggatgatcctaagctctatgcaaacaatgtacggaaactgatggcagtggagggaaacttgattctttcagaccttgggctggcggagaagcgagtgtaccatgccgcactgaatggtaatagtctagctcgtgctttacatcagaaagatgattgaaatgccatgctatcgtgcttccataatactggcttgcttgtaactgtgtgcttgcttgtgcatcgtcatggttgagaggaatgtcgtgaatatactatccggcataaatctgtaaagtaatttaccaactgtcatagttcagtaattatgttggttatactcctacatggttgggcatccgcacatttgatcctgtggtcaatccatgtgagccttttttactatcgatgttcaccaaactgaaccatctacttggtcttccctgcaggattgttgtgtcaaagctattttggataaaatttggaaatgaaagcagttagtttttcctagttgtccctgtaccattgcagtaggagaaaaaggaatcaaattttgttgtcactaatctttctcattaaagaccatctgtagataaccacaccgttttgctgcaaagatcaaatagacgttaatcaagctaggcatagcgtaaaaaatgctgttttcttactctcgtcaccgcagttcatgtgctgtgttttgagttgacatgatgtacttgatgtgtccgttgactaacatatggttgtctaacat

SEQ ID NO: 9883 - DNA, 533 bp, Zea Mays
cgcagatgcctcctggctcgccgtcgtcgcccacagaccccacctcttccaaggtggttcctccgcctagttactgtagtcatggctcccctgccatcattctctccttcctctattgtctccttcctccagacagagaggcggcactggtacaggtgctaccgggcgaggtggagcctaatcgcatcccatggaggaccaccctccaatggatccaggacgtgaggcaccaaatcaatggagccgcgcaggtggtaccagcgaggtggagcccggtcgcatcccatggaggacaaccttccaattgatccagggcgtgaggcaccaattcagtggagagagcgtgtctacttcttgattgggttgtttcctttactgagggtctagagaacttggttgcatatgctagaatgctacatggtatctgtgctcactaatagtccaaggttttcttaggacatccaacatgatatactgggaaggaaaagatttttacacccttgtgaattcgagccactttttcatcaaattct

SEQ ID NO: 9884 - DNA, 1153 bp, Zea Mays
caccgccgcaataagcccatacgagcccaacctggaacccgttggcgagcattgggcaacccatgcatacctcccccgagctgatttggtggagggatcacgattcctccccatggatccttgtgatccctgtccaccaatcacccccgagagttcgcgctccgttccaccaaaatcctccccacttcctcgttcctcaaacttgaataagatggagaatctagcacatccaatctcctctggttttgtgacttccaaactagtcctccacgcgtcacttcccacgcctagaaggggattgtcgccgccgccgcgcaacaatggcctcctcttcggagaacacagtgggggggggggggtccaaggccatcgacgccgaacccggagccctttagtaggtcaaaaatcaaatggcaaatatcaggagaatgggaatggtgaagttgagaaggatgatgatgaggaggacattgatgagaagataggagatgaagaggataatgatctggatctttcctggaaaatgttggacattgctaggacaatagttgagaagagccaagagaacactattgagaaagtaaaaaaatattctggtcttgctgaagttgcaacggaaagaggacatgcatagacaactcactcactgactacatgagagctttatccatgttggagcacttggttgagcctgatcatcgccgagttgtggaattgtatcctctttgtcataaatacactattttgtgtgctcaagagaaatattactacccacagtcataattattcgacattaagatcatcaaattgacctgaatgtaattcttatgtcatataacaatggctggagcctggaggtagtatcattgtgtaaataatcatctgcaacctagttgttggggctcttgcattgatctattgtggtgatctcttttttactttaatatatatttttgtagcatgttaaacttgaaaatttgggttggtaaagaatgccttgttaatattcaataaacaagttcacttcttttggtcgaatgtaacattatttacttgaatgcacatgttactttagattatatgatcgcatcccagcatcagtttaatttgttgctcttcctttgttaattgccttgaaacagtcttttagaaa

SEQ ID NO: 9885 - DNA, 1440 bp, Zea Mays
ttggctccgtccctttgttaccttatgacttgcaaggtcaaaaatcaaatggcaaatatcaggagaatgggaatggtgaagttgagaaggatgatgatgaggaggacattgatgagaagataggagatgaagaggataatgatctggatctttcctggaaaatgttggacattgctaggacaatagttgagaagagccaagagaacactattgagaaagtaaaaaaatattctggtcttgctgaagttgcaacggaaagaggacatgcatagacaactcactcactgactacatgagagctttatccatgttggagcacttggttgagcctgatcatcgccgagttgtggaattaaacttccgcatatgtttggtttatgagctagtttccaagattggagatgcgattccgtactgtacaaaagcgatttcactatgcaagtcacgcatatagagccctgaaaagttccaaggatgctttgcatgataaagacggtaatgatgcacctgctgttgaagctgaaggaggttcagaaaaaactgccgctgaaaaagagctagagcagcttactagcatatgcaattttattatgcttcatgggtctgttactgtatgagtgagcgaaagactttgggccctgcgagccggagaggtacgccacaccaatcaccaatcacatcaaccgcgacactctcagcgcgagcctggcacccccgcctctggatattatggagagcttgcgccagcacatacttcaaatatggatgcgctctgctatacaaagctcaggaggaaactgatttttaggtccctttgtcagcgctcctactattctcaaaatggcttcggctctggctcctctgtcttcttggcttctctagaggaggcagagccgttttgcaattcatttggcaaaacagcttctcacgagcagacggtggcagagactataatttcgtgaaacattattgtgtgccgaatagaagaagccggtagaagcttgttttctcgtgcttcggctcccaatagcaaaacaactctggctctttgatgactctcggtaaggagccgtttttctaagaccgtttggtatggcttcacgaagagccagaaaaggagccaccgagagagccaggcccttaatatggagaggatgcctgtcttcggagaaagctgttgctgaagaaggtatatgattaccagctcgaggacctggaccaagcagccccaagccctgccatggatgagatggtgaagacaattgcgtctaggataactgacgcgatgccaggagctgcatcttttacttgttcccagatggcagcctcgagcaatggatttaactcctcgcggttatgtctaccgcagcgacaaccggaagcattgtgactgaaaaacactgctggagccatcgcctcatcctgagctttgtacgctgt

SEQ ID NO: 9886 - DNA, 1642 bp, Zea Mays
aataagaagaccatgcggcagaaaccttcctgacacgcctgcacggacgacctttattctatggattgaagatgggtgtcctaccatctggagaaagagctctaaagttatcaatgcaggccttctttctttcccttttcatgattttctttcttccttggcaattcagaacgggaggttctattggaagccaaatacttactgagatcagcatttttatagtgaccactggtgtttctctctgtttggaaataaatcatcattttgttcaggttgtacatacaaggaggtgcagttttgctccgcctcagagcactgctgctgcagacactaatcccactgaatttatcctagaatctttggaacaaagtgatccacgatcattgatacaatatcttgcataccaagatttgtgtgtggcatctgagtgtaatttggaaccatggcgcagagctgctttctttgaggaatctggtgaaacttataaaagaatcgtgacaacttgtttgaagccacttgaggagtttacttcaaaaattgctgaatcccttgaagatttttctagtgataagccagaattgatgctacaacagtccaaactctttagtgcatttgatgatttccagatatgcgcatggtgtgctcggacattgactgggttaactgcgtgctcacgccaggaggatcggtatggtgttgctcaactcactggctgcaatgctgctgtgatgacaacgttgctgtctgccctagtagcaattgagacatgcttaggaaagaaaacaaacccacagcctgtgcactcattgggtcctgaaaacattaggtgggttaacttctccacaggacgaaaaggcactggagttgcaattgcatgcacacaaaaaggcggcctacacaagaaagcttataccatggcagatgttcttcggacttctgtatatcagatagtttcagcattcatcgatgacctacgagctaatgcaaaaccatccagcttggagaagaactggatcagtgaagggagaaaacctgtatatggttcacaagccgtgttggttcagaagttgattctgtttattgagtaccgtgcagtatgaacttggttcatgtctctcagatccttacctccatatcagatcatacttggtagtcatgggtttttgaacttggttcaagaaccattgatttccaccagagcctatgaagatggatcctaaaattacttctgtattcctttgggctgctgcactgctgaaggcagtgacgctctcggattggataaccattatgcacccaggccttgtttctattctggtttatccactcaggcctttgtttctattctgatttgtagtctggaagttgaatagagttacctgtatgttgtatcatggagagggaatctgaaatacttatgatttttttatatccacttatcagatttatgacaaactgttagtactgcttagctgcacctatttggtggaatttcgtggtgaaaaggttcggggtgatgatctcctggaataggttccagttgttctttcccagtttacccaatagcaatatcagcctagtcttgaaacttcttccagatatttgagctcatagttcgcaaacgagagcttatgcgttcatt

SEQ ID NO: 9887 - DNA, 1057 bp, Zea Mays
cacgcctggacacctaaccctttggccttcgttgcggacccgctactcaccgcttctcttgaccgcatctcttctctgcgccgccgctcgcctgcacttctacgtgtgaaacgcgtccgcgcctatggcctgcccgtgcccagctgccccctctccacgcgagcctctctaggcgtcaagcgtgccattaagcaaccgtggcccccacccctcctcggctctctgcgtgagcacaagcacgtctctgtagcccatgttcaacggaagcgaaaggaaacaggtcacccatcacattcgtcatgtgcaattctctcatgccgtgcagcccattaattccactgaagaaaacatagaatgtgcatcataatgtcacagaaggcctaaaatgttatagtgtgcggccattgctcacgaggaggcagagtgccgtgttgccgagtgccactggaccacatacgattgttgatggtaaagaagttgtgaactttgcatcagcaaagtacctcggtttaattggcaacgaaaagattattgattcttgcatcagttcattggagaagtatggtgttggttcttgtggtccacgtggcttttatggaacaattgatgtccatcttgactgtgagtcaaagatagctaaatttttggggactccagactccattctttattcatatgggatttctacaatattcagtgtgatacctgccttctgtaagaaagaagatatcatagtcgctttgatgtgattgcagtgacgagggtgttgactgtttggtgaaatgcttgggacatgacggccagcaacaatggagtctgggaacaacgataggaggggtgcggcagcggcacccgatgtatcccttgaacaatctggttttgattgatgcagatcaatctgatgtacactgtattccgcacttgcactgattgtttggttaattacaagattatctcagtgttttggtttggatttagagtacacttatgtatgaaatattgattggtactcatctatattatattattattaaatatatgtgtgtgtatttctctt

SEQ ID NO: 9888 - DNA, 1272 bp, Zea Mays
cctggacacctaaccctttggccttcgttgcggacccgctactcaccgcttctcttgaccgcatctcttctctgcgccgccgctcgcctgcacttctacgtgtgaaacgcgtccgcgcctatggcctgcccgtgcccagctgccccctctccacgcgagcctctctaggcgtcaagcgtgccattaagcaaccgtggcccccacccctcctcggctctctgcgtgagcacaagcacgtctctgtagcccatgttcaacggaagcgaaaggaaacaggtcacccatcacattcgtcatgtgcaattctctcatgccgtgcagcccattaattccactgaagaaaacatagaatgtgcatcataatgtcacagaaggcctaaaatgttatagtgtgcggccattgctcacgaggaggcagagtgccgtgttgccgagtgccactggaccacatacgattgttgatggtaaagaagttgtgaactttgcatcagcaaagtacctcggtttaattggcaacgaaaagattattgattcttgcatcagttcattggagaagtatggtgttggttcttgtggtccacgtggcttttatggaacaattgatgtccatcttgactgtgagtcaaagatagctaaatttttggggactccagactccattctttattcatatgggatttctacaatattcagtgtgatacctgccttctgtaagaaagaagatatcatagtcgcgtaagttcacctaagttcaccgtattaaaaaaattatgaaattcacaagtattattggaaccttgacttgtttggtgtatcgaggtctgcatgcttggccttttagacataatatggatttatccagctcaactttaggctttagcacaacattgttatctctttcttgtgtctattgatgagttgtttttcctctgtcagttaactgtacataggtagtttgatgtgattgcagtgacgagggtgttgactgtttggtgaaatgcttgggacatgacggccagcaacaatggagtctgggaacaacgataggaggggtgcggcagcggcacccgatgtatcccttgaacaatctggttttgattgatgcagatcaatctgatgtacactgtattccgcacttgcactgattgtttggttaattacaagattatctcagtgttttggtttggatttagagtacacttatgtatgaaatattgattggtactcatctatattatattattattaaatatatgtgtgtgtatttctctt

SEQ ID NO: 9889 - DNA, 641 bp, Zea Mays
tagagatgacttcagccagtgaagcatcttgccctatttaggccctttgtgatctccagttctgatctggagcactttgggtggctttggtatccttacttatgttaggtcttatgcctgttcgtgctggagttatctgatgggtcacttcacagcaaaggaggggtggcatttgttacttgaattgtagtattgctcggttgtgttgcgtcaggaaatgccaaatttgttggttgttgctgcgtctgaagatgtgcacggttgttgaggagagcttgaaaatattggtctggttgggctgataaagttaagagtattttttaagtacaccttgttagtgaatccggttggtgtcggtctactctgctgaagaccaagcggcttcattgccgcagcttgtatcttttggaatccgttgaaatgtgcgtgcggtttgactactttcagcttaaatgagcgtgcccaacatggatttttcggttacctgcaagaaaagccaacagaataatccgcccgtcgtttccccccgggtgatagaaaatttatttcatggttaaaagtttcaaagaacaatgttctattctgtgatgtggaatgaactacattctatcttaccggagctagaaacgaatcaaaacctt

SEQ ID NO: 9890 - DNA, 1649 bp, Zea Mays
cttccacaaaccccataaccctagcaccgccgccaccatgtcctcatctccatcttcagtgaaccgccgtcccccgggcccgctagcgttggggctggagtccttggggaagaagatcagcatcggctggtctccgtcccgggcggcatcctctccatctcgtgtcgcacctacgcgaccccactgggccatggcttctttccccgtgacacctctgtcgggatcgcgagggatgcgttcaacacgttcttcagtgaaacgggcgcagggaagcacgttccaagggccctgtttgtcgacttggagcccactgtgattgacgaggtgaagaccggggcgtaccgccggcttttccatcctgagcagctcatctcacacaaggaagatgctgcgaacaacttcgcccgtggacattacacaggctcaaaatgttcttggaaacaaggggactgaaattgcaaaggtagcacatcggcgaactgatgcggaggcgggcgtggaggcgctcgatgccgtccagcaatcagtagttgtcgctgcatcggcgacttctttcccccaccagcatggccgcgtgaatggttcagttctttccaaagcctacagcttctaggaaatcggatacgatcacccgaaaaaggcaagggggaaatcttcttatagatctgttccgtcattgtgacaatcatttgggagagaaacaagtaaacaacccttttttccataaaactccatctggaagtgcacgacagccactacagttgactaccgatgtaaccaagatgatgcaaaagcatcagctggaaacgccatagttgctgctactgagacttctttagtgatcttttggtacatcgctgctgatacaaacagcctacccagactgcttttgtgaagcacactgctttctgagaagccatttgcagtgcaaggatgaaacttggtcagagtgtttaccatatggattggcagccccaaataaagctctggattgtcctattcccatgacaaggttgtgctcttctcctgcagtgaaaccaaaaaagaaggcgcgctactgttcttccgttttcatgtcaatgcaacaacagataagtggaggtggcactaccaattccttgatgtaccaggaatgtttggattgttgtattctgacattgtttggctcaacatattcaagttggagtgtcaggtctccaacaattaaacaagatacggaatctgtgtaagcaagagcattcataccttgttagcttccttctctctctctcaagatcgatctagagaccaacaagatcatggacttcttcaagtttgacgtcgataacgtggtcatggtgaccggcgggaggaacaccgggcgtgtaggagtgatcaagaactaggagaagcacaaaggcagcttcgaggtcatcgacgtgctgcttggagctttttgcatgctatgtctagttttctcctatttgttgtacaggaaaacatagaatggaattcaaatttggtggtcgcaaaagtgtggagacttgaattcatataaagttaggcttaacattagtgcaaacagttgtattttagtttagatttagagtacacttatgtatgccttgtttgacaatgcttatttatgatatattgaatggtacttattt

SEQ ID NO: 9891 - DNA, 2014 bp, Zea Mays
ctctagtgcaatgttgtagcgacaagtcaatttattctgcaaggaatgacaagtacatatgcacaattagctttttaggttatttacatgaaaagttggtgtcaatgttttgacccgagggtcctaaccaacaagtgaatttatgctgcgtgccccggtccagatggatgatgcaagaagacacaagatttacccttgttcgggcaagagaaggccctacttccagcgaggggggatgagacttatattatcttgtacctaggtgctcatagtagggggtacaagctggtcgagagagggagtgagtcccaagtctccgagagattgaagcgagtgccaatatcgggagtgaagagcaaacagtgaagtgtagtgtgtttctcctctccccctttggagactctagactcctccttttatagtcgcaaaggggaagccatgagttacaagggttgttgcgctgctcttgtgataagaggatacgagtccgagcccttgtagcagtatggtcgacgggatgtcccttgtcctgggcgttgtatttgatcaggagaaggatgtttgatccctgtaacctgcgctttgatcgtatagatgcgtacccaagcctgtcttgtgaggggcgcagatgagacgtttataagtttgtcgagtcgtagtggttgaaatgtcactcgacatggtaaaaagtgcgtggtaatttggcccgtgcgttatccgggatggcgaaaagctggttggacatcggccttgcggtttttgtagccatcccgtctttagaggggttcgtaggagggtcggcggtggcgtgcgtatctctgttggtgttgttggccgaggctgggctcaggcgagacagagatttcccccgaggccgagaccgggtcggcatacagatacatagtcatgactagagtgattggaatagcagtcggagttgtctcctgcgggattcacgggagggttggtggcatttaatgcgctctgctagggtagttggccgaggccgagctcgggtgaggcggagttttctcttgaggctcggagttgtttgaaacgataaccggagtgggggaacaatgcatcgtattcgcgtccgtgcattgcgggtgctgaaagtagattagactacggtcgcgtcgtcctttgttgactttggcgccctcagcgggcaggtgttcgtacagactgcatttaatgcacatgtcttggggtttcgagaagtcggtcgaggctgggctcataccgggacctcgcctgagatgccctcgggtgaggcggacacgcgttctccgcccaagggtgcccttggtaggttgctgatccacgtagatgtagcattcaccggagtggatgtttgctgcaagaagaaagtggagagggcaaataaggctctcctgtggatgcatcaagacaacagcatgatggcgccaaacttgaggtcagcattgggcaagggcaactaccagagcagagaaaccaaataatataccatacctaactgttcgcctggaagttactcttcatgacaggaaaaattctgaacatcaaggagtttctgtttgcaagtttcactatttaaaagcaggtcgtgtcacttgtgcggagttaaggactggaccgaggcagtattatcagtttctggatatggattgttgtgctagtttcgatgcaggtgtcaaacaacaattaggctgaagaggtgagcaacatttaaggaggtgctgatgcttgctgataacctatgaaaaggcgttgctgtagctgactacttggtttgtggtcagataattctggacgtgaattttgatatgttggccagattagctgccaaataggtatttcgtatctcttgatttatgggattcacattaactgattcttggttgccattcacttgtcttggttatggtgctacatgggcgtgcaaagcatgaaggcaatcgtttgactttgcttggtaatgcgttttgcgcacaacaatctgatcaaggcaaaaatggtaatggtttcc

SEQ ID NO: 9892 - DNA, 8682 bp, Zea Mays
gaaattaacaacctgcacttcacgaaattgtttcaatgatttctccagttggaactccaatccggccttttcgctggccatggattctaattgtgtttgcttgtggtactggaagaaggatccatacagaatcaaattagctctcaatgttagagtgtgaaggacacaaaagaaacggacaggttgattgcataccagcaagtcagttagctcccggtatctcttctcaagctcaacatgctcctgataaaaaaaacaagaaacattcacaaaaaataagtgttccttaggaattttaataacctaaatctatatgacttggttacaggccaatctcattcgcggattggtttggctggtaaccaggaaactcttggtcaggaagccattgatgcctacatccgtctgttcaataggctcatgtcacaagttcacattgcggccatggcagtacttttcggctggacaactcctgaagatggagaagcacctcgagatgtgaatattcacatgggagtaattccccctggagatgtaatatgatctgtgcccttaggtcgtttcttctgcctatatatttaaaatggatatgtctaaaattttaatatgggacttaacaagaagtctcgtcgggattcggttagaagtatggtgggagacactctgcctgattttgtatgtcttcaggagactaaaggaagcgctacctaaaaggatgatcatgtccacactgggagcagactttgatgagtttttggttctactggctagttgcactcggggtggtattcttctagcttggaagggatgtacttgtaaagctattgacactagaattgatgagttttcggtttcagtccagtttgaccaagttgatggaaacccgtggtggttcaccggagtgtatggcccacagtctgatgttttgaagatctaattcctgcaggagctccgaaacataaaacattcgtcacgattgttctgacccatgggcagttggggggggattcaacttgatctacaaagcagaagacaaaaataacactaatgtggatagagctatgattggtcgtttccattgcttcctcaacgatcaaatgcttaatgaagtggccctcatgggtgttagagtactgttagggtttcggggttagtccctgtgtaattacctgtataccctaagtgtaatgggcttggcccaactactcggcttatatatatatatatatatgctcacccaacccggttagggtttcccattctccagcttggtaccacagccaaagctagtttctctctcaccgtccatcccccaactgttcctggccgccggccatccctcccaccaccccctgctcgtggacggcgcgcccaccccggatcccgcaccgcgctgacagcccgtccgcgccgcaccgccggcccctctcctcctgcactggtggcccccggccatccctcccaaccccctgctcgtggccggcgcacccaccctgaatcctgcgccgccatcccgcgctcgcaccacgccaccggaccgcgacccgctgactgcgcccacgcccaccagtcgatcgcgcctgctcccggccgccatcctcgtcctcatcaccaggttgttccccgaggaccagcgggtgctggcccacctcgtcttgcactcgttccgctggctgggataccatcacggcgcggccacctgcccaccgtcgggtgcctgtgcttcgtctgctattggcagcttctggtcgcggtgggactgctccccacaacacgactgcatacacgcagtcctcgacgccttcatggagcacctcaacgccactgagtctgcccctcctctcccgcgaccagcttgtctgaggcaccttcatggccttcgatcgcgtcatgagccctgtccttcgtggttgtgtcgaaagccacccccaggccggtcgtcacgtgcccggaccccttgtcttcccccgtacagtgatcgcctccctggcaatcgagcccttgttgtctcccacccctcctagtaaccacgtcagagctcctctggctctttccgcgcaccctgcggtttccccaccatctccctctcccaccaattgggtggtcgactctgaagcctccttccacactactcccacaaatagttcgttattccactcccatccaccacacccctcacatacttcctccatcgtcgtaggaaacagttctaccctctcggtcacctcagtaggtgcatcggttcttccatgaccattctgccttaacgacgtccttattgctcccggtctggctcatccccttctctcggttcgtcgcttcactagtgacaaccactgttctatggagtttgacccctggggactcaccatacgccatcttctcacacatgttgtgatcgctccctctgacagctctggccccctctattctcttcacttgacctccacttcccccaccagagtagcctcatctcctgctcttactactaccaccacatcacatgctcttgctactaccaccacctcctccaccatttggcaccgtcgcctcaggcaccctggacctgacgtgatgtcccagctttccagccgctcagacatatcctatacccggggctcatctgagcgcctctgtcatgcttgtcagctaggccgtcactcccgtcttccattttccactttcacgtccagggctgttcaggcctttgatcttgtccattgtgatctctggacttctcttgtcctcagcctctctggctataaatactacctggtcattctggacgactactcacattttctttggactttccccctccggctgaagtccgacacgttcaccaccctcacccacttctttacctgggtctccacccggttccgtctcccggtccgtgccctccagtgtgacaatggcagcgagttcgacaacaacgcctctcgatccttctttctcacccatggcgtccagttgcgtctctcgtgcccttacacctctcctcagaatgcccgggccgaacaaatcattcgcaccaccaccaacatgatccgctgccttctcttccagacgtccctccctgccagctactaggcagaggccctgcacaccgccacacatctcctcaaccgcctcccctcgaaggcggtgagccaccccactccccactttgccctgtacggcacagccccctcctacgaccaccttcgcgtgttcggctgtgcctgctatcccaacacttctgccaccgctccacataagctttcacctcgctccactcgttgcctcttcctcagttactcctctgaccacaaggggtatcgcttctcatttctcgtcacgtcgtttacgacgaagctatgtttccccttgctggctcctccccacccaccgatcttgactccctccttgagtccgatctggtttcccctccacatcaggcgccccgtcttacaccgctgcccacaccacgcgcggcctcctcgcctccgctcgcgcccattcccgcgcacgcggccccgtcgacaccccctgcacatgcgcggtcccattgaccttgcctgtgcctcgcgcggccccatcgacgagcgggactcgctttgctgaccccgccctcgtctaccgccgccgtgggagcgctcctccctcggcgcccacggaccccgggcccctcgacgagcgcggtccgattggccaaccccgtcgtcgtctaccatcgccatgagtcggccacacctatggcccccgccgtcccggtgactcgctctgagccgccggtgtaccacccggtcaccattcaccgggaacccgggcacatccacccgatggtgactcgacgcgccacaggtgtctttcggcccgttgacaggctgatactgaccgctgatacgaccactactccaccaaacgcctccccggtcccctcctctgttcgcaccgccctcgctgacccacactagcgtcggtccatggaagagtatgcggccctgctagccaaccacacctgggacctggtgtcgcgtcctcctggcaccaatgtggtcaccggcaagtagctctttctccacaagctgacttcagatggcaccctcggccgctacaaggcccgttaggtccttcgggcttcactagcgcctcggagtagactatgacgagaccttcagccctgtcgtcaagttcgccaccgttcgcgctgtcctcaccctcgccgtctcccgggactggtgggctgatgctggacggggttggtggagaggtacatggcgctgacgttgtcacaatagacaagggtgctccgtgtcagccgacagtgtagctcctggagcagctaacgaagccatgccaccttggcaacgccgttggccacaacgcggtactcggcctcggcgctggagcgggagacgacgggttgccgcttcgaagaccaggagacaaggttgtcgccaaggaaaacgacgaaaccggaagtgggccgacgggtatcaggacaaccaccccaatcggcgtcagtgtagacgacgaggtcgatggtcgcagatcggcgaagaaggccgaagtcggtggtgcctcagaggtaccgaagaattcgcttcacaacggtgagatgcggctcccgcgggcgtgcatatgaaggcacacctactggacggcgcaggcaatgtcggggcgagtgaagacaaggtattgcaaagccccgacaagactccagaaacgctgagtacaggagatgtccagacatcacagtggataagatcaaaattgcctactgctctagaagagggggaagaaaaagaaagtctcacatatctacctaactgacaggcatgacacaagtggtcaaaagaaccccgactacaagagatgacaaaactgatagacaactttgacatcacatcacgcccgagatggccaaggcggcggtgccaagtgatggacgaggtagcagcggtcagcgcatgtggggtggaggtcgaggaagaggcggcaggcaggcgaagggtataaagtggcacggggctgtcatagcgggcgagaagggtcctcatagcaagatccttcacagacaagccaaaggggtcaaactccatagaacaagagttgtcagtggtaaattgacgaacataaagaagactatgaatgatgttgggggcaacaagaacatttctgaggcggaaggggaaaggaaggaccgcatcacctactgaggtgacggggatgaccgacccatcgccaatgacgatggaagacaagagagagggatgaggagtgagagtggaagtaccgacgtaaggggtggtgtggtagaaagcaccggagttagccacccaatctgagaccgaagtgggcggagcgagagtcattgtgctaaaggacctagcaagagactgtgtcccatccgccaccccaagggccccacgagtgtgcaggggaggtgggcagtaggggcaggagacccggctggaggcaaggtggtgtcagggtagccggaagcgctaacaagggtggagcagcgtagaagataggctgaggggaggccgagcgtggcccaggagggcccgcaggcagtgcaggccacatggagatggagccagcccacgggttgtagaaggatggcgaggagccagggccccgagccgcaggaggaccaccggggctgccgccgtgaccacgacttccatggcgacgacgaccaccaccgtcggagttggtagtcgggcgggggcggtggaggggcgctctggcgaggggcaccctcccggaggcaggagtagggacccgcgggacctaccctccggggttggcgctgtagagagctgtcacggcgtgggtggtggtggcggccgcagtcgtgagttcctcgagtaaaagatcatcacgaacccgagcgaaggacgggaacggggtgatccgcgtgagaatggcccgcaggtgcgcgtagcgaggactgagcccgcgcagtaggttgagaacgagtgtctcatccgtgaccggggagccgaggtcacagagtgagtccgccacggtcttcatccgccgacaatactcagtgacgaagagatccccctggacaagctgacaaaaagcggtgtccaggtggagaatccggacctggcagttgccgaggaacatggcctcgataacaacctaggcctatcgagcggttctccctgctcgcgtatgttgtcctgcgtctcgaccgtgagggtgccgaggatccaggtcaggacaacgctgtccatccgggaccaggcgtgcgtcgacaccaccgcgtcggtgaggacgtggtcgtcgagggcgtagcggtggagggtcagcaggacctgattgcaccagcgagtgtactgggccgagtcgggggcgaggacgacagagactagcgcccgaatactgggaagtcccgccgcctgagcatggagactagcgatgatcgacgtgtcgggagcatcgtcatagacatcatgcacggattaggaggcatcgccatggacaccagcgagcagatgagggggcccgagaagctggcgctcaagggcatcaacggtcgcactttcctgctcccaggcgtgggcggcagcctgcgcacgctgacgggcagcggcgatggcgacggtgacgtcggtagtacgaggacgttgagtagtggtgagtgccgacgagtggatgtagacaggaggcgggatgtcgaaccccccccccccccccccgaccccaggcagggcaggagtgccatgatccgcactcgggtacgggaagtgcgaagccaggagttcggcacgacgggcggtggtggcgtgggtcttgggtgtggcggcccgcaacgtagccgcgtagagggcagcgagggacacgggaggtgccgagggtgcgctgctgttggtgggaagggaggtgagcgcgccaggaatgacgacgagagcaccggtgaaggagtcagcgctggtggggtcgccagagaggacgtgggagagggggaggtgacctgcgatagcagcactcggagggaagggctcgctggccgctggcggcgcaggccggggcatcggcggcggtaaagacaaaccccggtggcccccatgcgcgcggatgggggagttcgcgaccggccatgttggcggcacacagacagggtgggggagaagcggcggcgggggagaaacccggtgtggccgaggggagcagcgccggcgggggagaggtctggtgcggcctgccatgggcgggcgacagacggcgtgccgacggaggagggagcaacgccggcggctacagtggcggctggggtggggaagaaatctaaacctagctgataccatgttagaatagaaaccctaaccctaaatggggttgaatgttgtatttaggatagagtcgataggcctaagcccgttacacaagagcccattacaaggaatacacaaatactaacaacctcattgcgccctagtgctcccaagtgggtgatcaaggcaattgacaagattaggcggggttttttatggaaagaaagaaaggacatcaaaggtggccattgtctggtgggatgacaacgtgtttgcaggccccgcgatctaggagggctaggaattcataatcttgagatgttagggtgggcactaaacatgagatggctttggttgaggaagactcaaccggaccgcccctaggcaggattggacctacagatttgcccatgtgcggaggggtttgaaccggctagacgtatttggaaaaactgggtgcctcctaggtgcaaattttttctatggctggcttctctaaatcgttgtaggactgcagagcggctggcccgccgcggtctagaccaccctgagcattgtcctgtgtcctctatgtgatcaagaggaagagaccgctcagcatctcctggtctcctgcgtgtttactagacaagtttggttcacggtgctctctatgattgggctgcagcagctcactccacaacagacagcgaccatgttccaagattggtgggaaaaggctgaattgagagtacccaaggcagcaagggataattttaagtcactggttggctgattgctcttgtggcttggtggctctggaaaacgaaacacatgtgtattcgacagctatggtgcatggcgggagctacggggcttaggagaatttttccttagttcacagtttgttgccggtctaggtgtcaaatttttttagaatggattcttttgtatatattcggttttggcctccatgaggcggtctcatttgtactagtctattttggaccaccattttcttcttaatatggtgatgtgcagttctcttatgtatttgagagaaaaaacggtcaaggaaagtaacatcagcaacttgacaacaaatatttcacctgtctagaataatgctctgcatctcttctcattccagccatttcaactctcattttctgtaactcagcctgcatcataaaaataagggtgcaataatgtgctatgtgtaaatacaaaacaatacccttaacaaagctgatcatgaaaataaaccttgatagtcctagctacaacttgaaaaccaaaccatgcacatccagcagcacgacaaaaatctgaggaaatggtgaatctttagttgagttatgaaattaatgtcacctccaacgatgatatctttgcttctgcctctcgttggctttggcgtgca

SEQ ID NO: 9893 - DNA, 3026 bp, Zea Mays
atggcggtagcgccggtggtgcgccagcagagccttacagagggattgatttcctgtaggactgatgttcaatgtttgcatagatggcagaaggttttgaaccctgagcttgttaaagggccttggtcgaaagaaataactactgatgtgaaacatttcgatgtgacatcttcatttagatggcacaaccatcttaatcctgggatcaataaggacgcatggacacaagacgaggaaatcaggctcatccatgctcatcaaacttatggaaacaaatgggctgaattgacaaagtttttaccaggaaggacagacaatgcaattaaaaatcattggcacagctcggtgaagaagaaagttgattcatacagatcatctggtttactggctcaatcccagggcttcacacctgttgaatacactgctggtggtttaaatgttgattcttcatctgcaataaccaatcaaattagcgaaggcagtggttttaatgtttttcgggaggctgaagattcgatggagttaagtcagtcttcgtttgccaagggttcttgctctcaggaggagcaaaatgatgtgactttgggatctcatttgcatgtgcatgaatctttgtgtccagatggttccactaatgatggcaatggtgcttctggtttacctgacattcatcaccgcttatgcacttctgacatggatcaagataaacacttgcaggaaggaatggatttggataaacacttgcagcatgaattctctcaaggaacggatttgcatcttgatgtagatgaagtgccaaacaactttgtgataaaaggtagccagtcatctaatgagcttgcagttcaatttcatgacacagagattatgaatagttcaaaaaatgatggagtgtctttggtaccacatgctataacaccatgtgttcccatcttacctagtgtttctggatgtgtgcataacataaatgtgatatacgaaatgggcataaaaaatgataattgtttccaatctgaaaagtgccaggatatttccattcaatcaggtgcatactcgtctgaagctgcaggcagctttttagcaccactttacccattgcagacatctgaaccagcaataatgatgggtggccctgtgtactatcagagttctgtaatgtcattaccaccaggctttatttcttctgatggtgcttctaatgcatctggtgtcaaatctgagacaagttactatcctgtttctcgccaaaatttggagattaaaacttgccacaatgcttctggtgatcctgaacaaaattcatatattagcagcgaagatgacagaaacaagacttctgaacctatgggcagaatatcagaatctgaaaagaaacagcaagttgatgttgaacaatcatgtttggagcctgcagcctgcattggaaaggaagcattatctagtcatggtgacaccatattaagtaaaaaggaggatgctggagctctatgctatgaacctccttgctttcggagttttgaatttccctttgtcagctgtgagcttgtaaactccagcgatctcccagaatatagtcctcttggcattcgagagttgatgaggacatccttgaacttccctaccccagtaagattgtggggctcccctactagggatggtagccctgatgctgtgctaaagaatgctgccaaaagattcatgtgcaccccgtccataatgaaaaaaaggcacagagatcttttatctccagtttctgatataagaactgacaagaaaccaaatactgaaagggattttatgagctcaggcatatcctctacaagagttgggaaatcttgcatggatagcgctgatgattcagctgatttagtttcaccgaaagagagtgcatttcaaaagaagctgaagctttgtcacgaaaacaaagaaaatttgaatgaaattgctgatcaaggagaaaatgaagccaatgcaaagcattcttcagggattcttactccgagcagtgttgacaaccataatacacataagcatggtccaaattttcgaattcaggagctaaataccactgtacaggctttgtctaactctaaagacataatattttctagatcaaagccatcagaacatgttgaaaaatctgcagcctgcattgatgcagattacgagtatttgaacatattggctgatactccaggtattaaaagaggcttagaatctccttctgcctggaagtctcctgtgttcacaccattccaggatgcatacttcatgagcccagcaagcagagcttttgatgccttaggattggtgaagcagattaatgagcagagtgcttctgctgtggaggaagcacatgaagttctggcaaatggaagcccatggaaacaacataacaaggaaaactctgacaaagaaaatatagaaaatacagctttgaagcatgagcatgtcacaagcaaacctccatcgatactcatggtagaggcacgggtgctcgatttcaatgaatgctccacacctgtgaggaagaaagacgataagaaagtggaaatagttttaggaggacctgcaacatcccctgttacttcctcgcatctttggataaatatgcggtagccctttgaggttgcgacatcgcctggcgctggttgcaagtcaccatgggcagcatgccgatgccgcgccgacgctcccttccccagtccctatcgccacgccggtgtcaccaccgtccgttgggattagggttgcgtgtgcgtcatgtcgcacgtcaggcgtgcagagaggcaacaaccctccaatcaggctaaagattgttgggtccgatgggccacatgatagagaaagaggctggttgatatgaaattttggtccaaatagctataaaacattgttgttttttatgtttttacaatattttagtgtgtatacattgcatatacatgtttacataatttgtttcaccaaaaataattggtattcaaatgaatacctttgattcaatatgggctcgcccctgcgat

SEQ ID NO: 9894 - DNA, 3143 bp, Zea Mays
gcacgccgctcatccaagggcaactggactctagaagaggatgacatacttcgcaaagctgttgaaacctacaagggaaaaaattggaaaaagatagctgaatgttttccaggtaggactgatgttcaatgtttgcatagatggcagaaggttttgaaccctgagcttgttaaagggccttggtcgaaagaagaagatgagatcattactcagatggtaaataaacttgggccaaagaaatggtcgaccattgcccaagctcttcctggacgtattggaaagcaatgtcgggaaagatggcacaaccatcttaatcctgggatcaataaggacgcatggacacaagacgaggaaatcaggctcatccatgctcatcaaacttatggaaacaaatgggctgaattgacaaagtttttaccaggaaggacagacaatgcaattaaaaatcattggcacagctcggtgaagaagaaagttgattcatacagatcatctggtttactggctcaatcccagggcttcacacctgttgaatacactgctggtggtttaaatgttgattcttcatctgcaataaccaatcaaattagcgaaggcagtggttttaatgtttttcgggaggctgaagattcgatggagttaagtcagtcttcgtttgccaagggttcttgctctcaggaggagcaaaatgatgtgactttgggatctcatttgcatgtgcatgaatctttgtgtccagatggttccactaatgatggcaatggtgcttctggtttacctgacattcatcaccgcttatgcacttctgacatggatcaagataaacacttgcaggaaggaatggatttggataaacacttgcagcatgaattctctcaaggaacggatttgcatcttgatgtagatgaagtgccaaacaactttgtgataaaaggtagccagtcatctaatgagcttgcagttcaatttcatgacacagagattatgaatagttcaaaaaatgatggagtgtctttggtaccacatgctataacaccatgtgttcccatcttacctagtgtttctggatgtgtgcataacataaatgtgatatacgaaatgggcataaaaaatgataattgtttccaatctgaaaagtgccaggatatttccattcaatcaggtgcatactcgtctgaagctgcaggcagctttttagcaccactttacccattgcagacatctgaaccagcaataatgatgggtggccctgtgtactatcagagttctgtaatgtcattaccaccaggctttatttcttctgatggtgcttctaatgcatctggtgtcaaatctgagacaagttactatcctgtttctcgccaaaatttggagattaaaacttgccacaatgcttctggtgatcctgaacaaaattcatatattagcagcgaagatgacagaaacaagacttctgaacctatgggcagaatatcagaatctgaaaagaaacagcaagttgatgttgaacaatcatgtttggagcctgcagcctgcattggaaaggaagcattatctagtcatggtgacaccatattaagtaaaaaggaggatgctggagctctatgctatgaacctccttgctttcggagttttgaatttccctttgtcagctgtgagcttgtaaactccagcgatctcccagaatatagtcctcttggcattcgagagttgatgaggacatccttgaacttccctaccccagtaagattgtggggctcccctactagggatggtagccctgatgctgtgctaaagaatgctgccaaaagattcatgtgcaccccgtccataatgaaaaaaaggcacagagatcttttatctccagtttctgatataagaactgacaagaaaccaaatactgaaagggattttatgagctcaggcatatcctctacaagagttgggaaatcttgcatggatagcgctgatgattcagctgatttagtttcaccgaaagagagtgcatttcaaaagaagctgaagctttgtcacgaaaacaaagaaaatttgaatgaaattgctgatcaaggagaaaatgaagccaatgcaaagcattcttcagggattcttactccgagcagtgttgacaaccataatacacataagcatggtccaaattttcgaattcaggagctaaataccactgtacaggctttgtctaactctaaagacataatattttctagatcaaagccatcagaacatgttgaaaaatctgcagcctgcattgatgcagattacgagtatttgaacatattggctgatactccaggtattaaaagaggcttagaatctccttctgcctggaagtctcctgtgttcacaccattccaggatgcatacttcatgagcccagcaagcagagcttttgatgccttaggattggtgaagcagattaatgagcagagtgcttctgctgtggaggaagcacatgaagttctggcaaatggaagcccatggaaacaacataacaaggaaaactctgacaaagaaaatatagaaaatacagctttgaagcatgagcatgtcacaagcaaacctccatcgatactcatggtagaggcacgggtgctcgatttcaatgaatgctccacacctgtgaggaagaaagacgataagaaagtggaaatagttttaggaggacctgcaacatcccctgttacttcctcgcatctttggataaatatgcggtagccctttgaggttgcgacatcgcctggcgctggttgcaagtcaccatgggcagcatgccgatgccgcgccgacgctcccttccccagtccctatcgccacgccggtgtcaccaccgtccgttgggattagggttgcgtgtgcgtcatgtcgcacgtcaggcgtgcagagaggcaacaaccctccaatcaggctaaagattgttgggtccgatgggccacatgatagagaaagaggctggttgatatgaaattttggtccaaatagctataaaacattgttgttttttatgtttttacaatattttagtgtgtatacattgcatatacatgtttacataatttgtttcaccaaaaataattggtattcaaatgaatacctttgattcaatatgggctcgcccctgcgat

SEQ ID NO: 9895 - DNA, 1113 bp, Zea Mays
gtcccgcctgtccggtgtcgcgtgccgaggctgtgaggccgtcgcgtctcgcgtcactggctccccgctcctcgcagcaccaaaaacgcggcaggccgagaaatgttcccgaccgcgaggaccatgacaccgagcaggagacggaggaaggggagcgggaggcggtggcggttacccgcgcctgcacctggcttcaagcctccgatccgcccaagaattcagtggaatggaagatatgacatatgccagaaccgagaaaatgtttggaaagtgagaaggtgctttgtattgggtgttaaaggactactatgtctgctattaaacatgtagaagaacacatttcagcataatctagtctacataagaatgttgacagcaagctgaaaaaagttcccatgaaactggtatctgtcaagaggatcttgaggtgaactgactgtactgtacccattagccggcaattacctaacgtttggtaagcatgtagtccccaccagaaagtaaatagaagtgggtgtagccaatacaacatctggtacatgtcctaaaatatgaaaaatttcaggtaattttaaagtgtgatgggctgttgcatacttgtatgtagtttgatttgatgatagcttccaaaattttttcataagatcttttcatcgtcactaatactgtccagtgtctaaagaacacataattttttcatcatataaataaaaagaggcattcactggcctttgcctcagccctggactcctggcattcacttgtaggtagcaaccgtgtgacaattctatgtgtgaagtaattggatggacactgaactgttcttatgccagtcaggatcactgaggcccagaataaaggcttcctttgttcattccaatccttaactggcagtcacttgcactattgagaatgagaatagatcgtctctgagacttggaactctatataggagtcagaggcaagagtctagttacccatttcgatgtatcatcatcactgtagttgagtatttacatggcgcggcgtgacgaggaagatatctgttccgccaacatcagcttggtcgtctttgagctcatcaatcaagcacgcgttgcattcaagcatcat

SEQ ID NO: 9896 - DNA, 3476 bp, Zea Mays
gtcccgcctgtccggtgtcgcgtgccgaggctgtgaggccgtcgcgtctcgcgtcactggctccccgctcctcgcagcaccaaaaacgcggcaggccgagaaatgttcccgaccgcgaggaccatgacaccgagcaggagacggaggaaggggagcgggaggcggtggcggttacccgcgcctgcacctggcttcaagcctccgatccgcccaaggcatcataaatgatgaatatgggggcacattgtatgatggattccttggagtgctaaatgctactccggggttgtcccaaatcatttatagcttggcaggagtagcaacaggcatctattcttcactgtcagggtaaattaccttcggcagtctccactttatataccacatgcttcttcaagcacagtgagcatttcctaattcctattataccgcttaacaataatctcgaaggagaagtgcaatttctttgtcttccttcgtaccagacaacccttcatatagttatatgtaattgaatgtcgtcaagttttgtataagctggaagtttatttttctgttttctcatagtttgggaagaaagagatgcctgcttgtcaatggtagtgaatcatgcccgatttaggtcaatttatggttggatttatctcacctacaaatatgctttctatccttacactattagttagctttgttactcttgtggcccgaacctgtcagtttaagtatttcaatatttttgcctaagcctatagtgtgatgatgagaagtactacaacaataagctggagcttgaatggtccagtgtgaaagtaagttttcaactgaaatccttgaaatacattagacttgtgatctttttacaagcttaatgtaaaacgcattaagaaaactgtatatgcttagcagaaagtgattgattggtgtagaagttcttttcagttgacgttaaagcttaatggagatcaccgctcaggatgctaaatgaagtagaaaatagtgcccagaaataagtagtaggaaaaaaaactattctgttttaggataaacttctgagtggtagcaatatattttattttcggagtttggatttattccaacacagtgagtagtctgggttaactgtggcttcagagctgtgtttgctatcacttttctgactgtgatagtgtgatatgatctttttgagtaaaagtttgattttatcaactttctgattccgacttccaccacggttgattagtagatcatacacagacatttcgtgctatctgtaaaatctgatctggaacttctttgcctattgaaattttgtagttcttcttcattgaagaaccgagaaagttatatcattgtatatatgcattcacactactatatgagtatatttttgttgtgccttttgctacaactttgctgtggttttcgattttcatctctaccgcaactttgcttgggactcaaatgttatattgtgttgctatgacgccagatctgtaaatgttacctataataataaatcttacatatacctagaggtggtaatggatcatgatctaaatgcttcttcacaaaatggtaaggttctaaataatttttagtttaaaaatgaatagaaatagagtttgatcctaatctgatccgatacttaaatcttatagtgtaaaatttagagcccattatcacccctacatataccatgtacaactccattgtttttctcgaatgacacattcatagttttaggtgttttgataggcaaatagccctcaaataaataaccagaaactcgcacacacaagacaaacacagtgggtttggtgactggactgacttagccttttctgattctctctctctctctctctctctttctctaggcagctgtgagctacattttaagatttgatagccttctaattaatgcagaatattacacgcttaatcagcctattactgctaatctgctattccttcatgctaaaattaagctaaagataagtctatgaacctagacactagtgtgcacctagacacacaattactctcgacatgtttaactatggttgcatggaatggattgactaatagtcattagtcaatggttttaatggctcatgtagtgattgtggctaattcaatgggtgtaaatcataattggtttatgaggagagatttttttaaaattttagcgtatatatgtaatactgataaaattaatgatctagcagacctaccatgggtgttaggacaagttttttagattttgacactggcagcaatcctccatctctgaccaaatttaattatttcttttgctccatatatatacataatgctttagtttttttttatcgtgattggactttattagttgcatgcttatttctctgacatcacctccaacaagaaatcaatagtgacaatgttgtcttgaggatgcaaaacatgtaaagaccaaaactggctgccaaaatgacatccatttcaaatggggagtagtaattacttagctattgtttgtttcctaagatctgcatttaaattggtgaacatattgtttatcttaatacttgccacacattgttttgatcttattttctcacatagtcacatacatataaacagccataactcataatagctctagaattcctgcaagactgatcttcagtgttcatgacaactttatggcttatgttctgatgtagttcgttacaaatagaaagaatcacacttcagaatgccacaaattttctgatagccatgaatattgcgtgtctgatattgtttttgtacatgaagggagcatgcttctttaagtacatggtatggtactccctccgttctaaattcaaagtcactttgacttttttggtacatagattttgctatgttatgtctagatacatagcaaaatttatgtaccaaaaaaaagagtcaaagtgacttataatttggaacaaagggagtagcctagaacgaccttgcttttcctttcctgcttctcatatcacaaatcaaatggatcatacaaaattttggctggccatttaatcgagctttggttgcaaagattatttcatattttgaagacattgctgccgattttcagaattcagtggaatggaagatatgacatatgccagaaccgagaaaatgtttggaaagtgagaaggtgctttgtattgggtgttaaaggactactatgtctgctattaaacatgtagaagaacacatttcagcataatctagtctacataagaatgttgacagcaagctgaaaaaagttcccatgaaactggtatctgtcaagaggagtcagaggcaagagtctagttacccatttcgatgtatcatcatcactgtagttgagtatttacatggcgcggcgtgacgaggaagatatctgttccgccaacatcagcttggtcgtctttgagctcatcaatcaagcacgcgttgcattcaagcatcat

SEQ ID NO: 9897 - DNA, 1051 bp, Zea Mays
agagggtctagcactgctaatctcctctatccaggctctgctagaactggtggaagcagtttgtacgggctaaccaagaagatgtggctgaggataacgctatgcttcttcctaggtcctatggtgattgtcatgtacccagatagtcattggtaatcggagctccgaccgagggactgcaaccgtgctctgtgaccatgtccaggtcgaggggttcagctcgggagccttctctgacctcgtcatgagggttcaattcgatttgcatgtcattgcaccaaacaagtttatgcttcgtctgcagccacctgacttcaagacaaggaaggtgatgagttgcataggaactccgatgtgctagaaatcctcatgaataccaggtttctaatggtctatgtgcagtatgagcgttcactagaaacaatcataggacacgatcaaatcatctggctcgggggcctaaattaccgaatcatgctttcccatcagttagtgaaggcccttgtcgagatgcgcaattctagagaaagattagggtgatggtttttgcattatcggttctttagcgtgtcgactgtatattttgttgaaccatggctttcattcaagatttttgaagatctatctagaacttccaccaatagtccaaccattacaaatggaagaggatctagagcaactgaaagtttttgaaaacagctatcggatgaaggtgatcaaagtggagcaaaatgcccgtggtgtggatgcacctgaggtgcattgagaaaatcgaagcgctgacgtgagcgagaaatatccagtagaaaatgatggcagagcgagtgctttgcattgctatcagtgtaggcttgataggagacttttggttgtgatatcttattttctaaatagtatgataccagataggggggccgtaagggcgccttttgctctagtattaggctgtctccagcaacgtctcctaaatttcgtcctttaaagtaatattctttatcatttacagcatcctctaaaaaattcgtcctctatattttcttcatctccaaca

SEQ ID NO: 9898 - DNA, 2110 bp, Zea Mays
cctttgatctgcaagagggtctagcactgctaatctcctctatccaggctctgctagaactggtggaagcagtttgtacgggctaaccaagaagatgtggctgaggataacgctatgcttcttcctaggtcctatggtgattgtcatgtacccagatagtcattggtaatcggagctccgaccgagggactgcaaccgtgctctgtgaccatgtccaggtcgaggggttcagctcgggagccttctctgacctcgtcatgagggttcaattcgatttgcatgtcattgcaccaaacaagtttatgcttcgtctgcagccacctgacttcaagacaaggaaggtgatgagttgcataggaactccgatgtgctagaaatcctcatgaataccaggtttctaatggtctatgtgcagtatgagcgttcactagaaacaatcataggacacgatcaaatcatctggctcgggggcctaaattaccgaatcatgctttcccatcagttagtgaaggcccttgtcgagatgcgcaattctagagaaagattaggtgagagcttggtaaccctcaggtttcttttggttacccagtagtccagctaccaacacttgaaacaagctcttcagatgagaagcagcagaagcaacttttctttagaatctacttggtttctaaggattgtcagcatcataagttttccgccacatcctttcttataggccttgaaaagtcaggaacggccctgacactgacattctctcgtctgcgcggcgtacattctcctagccgccatcctcaccatgccgctgcggatcccgcccgcggtatgactccctcctcacctacgtggccacgcgcgacgcagccgcaacgacctaacccccatgtcgtcgctgacctcgcgtcccgtctcgctgctacgatgccttcgtggaagcttgaaggtttcacgacatatctctgtggagcagattggcatatgtgaaattgataagacggtggtagatgtaagatctcgcttcctgtatgtgcataatactgtgcagtgaccactgatattatgttttattgacttttagatgtttgagagcatttgctttctgttagatttctctgaacaccaataatttggtctatgtgtctttatctacattcagttgaggaatgcaattgattttactgatgtcacttgatttttcgacactgatgttagctgctcctactatgccttcttcaatttttaaaatgcattcattttcgtattttggtactacatgatatgaggacagcaaatgagatgactcatgacgtggttaattgagattcctttagtcttctgaatttccttcttttatgttatttgcttagtaggttgggttggattctgtgaggggtactgattcatgattaaaattgggtggacaggaggcatatttttgtaaaaggacaacaacagaggattgttcatttgttccttctcaagggtcatgctattttgcaaactaggttacctaggaaaatatatgctttatgattcacaagcaatgggattgcttttttgttaatatgatttcttgtattgtgatcattggcagggtgatggtttttgcattatcggttctttagcgtgtcgactgtatattttgttgaaccatggctttcattcaagatttttgaagatctatctagaacttccaccaatagtccaaccattacaaatggaagaggatctagagcaactgaaagtttttgaaaacagctatcggatgaaggtgatcaaagtggagcaaaatgcccgtggtgtggatgcacctgaggtgcattgagaaaatcgaagcgctgacgtgagcgagaaatatccagtagaaaatgatggcagagcgagtgctttgcattgctatcagtgtaggcttgataggagacttttggttgtgatatcttattttctaaatagtatgataccagataggggggccgtaagggcgccttttgctctagtattaggctgtctccagcaacgtctcctaaatttcgtcctttaaagtaatattctttatcatttacagcatcctctaaaaaattcgtcctctatattttcttcatctccaaca

SEQ ID NO: 9899 - DNA, 4843 bp, Zea Mays
gaacgaatgacaatcttttgaagacgcccactgccaattctctgcctttgtcatgtacaagagcacaatggttgttgtagcatatgaaccctgccgtggttattcatactaaatgtgaataacagaattcttgctttgtttgtggcctttgatctgcaagagggtctagcactgctaatctcctctatccaggctctgctagaactggtggaagcagtttgtacgggctaaccaagaagatgtggctgaggataacgctatgcttcttcctaggtcctatggtgattgtcatgtacccagatagtcattggtaatcggagctccgaccgagggactgcaaccgtgctctgtgaccatgtccaggtcgaggggttcagctcgggagccttctctgacctcgtcatgagggttcaattcgatttgcatgtcattgcaccaaacaagtttatgcttcgtctgcagccacctgacttcaagacaaggaaggtgatgagttgcataggaactccgatgtgctagaaatcctcatgaataccaggtttctaatggtctatgtgcagtatgagcgttcactagaaacaatcataggacacgatcaaatcatctggctcgggggcctaaattaccgaatcatgctttcccatcagttagtgaaggcccttgtcgagatgcgcaattctagagaaagattaggtgagagcttggtaaccctcaggtttcttttggttacccagtagtccagctaccaacacttgaaacaagctcttcagatgagaagcagcagaagcaacttttctttagaatctacttggtttctaaggattgtcagcatcataagttttccgccacatcctttcttataggtgattgtttgatccccaacctagactcaaagaaactttactgttagttgcagaattgatgctcagttcctttaaaaatgtctcttatagatggaatcggaacacacttgtgcagattagtatcacgatgtaattatttttatttataataatgagtattatttattcctagagttctcagtttttcttgttgtattcaatgaatacgccgttctaatacggtactcttcataataatatgcatgtttgtcagtcgttaagggaacttacaagctaaagaatttcacaactgctgttaaatatgattagaatttatccttagaaatgaccagacatcaaggaccatttactacagtctactaatctatacatgtaggcaagaaactgcacgtgggtgtcccattgagcctcttcctttttatgtcaaatatttctttcctatattttcttgtctttgacatttttttgtcgttcatatttggcctgtcattagagtgcaaagaaactccatgtgggtgtcccattgagcctcttcctctttatgtcaaatatttatttcctatgagagccgcgtcacctattatttttgccagaggtacagaaaagtctccttttattctagataccatttttggaaattcaatgctggattacatagttcataatatcatggtttcagtgtccagaatggagccgctaataatttgtcaactagatcaactaaagaaaaattgaatcagtctcaagcacaatcgtttaatagtgtgaaaattggatgaaactaatcgatcaagtgaagaagacaaaggaaaaatataggttttgttttttgccggtcagcaggtgtttagagaagaaattgaccggattaatagggtagacggtcgtactattaagaggggtcaatgaacttgatcggtgtaaaacttagtgcctcgtataatataaacggttgcatttacatgagggctaacaacgcttcgttttttaaaatacaaaatcttttgaaaaagcgcaaaaatatcaactctgtggttggtagaacgtccgagccaggaggccagctcgtccgcgactctgtcagagaagtctgctggcgccttgtctctgtctcccttcgctaccatccaagccaggaggctggaccgtccgcataaactgaattgagtttgggcagggaaagtgtgtttttgagtccttgcactatggactgtccggggtttttagccggacggtaagtggtccatgtgcagaccgtccggccataaaatggcggacactccgctcggattgttttaactgacgagtgctatgatattccatgttgacaggtcccggaccgtccggcccaggagggtggatcgtccaggcttgactttttctgacagcactgacaggtttcaacggtctttatagccgttactggtacgatggaccgtccggccatggggcgtggaccgtccatgtgtgcgcagaagttgtgctatttgcacataatgactaggtttgagttgtgggctataaatagaaatggagcttgtgtgtgagggctctcttgaccactcctagcatacattgagctcatttgtgatcctctaactcaaactctcatacttgttgcttgagatcgcattctagtgagtgattgagaagttctagtgcatttgcatcctttgagaagttctaccgcccccttccgcatactattcctccccgcaccaccgcagcaaacgtcggccccatcccgccatcttcctctccgcgctgcccctctccctgctcggatcggcacgcatggtactgttgtttctcctactcctctcttcttcgaggttctcgatctctcagctgaggcgtctgtgtcacctgccattccctagtagtctctccttcgggtgtcctaacatactcctctctccttctcgtgtcgtcgccccgaagcatgctactcctcgcgccaccgcagtttccgtgacccctccccgtttgtctccatggcggcgcggaatccgacttgacatggcggcattcttgacagacctcacccctcttctctgttagcaactctgtcggctagggcacgaactaacagtcgctagaggtgtggagaacgggaagatatgacatggggaagaagaagatagcagggaaggcgataatagaattgttatttttgttcttcgataccctctcctgtacagatacacgccatttatatatggacgcggtcacacaagtgtatcagtattgaggcccatattacatggcccaacgtggcccaaccacatttatatttggccaggggctggcgcactttgatctcctcgactgcgcttaagccttctcttctgccgcgtctgtttctgttgtcttgttcatccctttccacttatgattgcttgctaacagcttcatcgccttgtattgacctccagttgcctccccacttgccaacctatgtggtgaccatggcagtatgtctgaccagggccgtacctgtgggggtgccaagggtgcggccgcaccaggcccccaaaatcagagggtcccctagccactagacgctaacacttttttcctgttaaacctatctattctagacacaaatacgcaaagagcgatgcgctatcaactagtctcatttagattgttaaactaatgtctcaattgcttatcgaatactccatccgataaaaaatagtatttgttttagctcttgattttttatgtttatattcaactagatgatgatgaatccactaaagaagcaaaacaaattttattttgatatagagagagtattatttactatacacatgatggttgcatcggcagagagaagctttttaaaattgaaatatttttgtgaactatttatggtcaacaataacttaagagaggttaaacggcttgacgattctatatatcgaaaaaaagttgttggatgaaattgatctcaatgatataagcgatgactttgtatcacaaaatgttagaagatatttttaatgatatcaaataagaagtaagtgcttttagctatattttacatttgttatcttataagcatcaaaacagagcataataatttttatatgttaaatattcgatactgtatgtataattatatatatttgtgtgtggatggaccctccatatcggatttcgttcaaggccttgaaaagtcaggaacggccctgacactgacattctctcgtctgcgcggcgtacattctcctagccgccatcctcaccatgccgctgcggatcccgcccgcggtatgactccctcctcacctacgtggccacgcgcgacgcagccgcaacgacctaacccccatgtcgtcgctgacctcgcgtcccgtctcgctgctacgatgccttcgtggaagcttgaagggtgatggtttttgcattatcggttctttagcgtgtcgactgtatattttgttgaaccatgtaagctgtcgtcttctctcagtgcaagctttgtgggagagatggaacaattgtgatgattcatgggctttcattcaagatttttgaagatctatctagaacttccaccaatagtccaaccattacaaatggaagaggatctagagcaactgaaagtttttgaaaacagctatcggatgaaggtgatcaaagtggagcaaaatgcccgtggtgtggatgcacctgaggtgcattgagaaaatcgaagcgctgacgtgagcgagaaatatccagtagaaaatgatggcagagcgagtgctttgcattgctatcagtgtaggcttgataggagacttttggttgtgatatcttattttctaaatagtatgataccagataggggggccgtaagggcgccttttgctctagtattaggctgtctccagcaacgtctcctaaatttcgtcctttaaagtaatattctttatcatttacagcatcctctaaaaaattcgtcctctatattttcttcatctccaaca

SEQ ID NO: 9900 - DNA, 5034 bp, Zea Mays
gggcagcacaacagggtgaggtccgtcaatgcggtgcccgccgcccccggagagaggggaaagtgtacgagacgacaaacgttgaagccatggtcaaggatacggaccacacaaccccatgcgaaatgtcacttttgccctctggagttctgcctttctcagagcccaccccaccctcacggctccactcgagtattctgcacgaaaaagttaaaaatcaaactgaaccacgacaaagttcaagctcttctcaaccacagctcttacctttgtcacgatcatgatggagatcttaatagcagtattccacgttccgtttggttttagggactaaaaattaattcattcattttagttttatttagtagctaaattggcaaataagttgcaataaaacagggactaaactgttttagtctttagtccgtcaaagatctattaaatgagactaactcatattaattcaatattttgactctccttcatttgtccatggatcgctctggtcttgcatcttacaatttgttggtcagtttatataagattcctaatgttgtatctacatgtgttgcacaatattgatattttttgctatacactctcctgttgcagcccaaactataagtcctttatgtatctagaaaagctaaaacgacttataattaggaggagggtgtataacgctaatatttttttgtttcactatccatatttctttactgtcattttttactatattattggctttagacagattactatgatacttttcgtttttcttcaatagtgctcaacataatttaggatgagaaactggctcccactaattgttgttgcattgtccctctgttagttgttgcattgtcatttgttgaactacaggtgaaccatgaattaagacttgggatcatatcatcgtcattctctcttagtctctttcttgaaaaataattttttgtgcatggaaaaatgtgataaactgtgtttgaacaggacatatgtcaggcatcaaccaataagagggaaaagtggagacatggtttttgggacatatgtcactttttgggagggaaataggcttttttctcgatgttgaaacatggttttgtctttggtcacttgggctcatttcattagcattgtatggatcatcattggcagtaagaccgatgcaaccctactccttgatggcttggtacaaggcttcaaaatatctgaagtaagcaaatctgctagcctctcaaagtgagcctgagacctgcaaacctcaaagtgtcgggaattaagtgagacaatgtagaaggtgaaagaggcgagcatggcacaaaagtgtgaacaagcgacagtgatttgttgaacgaatgacaatcttttgaagacgcccactgccaattctctgcctttgtcatgtgtacaagagcacaatggttgttgtagcatatgaaccctgccgtggttattcatactaaatgtgaataacagaattcttgctttgtttgtggcctttgatctgcaagagggtctagcactgctaatctcctctatccaggctctgctagaactggtggaagcagtttgtacgggctaaccaagaagatgtggctgaggataacgctatgcttcttcctaggtcctatggtgattgtcatgtacccagatagtcattggtaatcggagctccgaccgagggactgcaaccgtgctctgtgaccatgtccaggtcgaggggttcagctcgggagccttctctgacctcgtcatgagggttcaattcgatttgcatgtcattgcaccaaacaagtttatgcttcgtctgcagccacctgacttcaagacaaggaaggtgatgagttgcataggaactccgatgtgctagaaatcctcatgaataccaggtttctaatggtctatgtgcagtatgagcgttcactagaaacaatcataggacacgatcaaatcatctggctcgggggcctaaattaccgaatcatgctttcccatcagttagtgaaggcccttgtcgagatgcgcaattctagagaaagattaggccttgaaaagtcaggaacggccctgacactgacattctctcgtctgcgcggcgtacattctcctagccgccatcctcaccatgccgctgcggatcccgcccgcggtatgactccctcctcacctacgtggccacgcgcgacgcagccgcaacgacctaacccccatgtcgtcgctgacctcgcgtcccgtctcgctgctacgatgccttcgtggaagcttgaaggtatgatgtcccttccatctctcttctttgatggactgctctttgttgttccagttcactactaatgtgggttttgcctattggtaggaaaaaaaattctttacatctgggatgtaaagaatctcttttacagcccctcacatacaccagctgctggtatatataaatagaagaaaaaaataaattactaaaagattattttgtaaattttgatctgtctttgtgggcctttaagtggtgcatgtgaggggctgtaaaaggtggtgttcacatgcggtatgtatagattttttttcccggtggtaagcctggtgcgatggcgttggtaacaaaaaaaaagtagaatgcacgctttatttattttgatgccaaaaattcgaatcgaaactgcaattggccgcttacaatattattgttgacaaaaaatgaaatgcgtgctagcatcatagctaacgatattatcatacatgttttggtacatttagcactaaaaggtgtgctctgatgctatttgcatcaattaaaccatctttaagaatatgtcattggttacttcatataattttgtcttgtaatttgtttgaacttgtaatgcctggagaagtctgcagtaaaaaattgttaggatgcagtcgtactgccaggttcattaattaggtgaatttaggtatttgtagttttcaaaatgatgaatatgtacacagatgaatatgtatattatctaaaatttattggatgtaacgttcaattgtttcatgatacacatgtgttggttattggaggggaacggtggtgttctgtgttaggtttcacgacatatctctgtggagcagattggcatatgtgaaattgataagacggtggtagatgtaagatctcgcttcctgtatgtgcataatactgtgcagtgaccactgatattatgttttattgacttttagatgtttgagagcatttgctttctgttagatttctctgaacaccaataatttggtctatgtgtctttatctacattcagttgaggaatgcaattgattttactgatgtcacttgatttttcgacactgatgttagctgctcctactatgccttcttcaatttttaaaatgcattcattttcgtattttggtactacatgatatgaggacagcaaatgagatgactcatgacgtggttaattgagattcctttagtcttctgaatttccttcttttatgttatttgcttagtaggttgggttggattctgtgaggggtactgattcatgattaaaattgggtggacaggaggcatatttttgtaaaaggacaacaacagaggattgttcatttgttccttctcaagggtcatgctattttgcaaactaggttacctaggaaaatatatgctttatgattcacaagcaatgggattgcttttttgttaatatgatttcttgtattgtgatcattggcagggtgatggtttttgcattatcggttctttagcgtgtcgactgtatattttgttgaaccatgtaagctgtcgtcttctctcagtgcaagctttgtgggagagatggaacaattgtgatgattcatggtcagtggatgccacttactccctccgcttgtttttatttgttgccggttagtacaaaattgaattaagtagcgtcaaataaataaaaatggaggtagtactattgagcagagctagaaagaaacgaagacttgtttgatggtgtttgactgcagaggctatgaacctgttgatatttccattggagctggctggtaggctgagtctgtatgttttttcttgatctatcatgaatgttaatgactgcttacacatacaaaaccaatgttttagatgtaaataattaatattttcatagttattcgattttcatagttattcgcattcaagaaatgaactctggtattatattcagtactgcagttttcagcacagctgttacttcactgaaactagaagatgcattcgatacgaatagagtgaagtgtgttgtggataatctgggctacgtgatattttttaagagggctgattccattcaataagtgaggcacaaatagctatttaactcttatattgactgtattttttcacatgaaaatcttctggccctgaccatttcagatcagggaacgtcaatccaaaaaatccatatcttcttcatcttggaatcgcataccttatcaagcttatgcttatttatttatatttgatacatggtcctttgattaaccgactttcatttggctaattaattgactaactgctctctctcacacagggctttcattcaagatttttgaagatctatctagaacttccaccaatagtccaaccattacaaatggaagaggatctagagcaactgaaagtttttgaaaacagctatcggatgaaggtgatcaaagtggagcaaaatgcccgtggtgtggatgcacctgaggtgcattgagaaaatcgaagcgctgacgtgagcgagaaatatccagtagaaaatgatggcagagcgagtgctttgcattgctatcagtgtaggcttgataggagacttttggttgtgatatcttattttctaaatagtatgataccagataggggggccgtaagggcgccttttgctctagtattaggctgtctccagcaacgtctcctaaatttcgtcctttaaagtaatattctttatcatttacagcatcctctaaaaaattcgtcctctatattttcttcatctccaaca

SEQ ID NO: 9901 - DNA, 2426 bp, Zea Mays
ggatgattttcgcctcggctgtgttaacagaactctgcccaagaatcgtcgaccaccgcgcacatcacctgttcgacgaaacgctccctcggacagcatatgtgttcgaccggtctacaagggcgacgggtcagccgccagccgccgcgaggttcgtgctgatccgagagctgcacccgctgggcacggagatgacacgggctctgtcgactgccaactgccatgccgccatggagatgacacacggacggacgagtggtctgtgtgccgacggatcaacctgatccatggaccaagatcaagacacacatgtttgaaaccacagcataggatggtgagcccaattgaagggctgctggataggcagaatccaagatgcaaaagcactcatggcctggtgtcccttgcacgcagcttcagcgaagctgcctatctgacatagatgaaattgttattgtctgctaaccatgttcaaagtgttattaccaattaagaatcagtggcagctagatgtcttgagacaactactttataccatacgcaacaatcaggagtccatcccaaaactgagaagatattcagtagcactggattttttttattatatgcgctcatggtagatgacacatgagaggtgtccgtctgtctgtcagttcttgattgtgataattttgaaaggcaatctcagggattttttttgttcaatcatggccagtgtgaattaaaataatgtactcattttactaatagagaggcgtccaatcaacgttaggttgctccacgcaagttggaatctttcttgtctgtacatgtgaagtgacttaactaatttatacaatcaacgttaggttgccaaattgtcactaaaccaaacggtacggtataattgtttttctgacttgttgccttgtctgtgcccccacacgcctctccacacacacacacacacacacacacacacactgctgcataactcttcttgtggcctggtctctgcccctttggctataaaagtagacttggcctcccgcccctctttgcacgagcacaactctgttttcctaatccgccttctggcgttataaggggtcgggctatgctgtaaaaaaagtgatcttagtgctatggcatggaattgaagatctgatctagctagccaggttttgcatttgggcgggggcagcaagctagaggcggcaactgcataacttgcgataaacttgttggaccatggtgtgctgatgattttaccgcaagttatgcagttgctgcctcaagcttgctgcctccctttgccaaacctgtaggaataagatgaagttcatccgtataggtatagaaaccttccatagccatgtatcctatatttaccatgagatgaaacagaagcaatgatgcaagaatgcaattttctccctctattctaaattgtagaccattttagcttttttataacatagcttttactatacaactagatataagatatgtctagatatataataaatgttatgtatttaaaaaagccaaaacgacctataaattaaaacagaaggaatataatctatcagattgttactcacctagctagctgctaatgtatggttgagttttcccccattgctgaaaaataatgaaatactaatgttgctgaggtttctatacgtaatattagttttgtgctctatacaagcagaaggtagtggaggatattgttttttattctttatgatttagtgattaccagatttacccaaagcatatattactatgttcagtaaaatatatacagtggtgtattattcaaacaatctgagctacgaaaaagagattagtagttaaaattattgtgtttcaaacctgtttatgtaatttcaaaatttaaaaggtgaaacataaaagtagattgtttttttaagtaaagattgtgtcagtgatgagaataggtaacttgaattaatgggccaatgcaaacaagaataagctcaatttactctagtgctttgaattgatgtataaggacatgtttgggatctctcaagtctcaacaagtccaaaccctaaacttcatatataccagctgtcaaaagcaaatcaactgcagcggctgtatggtcatatggacagctgccgacatgcaccatcaattatattcttcactggtcaaattatatactccctccgtttctttttagttgtcgttttttagttgtcgcgggatagttcaattttgcactatccagcgacaactaaaacgaaacggagggagtatgcccctgtttggttgggattctgggcggattctggccgccagaagctgaagccgcggccaaacgtctagcttctggaccagcttttgacggtcgcgcttcccacagaagccgcccgcgtacaggaaacgaaaagccgcccgacccacgcatcct

SEQ ID NO: 9902 - DNA, 2686 bp, Zea Mays
gcctctacgcctgcctctcctgcgccaccgtcttctgcccctcccacgctgccacgcacgcctccgcctccgcggggttagcggcgtttgcgaagcggtcgcggcaggcacggttcgcggcggttgggtgttcgtgccttgcggagcggtcgcggcgggcgcggttcgcggcgggcggttggcgggggcgggggtcgcggcgggatcgggcgggcgattgtggcagggcagtctacaacatagtcttaatagttagtacagatattgagggccaaatgcaaaaacccaccaggagcatccggcagagggtctgcttcttcaaaccactcgcatttccacatcaacatcaacacgaggccctgccgccgccgccgcccgcccgccccctcctaaaccccggcgaccaaccatggccttctccgctaaaccccactgctcctgctccaccaccaccaaaccccccacccccgtcgcccacctctctccacccccgtccctctccgtccgcgccgccgcctgcgccccgcgctccgcctatggcctctctgccgccggcgtgggcggcggcaaggcgtcccccagtaccgttcgcctccgcgctcgggcccagcgcatccgcgcgtcgcagcagcagccgcggcggcgccctgaatacgtgccgaaccgcatcgacgaccccaactacgtgcgcatcttcgacaccacgctccgcgacggggagcagtccccgggcgccaccatgacgagcgccgagaagctcgtcgtcgcgcgccagctggcccgcctcggcgtcgacatcatcgaggcggggttcccggcctcctcccccgacgacctcgacgccgtgcgctccatcgccatcgaggtcggcaacccgcccaccgccggcgctgggaccgcccacgtgcccgtcatctgcggcctgtcgcggtgcaacaggaaggacatcgacgccgcatgggaggccgtcaggcacgctcggaggccccggatccacactttcatcgccaccagcgagatccatatgcagcataagctcaggaagacgcccgagcaggtcgtcgctattgccagggagatggtggcgtacgcgcgcagcctcgggtgccccgatgttgaattcagccctgaggatgccggcaggtcaaatcgagaattcctgtatcatatactggaggaagtcattaaagctggagcaaccactcttaatatcccagacactgtcggatacactcttccttatgaatttgggaaattaattgctgacataaaggcaaacacttctggaattgaaaatgctatcatttccactcattgccagaatgaccttggtcttgcgactgccaacacattagcggagcaagacagttagaggtgactattaatggtattggtgaaagagctggaaatgcttcattggaagaggttgtcatggcaattaaatgtcgtggggagctcttagatggtctatatacgggaattaattcccagcatattactttgacaagcaaaatggtacaagagcatagtggacttcatgtgcaaccacataaggctattgttggtgccaatgcctttgctcatgaaagtggaattcatcaggatggcatgcttaaatataaaggaacatatgaaataatatcgcctgatgatattggtttaacacgtgcaaatgaatttggtattgttcttgggaaactcagcggaaggcatgcagtgagatctaagctagtggagcttggatatgaaatcagtgacaaggaatttgaagatttctttaaacgctacaaagaggtcgcagagaagaaaaagcgtgtaactgatgaagacatagaagcgttattgtcagatgagatattccagcctaaggttatttggtcccttgctgatgtacaggcaacatgtggaacacttggcttatctacagcaacagtgaaactgatagcaccagatggagaggagagaatagcatgttcagttggaacaggtccagttgatgcagcttacaaggctattgaccaaataatccagatcccaactgttctccgagaatatggtatgacctcagtcaccgaaggcatcgacgcaatcgcaacaacccgggtggttgtcaccggagatgtgaccaacaactccaaacatgccttgactggccgcgctttcaaccgctccttcagcgggagcggggcagcaatggacatcgtcgtctccagtgtcagagcttacctgagtgccctgaacaagatgtgtagctttgctggtgccgcgaaagccagcggcgaggtacctgagagtgcaagcgtccaaagcgcagagtgagcttggcgacgatttggttctcatgtggactgggcggcgtaagagccagagcaactgttaaagagggtgacatttcgtttctgtattaggctgttcaatgttgggggttttgccttgtcagtgtggtgtgactgtactgttctttttttggaggatagcccagcttggaacgtgcaggcaattttggacctaggtagtgtacaatttgtatcttatatgaacaatacttccaataatcgaaagacttaagatgggttgctggagtctgttctcgtatcatgttgcgctttggcagtgggaggtctagtatggctattctgctctcttttattatgtcatctcgtgtttataattagtggaaccatct

SEQ ID NO: 9903 - DNA, 1555 bp, Zea Mays
cttagcttcatcactttcacggctcccggcctctctgcgctgcggcgatgcggtggctacccaggctgctctctcactccatcgaggtcgggagggcctccgcggcggggaggtccaaccctagtctcgtcaaggcaggatcccatgggttcgccagcggcggctgggatgggtcaccagcggtgccccgggagtggctgcggaagctgtgggtagacgtgctgaagaagcagaaggaggacgcgaggaggtggggcatcggcgcgtcacccgggaacgccggcagcggtgcggagccttcgctatgcgcgttcgcgaattctgtggaggctgcaggagcgaccagggaggcaccttcaaggagctatcagtacgaatacaggggtctcgccggattagtagtgcaaatgagcaaatccaatccccttttgttcatgtttcagctactcagaacaagacggccatttgttgcagaaataacggatgctatgggtaacgagatatttaaggttcgtaggccattttggtggatcaacagctcaatttatgcagaagtggatggtaaggagataggcgtagtccacaggcgttggcacctttggcagagaatctatgacctgtacttagggaataggcaatttgcagttgttgagaatccaggattctggaactggacctttagcctagtggatgaagatgacaaactgttggctcagattgatcgtaattggaggggcatcggctttgagccttttatacagtactgggctttgccattgcctgatgacacagctatgatggttctatctcacaagtcacaacagatccatgttgcagtacggttcatctgatttaattgtgttacaacctgcgtctttttggacttttcttcttcttttccatcaactgtactgcatttgctcctagactatagaaggaataggattgtaaaaactaatgagtttagaatgataaacaccatattgttcttacaactactgtagctcttcacggatgctggccagtatgctatccggtttggtgatgatgtacaaagcgacaagtttgctcacttaccgtttattatatctgggtatgtgggtgcccacttttcccagttagttaatgtctcacaaaagctccagaccaaagaattgcatgttgttcgccagctgactttgcctgaaagggtagtggctcttgctctcgccatttccttggacagtgattacttctctagaagaggtggctggtaagtaattgtcctttgttccaaatttgactggtcaggacttaagtggattctgttttactggttgacctccggtgcttgaaattgatcgaagtgtctttactcctttcagaggacttccgtttctgattgccacggagtaggcacacgaaccaccatctgccgtatacaaggaatttctttattctcgttcctgaagaggctagcagttacactcattactgttgtcagggtgcaacatgttcagtgttctacaccagattaactccattgcattttttttaaagttaagcaacctataca

SEQ ID NO: 9904 - DNA, 707 bp, Zea Mays
tgagtgcaattccggggagctaacttgggggcttacatgcaaaaaaaacaaaaaaaacttgagtcctccgttaggtcaagagatgtgcggtccagatcgatcggtatttgcagattggtgcgtccacacgagagtttacggcggcccaaaccccccaaatccagttccatcccaatcgccgagaaggggaagccaaatcgatggcggcggcggcggccggcggcgagaacagcggcgcgggcgcgggcgcgggcgagggcgagttctacctgcggtactacgtggggcacaagggcaagttcgggcacgagttcctcgagttcgagttccgccccgacggcaagctccgctacgccaacaactccaactacaagaacgacaccatgatccgcaaggaggtcttcgtctccccctccgtcctccgcgaggccaggaggatcatccaggagtccgatatcatgaaggaggacgacagcaactggcctgagcccgaccgcatcggccgacaggagctcgagatcgtcatgggcaacgaacacatttcattcaccacttccaagatcggctccctcgtcgatgtccagtccagcaaggacccggagggactccggatcttctactacctcgtccaggtacagcctaacgatcgacttggatgtcaaagcatgatttcttttgttgtaagctcgtagttggttaagtattgt

SEQ ID NO: 9905 - DNA, 772 bp, Zea Mays
atagaatacgacatttacggttggcggacgccagggacaggcgtcctgctgctgtgacatgtgagcctgcgacatatcaggctgcttggaggccggtggggacgtgcagctcgccggagtggccgccgcacaccgtcgacagccacgaggacgagcctttttcgtggtcacgggcccgccgcccctcgcggcgccgtcctgctgctctcggcatgctcgaaatctgcagcggggcagcaccaccagaaatgcgacccggaaaaccagagcgagcgaggtgaaacgagggcgaggtactacttgcccagggaagctcaggagatgtgacatacagaaaccctcgttcacaaatggcggcggcgccgacgaacaagaagaaggtgacgagaatacgtcgagaagagaaggaagcaagagaggagggaggaaggagatctgaaccttctatattgacaggcctgcgtacgtacataaaggtggtctgatcgtaaatttggtggggctttctcttccttccaccgtctcgagccgtttcttgagaacagcagcactagtagctatggcctacggagtactactgctgctgttctccacgatgatctttatgaaaaaggagatacaactgtttcagcgtgtgtgtgtttcaagatgaagatggttgtgtttcaccggtgcaaaacatttcggttgcacagtcgctctctcatataagtgaaactgttaaagaagtccaagtaccaagtctcaagggcacgcttttctcctttgcaca

SEQ ID NO: 9906 - DNA, 451 bp, Zea Mays
gtggtataatcatgcttgccgcagtgcaagatcgaatcaaagaggcgcaagagataaattctggcaaaggagatcgatatggcgtctgctcctcattactgatgcatattgagatgtacactgcgagagaagagccaagccaattgtaggacaaaacttgcttaacttatcattcttctgtgtattctggggacgtttcctgcagcttagacatttagtgtgatgagtaggtcagtcagtcccctcccccgctgcagcgcgcgcatgatcagctgctggtggcgggataagtcgggaaatgctagagcgctgatgattctgtcgatgtaactttatcgggttgtgtgtgtgtgtttgatgatagcttgactgctgtttcataattcagttagatgttgccaagcaaagacttgagataatattgagttcgatcttgaaacttgaaacgtgc

SEQ ID NO: 9907 - DNA, 688 bp, Zea Mays
atgaccggtatccatgaccgatacccccaccccggcttcttcctgccagtttagccgaccactacttctccactgctgctcgccgtctcctcaaccaccgctgcgccacacaatcctcccgcggcgtgtctgactcaagtcaggatgtctcacaggagcagaagcagaagcccgaaccgaatccaaccgagtcatctcaacgactccgccagtttccaattgcccccttttttaggcgttcaagttccttcgagatggcgacaagtagaggagagagatagtgtttccttcaatccctctggcaccaccgacaacgtatccccgtggccatcctcgattctccttgccaaaggaggcgtcagccaagtcgtcgcgtcgcggccggcgatccactcgaggatgttcctggtgagtagcaccaccgcggtggggatcagggatgggggaggtgacaatggcgatggtggggtgcagctcgccgacaaccttaagatcttcaagactgacaacttcgatctcgacgtctacgtgcagtccaagtgccagactatgaacgagaagcactgccactatgatgtgtatgcttgcgtcaggacaggagacccaaaagtacttcacagatgaatgtgacattttccacaagaacgagctgtagatctaatttgattcttccgttcctcctgtggtg

SEQ ID NO: 9908 - DNA, 1686 bp, Zea Mays
caaaaagcaaaacccgcttctccctcctgcactccactacttgccttcccgcccgtcctctactcccccaaatccgccgggccaaaccctagagaaggcgatcggcatttccccgacggcgagcgggcggaagcggacaattatgccccgctgccgccgcgacaaggggcaggcgctcatcgacctcgacagcgacgccgaagacgagtgccaaagcaagggttctcaaacaagtagaacaacaacattgaagacatctgggagattgaaaaatgtattaacaacaacattgaagacatctgggaggagatccaaaaatgtattgccttcattttatgataacctcccccagggcagagcctcacgccatgcaactagcaggaggaacaagacaaatcaagacaagctaaatactgatatttttgaattatacatggaagatctttggaagcacattgatgaagataagaagagtgcttatgcatacttggattctttatggtttaacatgtattaccatgggagtaataaacctaatgtccttaaatggataaaagctaagagaatattttcaagacaatatgtttttgttcctattgtttgtttgtgagttactctcattattaccttgtgtattcacttaattagttgtcagatatgtatcaaattttcaccttttttaatggcagtggacactggagcctccttgtcttatgccactttggtgatgcaaactgttcggatattaagaaaggaccacggatgatggtgctggactcactcaatacgacagatccgacaaggttgcgatcagcaatcagaaaattcattattgacatttacaagactgaggagcgggaagaaagcaagcagttcataaacaaaatctgcctcgagtttcccaaagtgccacagcaaaatggggatgaatgtggaatttatgttctttatttcatccgctgttttctactgaacaaaaaactgacagaagttcttgaaaacaaaaaattggaagaaaaatttacccagctgtttgatgatggctggtttaacccagaggaactagagaacttccgcaaggatatccattcattccaagcattgctgagtttcatcttcctttgtggctcattccgaggacatttgaaggctgttgaggatatgttgtatttccgttttatccatggaagagggagtacatagagcttcgctggcagacagcaaactagccatttatcgtatttaaaatatcgaacttggtagtgtatatatattatatctggaagtgctagattagcatcaccctcttggataatgttagcatttagcagggttacacacgatgtactagtgtatgtattctcattctagagatgctgtagagtctcctgcttatccgggtatagacgttacagtttcacatctgttgtgccgagatggtgatggtaatagtaagtaaaaaaaaaaaaaaactcgcagcagcttcctgtttcagatatcctgtagattctgctgttgctgttgtgacggggatagattagaatcagactttttccttgttcatgttttgcttacgtgagggcatctgctagattgttactgttatgtcagttttttaacctgatttgggtataaataagattctgtgttgaacatgccaaatgccctaagcctgttaaatttgct

SEQ ID NO: 9909 - DNA, 1214 bp, Zea Mays
atgccgccgccctccctcgtctccatcctccccgccgcgtccatctcgccacgaagacgccaagcaaagcaccccaagacccccaccgcgagccatcccttcttctcccgaagacttgtgtcccaaccgccgcgccacgcctcgatctccccctccgctgccggcgggagcgggagcgacgagctccaccttctcgagaagccgttacctgccgtcgcagaggataacgaggccgaggaggagctcgagtctgctccggtgtcatcaacagaagaagcgctcgcgccttttctcaagttcttccaggtgaagagcaccgaccccgacgtgggcgcagacaccgcggatggcgaggtgccggaggaggcgtcaaggagagatgtattgtccgccgctggtgagcgtgggataaaacagctaaatgtacccatcaagatcaaaatttatgagtggaatgctagtggcttgctatctagaattgagggccttcgggcattccttcccaaacctgagatgatgactagaccaagaaatttcactgacctaaagaacaaagttgatcaagaaatgcatgtctgcattacgaggattgatgaagagaccaacgaattgataattagtgaaaaagaggcatgggcggtgacatgccttagagaagggactctcttgcaaggcacagtacgcaagttgtttccatacggtgcacaaattaggattggcgagactaacagaggtggtttactacatatctcgaacatgacacatggcaagctgagatctgtggctgatgtgctgaaagtcggcgagacggtgaaagctcttgtcataaaatcaactccagacagaattgctctgagcacaaaggacctcgagagcgaacctggattgcttatcactaacaaagagaaggtgttttctgaggctgaagagatggcgcgaagataccgggagcaaattgcagagccacagccacctggatccattgccgcggaagactcctgtgacgatgctgtccccttcaacgacgaatcccggtcctatgctaactggaagtggctgaaatttagcaagtccgacgacgtggcaaaccccaaatctggcgtcgaatcgtaatcgtggtgcaggaactctgtagaaattttgatcaattcagatattcagtttccatgcttacttaattgtgcggcttggcgccttggccgcctgcacccggg

SEQ ID NO: 9910 - DNA, 1834 bp, Zea Mays
gtgataaacacgctgtctcacaaagcgaatgtggcaatgtctttgctcgagctctggaatggctattttgttcctcagaaggacagtggcatgttgttgaaagtgcaagggctgcccgtctaattatggttttcttggatagcagacatgcaaatatcgacatggatattattaagaaggatttatctccccttgttaaggatttagaacctggaaatcctgaagaggaggctcctataccgttcatgatggcaggtgatggtgttaaacaaagacatactctgcaagaggtaacttcagaaataactggtccaatggttgtggaagatgttgtctatgaaaatgctgatggagatcaaggttccatgtctgagaaaatgttccgtcgtcttatttttggaagaagttctggtttagtgcaatctgaagcgttgttaatcagagatcctcccagtgatgaggatccaagaacagtctgagaattgaccataaatttcttggtagctcatatcacagcagtatcatatctgggctttctttagttgcatcttctctgagtgctgctgcttcatctggagaaaaagtcagcatcaccgttgtaggccttggtgctggttgtttcccaatgtttctccgtggatgtctgcctttcgtagatattgaggtcgttgagttggaccccttggtggctgagctagcaaagaaatattttggcttttcaatggatgagcaattgaaggtccatttgggagatggcatcaagttcattgaagacagtgttgctgcaaatcagtcagtaaatggcagtaccagaaatgcattcaaaatacttatcctcgatgttgattcatctgatctaagctctgggctgtcttgcccaccagaaaactttgtcgaagatcctttccttctaatagcaaaggagttccttttggagggcggcctttttgtcatcaatttagtctcgcggtcaacctcagtgagggaaacggttgtttcaagactgaaagcggtcttcgaacacctgtactcactgcaacttgaagaagacataaatgaggttctgtttgcatcaccgagcggaagatacctagaaatcaatgacattagtgcaggagcctccaaactgcaggacttgctcaaaattccggtggatgtagaatcagatatacagaagttgcagaaactccagtaacaatctcacctgacgcggagcaccatccatttgcatccacttgatttaggtgctgttcagttctcaccccagcagggcacaccaaaatgtcctttgttttgctcgtggaagccaaattaggaccagctgttttgtacaccagaattttgtctaactgcgctatagaaaaattttggcctgccagaatgtcttttacaaccaaagaggtgaaaaatctggcttgacctgattgggcctagaacaggctagagcgcatttcaaacttttaaacgtccacaaattggccgtgttttcccatatgtttgcctcgccaactctgcatgggtaaaacagtgcagctgtacagatttagaggatgtgtggaggaaacagaatgtgcatcatgcttggtctctgatggtttacaaatttcagcgaatatattgatcagaattcaggctgtgttatgatagctgtagcgtgtttggcaatgtgagtgtcgggtaggctctcgggaccctcgtaagcattcacacctcccgtcctagcagagtagcagcttcatgtactatgactatgggtgtactcggatacgaatgataagatttgtatgaatatgacatcttaaatactcaactttaagaatatgaatacggataa

SEQ ID NO: 9911 - DNA, 777 bp, Zea Mays
tgcttttgcaacagcgccggctcgctgtgcttctgtccttcgccatagcgcccatgccgctgcttttcattttactacatatatggagcaccttcactcgtctcttcctctttccctccgcctggtactcggcgcaagtgcctttctcctcctcgactccgtcgccgtgatctgctacgtagcagaagggcaggcacgcgcagatcctctggctgtcctgtcggcctcttctgcagctgttccagttcagcagcgtgcttcccctagagggaaactccggacgactacaacgatcgccctaggcacaatcatttccgactatttcttccttcgacttgaactggtacctgttcgacatcctacttctcaaggttctgggagtgagaagatgaggatcaactgctgcagcatctggcgcaacaaggcactgaggaggatgtgtttcagtgaaaggggtgctgtgagcagcacccagtgtgtgctcacatcagatgctggcccagacactcttgtcgtccgaacatcctttcggaggaattatgctgatcctaacgaagtcactgctgtcattttgggtggtgctggggaagacgaccggggaaggaaaagccagcaagagggacacaaagagcaccaccagcacaagttgaccctcccaactatttcgaattataccattcacgatgccactgacggcaccgacaatggcaaacaggaaggatagcccatgtatgtattataactgtgctgtaggatagtcaatgtataaccgagtca

SEQ ID NO: 9912 - DNA, 1611 bp, Zea Mays
agttgaagaagaatttgctcgttatatacacaagataactatataatgcagggccagtttgcaatgactcatcaagcagctttggcaagtgttacagcacaggcacaaatgcacttgcagtcaccaactccatctgcatgttcggaagtgccatcaagtccattttatatgacaccaagatctctagtgccattgcagcattcaccatcagtaactgaaggaaatatttgtacaccaattgctgacaagtcattttcatctgattcaaaatcacaccatgttgtaaatatggtagctgatggcttcaactggaggaaatatggtcagaagcaggtgaagagtagtgataattccaggagctactatagatgcacaaactctggttgtctcgctaaaaagaaggttgagcatttccctgatggccgcgttgtggaaatcatttacagaggagcccataatcatgaaccaccacagaagaccagatttgcaaaggaaagagtgactcctattagtgttccctctggaggcgaaaccttgaggcttgtgaacacagaaattgtagaatctagcacgcctacctgtgaattggaacggagtgccatctcagaaacttctgagcagcatctcttttgctcaagtgactgcgaaggggatgctggtaacaaatctgaagatgaacatcctagcgcggaagccctgccaaagcgaagaacacttgaggctacagcaccaaatttaacgccggttcgcagaactgttagagagcaaaagattattgtgcaggctggaaagatgagtgatggatacagatggcgtaagtatggacagaaaattgtgaagggaaatccaaaccccaggagttattaccgctgcacgcacggtggatgccctgtccgtaagcatgtggagaaggcgccagatgatgttaacaatattgttgtaacgtatgaaggcaaacacaaccacgacgaacctttcagaagcagcagcataccagtttctgtaatcagtccatcagcgacagccactgagcaacccaacacatcaagtacgtcagatgagagacctccaaccattacccagaaggacgccaacagtgagtctgataaggagacaaccttgaaatttggaggcgagaaggcactcgaatctgcgcaaacgctgctcagcatcaaaactaactccgatgacatgaagaactctgtcctgaaggaaacttctgctgcagttccagtccaaaacaattgagcatgctgagatagggtgattctattgacatctcttaggctgtcatatttattggttgagtgatatgctattatgttaacttgtatgacgtgaggcttggtgttcggtattccgtgtggagcatttgaggaagcattaggtttcaggaagccacgactggttgtttctgcctgtatagattcccattccctagtgtgtacaggtactgtattttatctgaggccagataacatgtgtggggtggttcttgagaacctgtgtgtgctgtattgttctagctcgatctattgcaatagctgatacgagattgtcatttatttatcggtataacacatcgtgcgtgccgtttgcagtttgtgatag

SEQ ID NO: 9913 - DNA, 3891 bp, Zea Mays
ttatcgctcaactcggtgtcctaacagtttctactcctcaacctggttcggtggtgtgattatctccctctaccaggcggttccgtagtaaacaactcggcccggcagtcgttcccagggcgagatcggatcgatcgagagcttcctagacctggacctgcgctagacctcaaagactcgatcgcaccgcatcttctctctctgctcctcgttcgcttcgtcgccggcgaccccgccgccagcttccccttccgctggccgccctttgcctcgcccctgaggcgtcggtttccactgcataggagtggggcggcgatccgactggacctagggttgcgagaccccatagggtgaccctaggagcatccgcctccacgtgggtgaggcggaggagggaggatgtcgtcgctcagccgggagctggtcttcctcattctgcagttcctcgatgaggagaaattcaaagagaccgtccacaagcttgagcaggagtccggattctatttcaacatgaagtactttgaggacgaggtcgtcaatgggaattgggatgaggtggagcgctaccttggtggattcacaaaggtcgacgataaccgctactccatgaagatattctttgagatccgcaaacagaagtatctcgaggctcttgataagcatgatcggtcaaaggctgttgaaatcttggtcaaggaccttaaggtatttgcatcctttaatgaggagttgtttaaggagatcacacagcttctgaccttggagaactttagggaaaatgagcagctttctaagtatggcgatacaaaatctgcaagagcaataatgtttgttgagctgaagaagctgattgaagctaaccccttgttccgtgataagctacaatttcctagcctgaagaattctaggctgcggacacttattaaccagagcttaaactggcagcaccagctttgcaaaaatcccaggcctaatcctgacatcaagactctatttgttgatcattcatgtggacaaccaaatggtgcacgtgctccatcaccagcaaacaatccattactcggatctatgcccaaacctggaggtttccctccattgggtgcccatggaccttttcaaccttcaccaacacctgttccacctctggctgggtggatgtcaaaccctccagcagtaacacatcctgctgtgtctggtggtgccattggatttggcactcctacaaatcctgccgctttgttgaagcatcctagaacacccacaactgctaatcctggtatggattatccatcaggagattctgatcacatctccaagagaactagaccagttggcatgtctgaggaggtgaatcttccggtgaatatgctgcctgtgacttatccgcagagccataattaccaacaagatgatttccataaaactgttgcacggaccttgagccaaggatcaacaccgatgagcatggattttcatccacttcaacaaactcttcttcttgttggtaccaatgttggcgacattggattgtgggatgttggtaccaaagacagactcgttgtaaggaacttcaaagtctgggacctcagtaaatgtacaatgattctccaggcatcactggttaaggatccagctgtgtcagttaatcgcataatatggagtcctgatggaaccttgtttggtgttgcttattcaaggcatattgtacaaatttattcctataatggtggcgacgatattagacaacacttggagattgatgcacatattggtggtgtaaatgacattgcatttgctcatccaaataagcagttatgtataattacatgtggagatgataagacaattaaggtatgggaggccaccagtggagctaagcaatttacatttgaaggacatgaagctcctgtttattcagtttgtccacattacaaggaaaatattcagttcatcttctcgactgctttagatgggaagatcaaggcatggctatatgataatatgggatctagagttgactatgatgcaccaggtcattggtgcactacaatggcatatagcgcagatggttcaaggttattttcatgtgggactagcaaggatggtgaatcacatctagtagaatggaatgaaagtgaaggagcagtgaagagaacatatcagggatttcgtaagcgatccatgggtgtcgtgcaattcgataccacacggaacaggtttttggccgctggggatgaattcatgattaagatatgggacatggacagcacgggtcttctaactaccattgatgcagatggtggcttaattgcaagtccacggatacgcttcaacaaggaaggaactcttttggctgtctctaccgttgacaatggcatcaagatcttagcaaatgctgatggacttcggttgctgcgcacgctggaaaatcgttcttttgatgcttctcgtaatgcatctgaggctgtaacaaagcctctaataaatcccttgactgctgcggcaaatgcagctgcagcaagcagttcaggagctggtgctccgtcagctgtaactgcaatgaatggggataccagaagtttggttgatgtaaaacctagaatagctgatgagtcactggacaagtcaaaggcgtggaagcttatggagataactgagtcaactcagtgcagatcaattaaactggcagacaacatgagaacgagcaagatctcgagattgatttacacaaattctggtcttgctatcttggctttaacttcaagtgctgttcatctactctggaaatggccacgcagtgatcggaattctggaaaggcaagcgcgagtgtgtctcccacactatggcaaccaccaagtggcattttgatgactaatgacacgactgacaacaatcctgaagaagctgttcactgctttgctttgtcgaagaatgattcatatgtcatgtccgcttctggaggaaaaatctctctgtttaacatgatgactttcaagacaatgacaacatttatgcctgcaccgccggcagcaacttttcttgcatttcacccccaagataacaacataattgcaattggaatggatgactcaaccatccaaatctataatgtccgaattgatgaggtcaaaagcaagctcaggggtcactctaagagaatcacgggtcttgccttttcaaatgtgctaaatgtcttagtctcttccggagctgatgctcagttatgtgtttggaacacggatggatgggaaaagcaaaagaacagatttttgcagataccgtcaggtcgccaatctaatatcttggacactcgtgttcagttccaccaagatcaaatgcactttcttgttgtgcatgaaacccagattgccatctatgaaactacaaaactagaaccagtgaagcagtggcctgttcgagagaattcacctccaatcacacatgctgcattctcgtgtgacagtcaactgatctatgcaagctttatggatgccactgttggcatatttaatgcatcgagtttgagacttcaatgtcggattcttccagcttcgtatctccccccaaatatcagtccgagtgttcatcctgttgtggttgcggcacacccttcggaagcgagtcagtttgctctagggctgactgatggtggtgtttttgtgttggaacctttggaatcagatagaaaatggggaaatcctccaccggtagaaaatgggtctgctagcaacttgtccgcaccgcctcctaatggagcttcaagttctgatcaacctgaaagatgattgagaagatggaactggtagatttttcgtggcatgagtctaaccaagggtaatacttcttttaggacttgtttgggaatacttcttttaggacttgtttgggag

SEQ ID NO: 9914 - DNA, 2251 bp, Zea Mays
agagggagtttgtggtaacatcaaagatgaagatgttatttggtgttgagctggcgcgttggggctgtgtagatggtgggttgtttaggtgttctaccgtggatgcttttcagcaatcttggatatcatcttgagctggaaagcaagaagaaacatgtctcttgttgttaagctacgatacatcttgaagttactatcagctgcttcttgggttgtgattttgcctgtaacttatgcatacacttggaagaatccaactggtcttgcaagagcaattaaaagttggcttggtgatggtcagaatcagccatcattatacattttggcagttgtgatttatttggcaccaaacttgctgtccgctacactatttcttttccctgtaattaggagagctcttgagagatcaaatcttaaagtcgtaacattcataatgtggtggtcgcaggtagtattgattaatctaaaacttatacagcctcgcttatttgttggaagaggaatgcatgagggcgcattctcccttttcaagtatacaatgttctgggtcttgcttttggccactaaattggttgtgagcttctatgtggagatcaaaccacttgtgcagccaacaaaagatataatgaaggagccaatacgaacatttaagtggcatgagtttttcccccatgcaaataacaacattggtgttgtcattgcgctttgggctcctattattcttgtctatttcatggatactcaaatttggtatgcaattttctcaacgctaattggtggtgtctatggggcttgtcgccgtcttggtgagacatctgaggataccagagaacaagaaaaaatagccgcaagatttgctcagatttggaatttaattatcacaagcttccgtgaggaagatttgatagacgacagagagaaggacttgttacttgttccatactgcaaagatcgtgatatggatataatccaatggccaccattcctgcttgccagcaagattccaatagcattggatatggccgcagatagtggtggaaaagatcgtgatctaaagaagaggatgaaatcggatccatattttacttatgctatcaaggaatgctatgcttctttcaaaaacatcatatatgaactagtgatcgattcacgagagagaggttacatacaaaagatcttcgatgcggtggatgagcacatagcagaagagactttgataaaggagctgaacatgagtaaccttcctaccctaagcaagaagttcattgagctgcttgacttactggaaagtaacaacaaagaagatcatgatcagatcatcatattgttccaagacatgcttgaagtggttacaagggacataatggttgaccagctcagcgaactactggaattgatacatggtgcaaataataaaagatctgaaggaatgacatcacttgaccaacaagatcagttgttcacgaaagctattgattttcctgtaaagaaaacccaagcatggaatgaaaagataaaaaggcttcgacttttactcacggtgaaggaatcggctatggatgtccctacaaacctggatgctaggaggaggatatctttctttgctaattctctttttatgtcgatgccagatgctccaaaagtgcggcaaatgttgcccttctctgtcttgactccttattataaagaagatgttcttttctcttcacaagcactagcagaacagaatgaggacggagtttccatccttttttatttgcaaaaaatctacccagatgaatggaaaaattttcttgaaagggtgcattgtgagagtgaagatcaactccacgagactgagcattctgaagagcagcttcgcctttgggcatcataccggggacaaactttgacaagaactgtaagagggatgatgtactacagacaagctttagtccttcaggcttcccttgatatggccagagatgatgaccttatggagggttttagagcagctgacctgttatctgaatctgatgaatcaccactattgactcaatgcaaagctatagctgatatgaaattcacatatgttgtatcatgccagcaatacggtattcagaaacgttctggtgatccacatgcacaggatattctgagattgatgaccacttaacaaagtaatcgaggttgaggtggaggcggttgaagtcgtggagggagcagccactgctacccgaaggcgggcagttcaggtggacgatctttctca

SEQ ID NO: 9915 - DNA, 3972 bp, Zea Mays
cttggatatcatcttgagctggaaagcaagaagaaacatgtctcttgttgttaagctacgatacatcttgaagttactatcagctgcttcttgggttgtgattttgcctgtaacttatgcatacacttggaagaatccaactggtcttgcaagagcaattaaaagttggcttggtgatggagagctcttgagagatcaaatcttaaagtcgtaacattcataatgtggtggtcgcagcctcgcttatttgttggaagaggaatgcatgagggcgcattctcccttttcaagtatacaatgttctgggtcttgcttttggccactaaattggttgtgagcttctatgtggagatcaaaccacttgtgcagccaacaaaagatataatgaaggagccaatacgaacatttaagtggcatgagtttttcccccatgcaaataacaacattggtgttgtcattgcgctttgggctcctattattcttgtctatttcatggatactcaaatttggtatgcaattttctcaacgctaattggtggtgtctatggggcttgtcgccgtcttggtgagacatctgaggataccagagaacaagaaaaaatagccgcaagatttgctcagatttggaatttaattatcacaagcttccgtgaggaagatttgatagacgacagagagaaggacttgttacttgttccatactgcaaagatcgtgatatggatataatccaatggccaccattcctgcttgccagcaagattccaatagcattggatatggccgcagatagtggtggaaaagatcgtgatctaaagaagaggatgaaatcggatccatattttacttatgctatcaaggaatgctatgcttctttcaaaaacatcatatatgaactagtgatcgattcacgagagagaggttacatacaaaagatcttcgatgcggtggatgagcacatagcagaagagactttgataaaggagctgaacatgagtaaccttcctaccctaagcaagaagttcattgagctgcttgacttactggaaagtaacaacaaagaagatcatgatcagatcatcatattgttccaagacatgcttgaagtggttacaagggacataatggttgaccagctcagcgaactactggaattgatacatggtgcaaataataaaagatctgaaggaatgacatcacttgaccaacaagatcagttgttcacgaaagctattgattttcctgtaaagaaaacccaagcatggaatgaaaagataaaaaggcttcgacttttactcacggtgaaggaatcggctatggatgtccctacaaacctggatgctaggaggaggatatctttctttgctaattctctttttatgtcgatgccagatgctccaaaagtgcggcaaatgttgcccttctctgtcttgactccttattataaagaagatgttcttttctcttcacaagcactagcagaacagaatgaggacggagtttccatccttttttatttgcaaaaaatctacccagatgaatggaaaaattttcttgaaagggtgcattgtgagagtgaagatcaactccacgagactgagcattctgaagagcagcttcgcctttgggcatcataccggggacaaactttgacaagaactgtaagagggatgatgtactacagacaagctttagtccttcaggcttcccttgatatggccagagatgatgaccttatggagggttttagagcagctgacctgttatctgaatctgatgaatcaccactattgactcaatgcaaagctatagctgatatgaaattcacatatgttgtatcatgccagcaatacggtattcagaaacgttctggtgatccacatgcacaggatattctgagattgatgaccacgatatatataggataaagcttccaggaaatgcaatgctaggtgaaggaaaaccagagaaccagaaccatgccataattttcacacgaggtgaaggtctccaaaccatcgacatgaatcaggaacattatatggaggagactttgaaaatgaggaatttgttgcaagagtttctgaagaaacatgatggtgtgagatatccatcaatacttggtgtaagagaacacatcttcaccggaagcgtgtcttctcttgcatggttcatgtcaaaccaagaaacaagttttgtgaccattggacaacgtgtacttgccaatcctttgagagttcgatttcattatgggcatcctgatatctttgatcgacttttccacctcacacgtggaggtgtaagcaaagcttctaagattatcaatcttagtgaagacatatttgctggatttaattcaacactgcgtgaaggaaatgttacacatcatgaatacatgcaagttggcaagggcagagatgttggtctcaaccagatctcactatttgaagcaaaaatagcaaatgataacagtttggaccgtttatgtattcctctacgggcgcctgtatcttgtcctaagtggccttgatgaagcattagccactggaaagaggtttatacacaacgagcctctccaggttgctctagcttcacagtcttttgtgcagcttgggttcttgatggcgctgcctatgatgatggaaattggtctagagagaggattcagaactgcattgagtgactttgtacttatgcagctccagttagcatctgtgttcttcacattctctcttgggaccaaaactcactactacggaaccacactgctacatggaggagctgaatatagagctacagggcgtggatttgtggtgttccatgccaagtttgctgagaattatcgattgtattcgcgaagccattttgtgaagggcattgaactgatgattttgcttattgtgtatgaaatatttgggcagtcataccgaggagctattgcgtacattttcatcacattttccatgtggtttatggttgtcacctggctctttgccccattcctgtttaatccttctgggttcgagtggcagaaaattgtggatgactggactgactggaataagtggatcagtaaccgtggaggtattggggtgccgccagagaaaagttgggagtcatggtgggaaaaagagcaggagcctcttaggcattctggaaagcgtggcactgttcttgaaatagtgctttcgttgcgcttctttatttaccagtatggtcttgtttatcatttgaacatcaccactcacacgaagagcgttctggtttattgcatctcgtgggtcataatctttgtcattttgctcgtgatgaagactgtatcagttggcaggaggaaattcagtgcagagttccagcttgtgttccggctgatcaaggggctgatattcataacgtttatctctattatcataatcttgatagcaatcccacacatgacagttcaggacatctttgtttgcatccttgcgttcatgccaactggatggggtttgcttctgatagcacaaactatgaggtcagctatttcacatatggggctatggggatcggtcaaggcgcttgcccgaggctatgagatcatcatgggcttgctgttgttcaccccgatcgcattcctcgcttggttcccgtttgtttcggagttccagacaaggatgctgttcaaccaggccttcagtagaggtctgcagatttctcgtatcctaggcggacacaagaaagaccgggctgcacggaacaaggagtgagtagccgagcagcgtgagcctggtagtgctgacctacatacaattcaaccatgccccacgtggcattatacttgtactggttattatgccaggttgtatattgcaaggaaaggaattcatctctgctaacgtgccagattgtatgtgtggcagcaggtactcgatcggtgagcactcctatagcttttttattattatttatgggtaaagtcaaagaaactaagg

SEQ ID NO: 9916 - DNA, 4175 bp, Zea Mays
atgtctcttgttgttaagctacgatacatcttgaagttactatcagctgcttcttgggttgtgattttgcctgtaacttatgcatacacttggaagaatccaactggtcttgcaagagcaattaaaagttggcttggtgatggtcagaatcagccatcattatacattttggcagttgtgatttatttggcaccaaacttgctgtccgctacactatttcttttccctgtaattaggagagctcttgagagatcaaatcttaaagtcgtaacattcataatgtggtggtcgcagcctcgcttatttgttggaagaggaatgcatgagggcgcattctcccttttcaagtatacaatgttctgggtcttgcttttggccactaaattggttgtgagcttctatgtggagatcaaaccacttgtgcagccaacaaaagatataatgaaggagccaatacgaacatttaagtggcatgagtttttcccccatgcaaataacaacattggtgttgtcattgcgctttgggctcctattattcttgtctatttcatggatactcaaatttggtatgcaattttctcaacgctaattggtggtgtctatggggcttgtcgccgtcttggtgagacatctgaggataccagagaacaagaaaaaatagccgcaagatttgctcagatttggaatttaattatcacaagcttccgtgaggaagatttgatagacgacagagagaaggacttgttacttgttccatactgcaaagatcgtgatatggatataatccaatggccaccattcctgcttgccagcaagattccaatagcattggatatggccgcagatagtggtggaaaagatcgtgatctaaagaagaggatgaaatcggatccatattttacttatgctatcaaggaatgctatgcttctttcaaaaacatcatatatgaactagtgatcgattcacgagagagaggttacatacaaaagatcttcgatgcggtggatgagcacatagcagaagagactttgataaaggagctgaacatgagtaaccttcctaccctaagcaagaagttcattgagctgcttgacttactggaaagtaacaacaaagaagatcatgatcagatcatcatattgttccaagacatgcttgaagtggttacaagggacataatggttgaccagctcagcgaactactggaattgatacatggtgcaaataataaaagatctgaaggaatgacatcacttgaccaacaagatcagttgttcacgaaagctattgattttcctgtaaagaaaacccaagcatggaatgaaaagataaaaaggcttcgacttttactcacggtgaaggaatcggctatggatgtccctacaaacctggatgctaggaggaggatatctttctttgctaattctctttttatgtcgatgccagatgctccaaaagtgcggcaaatgttgcccttctctgtcttgactccttattataaagaagatgttcttttctcttcacaagcactagcagaacagaatgaggacggagtttccatccttttttatttgcaaaaaatctacccagatgaatggaaaaattttcttgaaagggtgcattgtgagagtgaagatcaactccacgagactgagcattctgaagagcagcttcgcctttgggcatcataccggggacaaactttgacaagaactgtaagagggatgatgtactacagacaagctttagtccttcaggcttcccttgatatggccagagatgatgaccttatggagggttttagagcagctgacctgttatctgaatctgatgaatcaccactattgactcaatgcaaagctatagctgatatgaaattcacatatgttgtatcatgccagcaatacggtattcagaaacgttctggtgatccacatgcacaggatattctgagattgatgaccacttatccttcacttagggttgcgtacatcgatgaagtcgaagagcctagcaaagacaaaaataagaaaatagagaaggtttactactccgcattggtgaaggcagcagtaacgaagcctgatgatcctggccagaaacttgatcagggatatatataggataaagcttccaggaaatgcaatgctaggtgaaggaaaaccagagaaccagaaccatgccataattttcacacgaggtgaaggtctccaaaccatcgacatgaatcaggaacattatatggaggagactttgaaaatgaggaatttgttgcaagagtttctgaagaaacatgatggtgtgagatatccatcaatacttggtgtaagagaacacatcttcaccggaagcgtgtcttctcttgcatggttcatgtcaaaccaagaaacaagttttgtgaccattggacaacgtgtacttgccaatcctttgagagttcgatttcattatgggcatcctgatatctttgatcgacttttccacctcacacgtggaggtgtaagcaaagcttctaagattatcaatcttagtgaagacatatttgctggatttaattcaacactgcgtgaaggaaatgttacacatcatgaatacatgcaagttggcaagggcagagatgttggtctcaaccagatctcactatttgaagcaaaaatagcaaatgataacagtttggaccgtttatgtattcctctacgggcgcctgtatcttgtcctaagtggccttgatgaagcattagccactggaaagaggtttatacacaacgagcctctccaggttgctctagcttcacagtcttttgtgcagcttgggttcttgatggcgctgcctatgatgatggaaattggtctagagagaggattcagaactgcattgagtgactttgtacttatgcagctccagttagcatctgtgttcttcacattctctcttgggaccaaaactcactactacggaaccacactgctacatggaggagctgaatatagagctacagggcgtggatttgtggtgttccatgccaagtttgctgagaattatcgattgtattcgcgaagccattttgtgaagggcattgaactgatgattttgcttattgtgtatgaaatatttgggcagtcataccgaggagctattgcgtacattttcatcacattttccatgtggtttatggttgtcacctggctctttgccccattcctgtttaatccttctgggttcgagtggcagaaaattgtggatgactggactgactggaataagtggatcagtaaccgtggaggtattggggtgccgccagagaaaagttgggagtcatggtgggaaaaagagcaggagcctcttaggcattctggaaagcgtggcactgttcttgaaatagtgctttcgttgcgcttctttatttaccagtatggtcttgtttatcatttgaacatcaccactcacacgaagagcgttctggtttattgcatctcgtgggtcataatctttgtcattttgctcgtgatgaagactgtatcagttggcaggaggaaattcagtgcagagttccagcttgtgttccggctgatcaaggggctgatattcataacgtttatctctattatcataatcttgatagcaatcccacacatgacagttcaggacatctttgtttgcatccttgcgttcatgccaactggatggggtttgcttctgatagcacaaactatgaggtcagctatttcacatatggggctatggggatcggtcaaggcgcttgcccgaggctatgagatcatcatgggcttgctgttgttcaccccgatcgcattcctcgcttggttcccgtttgtttcggagttccagacaaggatgctgttcaaccaggccttcagtagaggtctgcagatttctcgtatcctaggcggacacaagaaagaccgggctgcacggaacaaggagtgagtagccgagcagcgtgagcctggtagtgctgacctacatacaattcaaccatgccccacgtggcattatacttgtactggttattatgccaggttgtatattgcaaggaaaggaattcatctctgctaacgtgccagattgtatgtgtggcagcaggtactcgatcggtgagcactcctatagcttttttattattatttatgggtaaagtcaaagaaactaagg

SEQ ID NO: 9917 - DNA, 4276 bp, Zea Mays
atgtctcttgttgttaagctacgatacatcttgaagttactatcagctgcttcttgggttgtgattttgcctgtaacttatgcatacacttggaagaatccaactggtcttgcaagagcaattaaaagttggcttggtgatggtcagaatcagccatcattatacattttggcagttgtgatttatttggcaccaaacttgctgtccgctacactatttcttttccctgtaattaggagagctcttgagagatcaaatcttaaagtcgtaacattcataatgtggtggtcgcagcctcgcttatttgttggaagaggaatgcatgagggcgcattctcccttttcaagtatacaatgttctgggtcttgcttttggccactaaattggttgtgagcttctatgtggagatcaaaccacttgtgcagccaacaaaagatataatgaaggagccaatacgaacatttaagtggcatgagtttttcccccatgcaaataacaacattggtgttgtcattgcgctttgggctcctattattcttgtctatttcatggatactcaaatttggtatgcaattttctcaacgctaattggtggtgtctatggggcttgtcgccgtcttggtgagacatctgaggataccagagaacaagaaaaaatagccgcaagatttgctcagatttggaatttaattatcacaagcttccgtgaggaagatttgatagacgacagagagaaggacttgttacttgttccatactgcaaagatcgtgatatggatataatccaatggccaccattcctgcttgccagcaagattccaatagcattggatatggccgcagatagtggtggaaaagatcgtgatctaaagaagaggatgaaatcggatccatattttacttatgctatcaaggaatgctatgcttctttcaaaaacatcatatatgaactagtgatcgattcacgagagagaggttacatacaaaagatcttcgatgcggtggatgagcacatagcagaagagactttgataaaggagctgaacatgagtaaccttcctaccctaagcaagaagttcattgagctgcttgacttactggaaagtaacaacaaagaagatcatgatcagatcatcatattgttccaagacatgcttgaagtggttacaagggacataatggttgaccagctcagcgaactactggaattgatacatggtgcaaataataaaagatctgaaggaatgacatcacttgaccaacaagatcagttgttcacgaaagctattgattttcctgtaaagaaaacccaagcatggaatgaaaagataaaaaggcttcgacttttactcacggtgaaggaatcggctatggatgtccctacaaacctggatgctaggaggaggatatctttctttgctaattctctttttatgtcgatgccagatgctccaaaagtgcggcaaatgttgcccttctctgtcttgactccttattataaagaagatgttcttttctcttcacaagcactagcagaacagaatgaggacggagtttccatccttttttatttgcaaaaaatctacccagatgaatggaaaaattttcttgaaagggtgcattgtgagagtgaagatcaactccacgagactgagcattctgaagagcagcttcgcctttgggcatcataccggggacaaactttgacaagaactgtaagagggatgatgtactacagacaagctttagtccttcaggcttcccttgatatggccagagatgatgaccttatggagggttttagagcagctgacctgttatctgaatctgatgaatcaccactattgactcaatgcaaagctatagctgatatgaaattcacatatgttgtatcatgccagcaatacggtattcagaaacgttctggtgatccacatgcacaggatattctgagattgatgaccacttatccttcacttagggttgcgtacatcgatgaagtcgaagagcctagcaaagacaaaaataagaaaatagagaaggtttactactccgcattggtgaaggcagcagtaacgaagcctgatgatcctggccagaaacttgatcaggataaagcttccaggaaatgcaatgctaggtgaaggaaaaccagagaaccagaaccatgccataattttcacacgaggtgaaggtctccaaaccatcgacatgaatcaggaacattatatggaggagactttgaaaatgaggaatttgttgcaagagtttctgaagaaacatgatggtgtgagatatccatcaatacttggtgtaagagaacacatcttcaccggaagcgtgtcttctcttgcatggttcatgtcaaaccaagaaacaagttttgtgaccattggacaacgtgtacttgccaatcctttgagagttcgatttcattatgggcatcctgatatctttgatcgacttttccacctcacacgtggaggtgtaagcaaagcttctaagattatcaatcttagtgaagacatatttgctggatttaattcaacactgcgtgaaggaaatgttacacatcatgaatacatgcaagttggcaagggcagagatgttggtctcaaccagatctcactatttgaagcaaaaatagcaaatggtaatggtgaacagacgctgagccgtgacgtgtaccgtcttggacatcgttttgactttttcagaatgttgtcctgctactatactactattggtttttacttcagcacaatgataacagtttggaccgtttatgtattcctctacgggcgcctgtatcttgtcctaagtggccttgatgaagcattagccactggaaagaggtttatacacaacgagcctctccaggttgctctagcttcacagtcttttgtgcagcttgggttcttgatggcgctgcctatgatgatggaaattggtctagagagaggattcagaactgcattgagtgactttgtacttatgcagctccagttagcatctgtgttcttcacattctctcttgggaccaaaactcactactacggaaccacactgctacatggaggagctgaatatagagctacagggcgtggatttgtggtgttccatgccaagtttgctgagaattatcgattgtattcgcgaagccattttgtgaagggcattgaactgatgattttgcttattgtgtatgaaatatttgggcagtcataccgaggagctattgcgtacattttcatcacattttccatgtggtttatggttgtcacctggctctttgccccattcctgtttaatccttctgggttcgagtggcagaaaattgtggatgactggactgactggaataagtggatcagtaaccgtggaggtattggggtgccgccagagaaaagttgggagtcatggtgggaaaaagagcaggagcctcttaggcattctggaaagcgtggcactgttcttgaaatagtgctttcgttgcgcttctttatttaccagtatggtcttgtttatcatttgaacatcaccactcacacgaagagcgttctggtttattgcatctcgtgggtcataatctttgtcattttgctcgtgatgaagactgtatcagttggcaggaggaaattcagtgcagagttccagcttgtgttccggctgatcaaggggctgatattcataacgtttatctctattatcataatcttgatagcaatcccacacatgacagttcaggacatctttgtttgcatccttgcgttcatgccaactggatggggtttgcttctgatagcacaaactatgaggtcagctatttcacatatggggctatggggatcggtcaaggcgcttgcccgaggctatgagatcatcatgggcttgctgttgttcaccccgatcgcattcctcgcttggttcccgtttgtttcggagttccagacaaggatgctgttcaaccaggccttcagtagaggtctgcagatttctcgtatcctaggcggacacaagaaagaccgggctgcacggaacaaggagtgagtagccgagcagcgtgagcctggtagtgctgacctacatacaattcaaccatgccccacgtggcattatacttgtactggttattatgccaggttgtatattgcaaggaaaggaattcatctctgctaacgtgccagattgtatgtgtggcagcaggtactcgatcggtgagcactcctatagcttttttattattatttatgggtaaagtcaaagaaactaagg

SEQ ID NO: 9918 - DNA, 5195 bp, Zea Mays
agattcgtcactgcggctatactgaaactgggtcaagcaatcttggatatcatcttgagctggaaagcaagaagaaacatgtctcttgttgttaagctacgatacatcttgaagttactatcagctgcttcttgggttgtgattttgcctgtaacttatgcatacacttggaagaatccaactggtcttgcaagagcaattaaaagttggcttggtgatggtcagaatcagccatcattatacattttggcagttgtgatttatttggcaccaaacttgctgtccgctacactatttcttttccctgtaattaggagagctcttgagagatcaaatcttaaagtcgtaacattcataatgtggtggtcgcaggtagtattgattaatctaaaacttatacagcctcgcttatttgttggaagaggaatgcatgagggcgcattctcccttttcaagtatacaatgttctgggtcttgcttttggccactaaattggttgtgagcttctatgtggagatcaaaccacttgtgcagccaacaaaagatataatgaaggagccaatacgaacatttaagtggcatgagtttttcccccatgcaaataacaacattggtgttgtcattgcgctttgggctcctattattcttgtctatttcatggatactcaaatttggtatgcaattttctcaacgctaattggtggtgtctatggggcttgtcgccgtcttggtgagacatctgaggataccagagaacaagaaaaaatagccgcaagatttgctcagatttggaatttaattatcacaagcttccgtgaggaagatttgatagacgacagagagaaggacttgttacttgttccatactgcaaagatcgtgatatggatataatccaatggccaccattcctgcttgccagcaagattccaatagcattggatatggccgcagatagtggtggaaaagatcgtgatctaaagaagaggatgaaatcggatccatattttacttatgctatcaaggaatgctatgcttctttcaaaaacatcatatatgaactagtgatcgattcacgagagagaggttacatacaaaagatcttcgatgcggtggatgagcacatagcagaagagactttgataaaggagctgaacatgagtaaccttcctaccctaagcaagaagttcattgagctgcttgacttactggaaagtaacaacaaagaagatcatgatcagatcatcatattgttccaagacatgcttgaagtggttacaagggacataatggttgaccagctcagcgaactactggaattgatacatggtgcaaataataaaagatctgaaggaatgacatcacttgaccaacaagatcagttgttcacgaaagctattgattttcctgtaaagaaaacccaagcatggaatgaaaagataaaaaggcttcgacttttactcacggtgaaggaatcggctatggatgtccctacaaacctggatgctaggaggaggatatctttctttgctaattctctttttatgtcgatgccagatgctccaaaagtgcggcaaatgttgcccttctctgtcttgactccttattataaagaagatgttcttttctcttcacaagcactagcagaacagaatgaggacggagtttccatccttttttatttgcaaaaaatctacccagatgaatggaaaaattttcttgaaagggtgcattgtgagagtgaagatcaactccacgagactgagcattctgaagagcagcttcgcctttgggcatcataccggggacaaactttgacaagaactgtaagagggatgatgtactacagacaagctttagtccttcaggcttcccttgatatggccagagatgatgaccttatggagggttttagagcagctgacctgttatctgaatctgatgaatcaccactattgactcaatgcaaagctatagctgatatgaaattcacatatgttgtatcatgccagcaatacggtattcagaaacgttctggtgatccacatgcacaggatattctgagattgatgaccacttatccttcacttagggttgcgtacatcgatgaagtcgaagagcctagcaaagacaaaaataagaaaatagagaaggtttactactccgcattggtgaaggcagcagtaacgaagcctgatgatcctggccagaaacttgatcagggatatatataggataaagcttccaggaaatgcaatgctaggtgaaggaaaaccagagaaccagaaccatgccataattttcacacgaggtgaaggtctccaaaccatcgacatgaatcaggaacattatatggaggagactttgaaaatgaggaatttgttgcaagagtttctgaagaaacatgatggtgtgagatatccatcaatacttggtgtaagagaacacatcttcaccggaagcgtgtcttctcttgcatggttcatgtcaaaccaagaaacaagttttgtgaccattggacaacgtgtacttgccaatcctttgagagttcgatttcattatgggcatcctgatatctttgatcgacttttccacctcacacgtggaggtgtaagcaaagcttctaagattatcaatcttagtgaagacatatttgctggatttaattcaacactgcgtgaaggaaatgttacacatcatgaatacatgcaagttggcaagggcagagatgttggtctcaaccagatctcactatttgaagcaaaaatagcaaatggtaatggtgaacagacgctgagccgtgacgtgtaccgtcttggacatcgttttgactttttcagaatgttgtcctgctactatactactattggtttttacttcagcacaatgataacagtttggaccgtttatgtattcctctacgggcgcctgtatcttgtcctaagtggccttgatgaagcattagccactggaaagaggtttatacacaacgagcctctccaggttgctctagcttcacagtcttttgtgcagcttgggttcttgatggcgctgcctatgatgatggaaattggtctagagagaggattcagaactgcattgagtgactttgtacttatgcagctccagttagcatctgtgttcttcacattctctcttgggaccaaaactcactactacggaaccacactgctacatggaggagctgaatatagagctacagggcgtggatttgtggtgttccatgccaagtttgctgagaattatcgattgtattcgcgaagccattttgtgaagggcattgaactgatgattttgcttattgtgtatgaaatatttgggcagtcataccgaggagctattgcgtacattttcatcacattttccatgtggtttatggttgtcacctggctctttgccccattcctgtttaatccttctgggttcgagtggcagaaaattgtggatgactggactgactggaataagtggatcagtaaccgtggaggtattggggtgccgccagagaaaagttgggagtcatggtgggaaaaagagcaggagcctcttaggcattctggaaagcgtggcactgttcttgaaatagtgctttcgttgcgcttctttatttaccagtatggtcttgtttatcatttgaacatcaccactcacacgaagagcgttctggtttattgcatctcgtgggtcataatctttgtcattttgctcgtgatgaagactgtatcagttggcaggaggaaattcagtgcagagttccagcttgtgttccggctgatcaaggggctgatattcataacgtttatctctattatcataatcttgatagcaatcccacacatgacagttcaggacatctttgtttgcatccttgcgttcatgccaactggatggggtttgcttctgatagcacaaactatgaggtcagctatttcacatatggggctatggggatcggtcaaggcgcttgcccgaggctatgagatcatcatgggcttgctgttgttcaccccgatcgcattcctcgcttggttcccgtttgtttcggagttccagacaaggatgctgttcaaccaggccttcagtagaggtctgcagatttctcgtatcctaggcggacacaagaaagaccgggctgcacggaacaaggagtgagtagccgagcagcgtgagcctggtagtgctgacctacatacaattcaaccatgccccacgtggcattatacttgtactggttattatgccaggttgtatattgcaaggaaaggaattcatctctgctaacgtgccagattgtatgtgtggcagcaggtactcgatcgcaggaggcactcgcgttggcgtcgctaatcgatgacgagaagaagcttggcgactgtcagttcgacctctagaagcagtcctacgtggtcgcatgcgtcgctgtgtacgacaagctcccacgaagccactgtttggacgcggtccagagcagctgcaccgcgctgtccatcgttaagaggggggcctcatggttgtctccaatgtcgacgactgttgggttgttctggacatcgcatccgacgacgacgccatcacgcgatccagctcatcgtccacctaaagcccaacctgctacgtaagtcgctactgaccggacatgaattcttgtgcattgggacgatgctgacgttgtgtgagtgtcctcgaacatgatgtatgtagtggagtagcgcatccggtgatgcaacggccaagtgtactacctcactgatgagcccggggtgcacttcgtttggcagcccaaccaagagtcatcggtactcgtcatgtcgtgcgcgtttgacgactactatatcgagaattgtggcgtcatcttggcgctggaggtgacgcagaggaggatcgacaacagtgaccagttcgtcatcctcgccaccgtcagggtagcttttgtgtcggtctgactttaattttcttcgcaaacacacacacttacttttttgtttaagcaagagcgtatggtggtgcgtgtctgatgactaacgatgtacgagagaatttcttccggcatgtgtggaacgtgctctccaatgataagaccatacaaatcgtggcatatatcgaagtctgcatgatactgatggttgcaatgtattggtgaaacaactagattaaaataacaaaatttatgtatggc

SEQ ID NO: 9919 - DNA, 5914 bp, Zea Mays
ggttttgcaattcgggagtgtccgattcacttgatcgtagcggtggctgtagcatatgtgtttgtctagatctggggttgacaactgggcactgacgaagtggatactctgctctgctctgctctgctcgacgagttttaacatctgagtatggctgcggcgttggcgtggcggttcaatggcaccaatggtggcgcccatggcagcgcagatctggaaagacacacggacaaagttcaagactcagagccacaaactcctatgtcaatcgtgaaaatgggcaagaaccgagttaatgtggaggacgaggagacactttcaagcgttgctcaatgtattgagcaactacgacagagttcttcatcctcacaggagaaagagagctctttgaagcagttattagatcttgttcaaactcgtgatactgcattcggagctgttgggtcacattcacaggctgttccgatacttgtatctctccttaggtctggaccatctggagttaagatgctggctgccactgttcttgggtctctttgcaaggaagaggagttaagggtgaaagtcttacttggtggttgcatacctccattgcttgctcttctcagatcgaagtcagctgaaagccaaactgcagctgccaaaaccatatatgcagtttcacagggtgggataagggatcatgttggatcaaagattttctctacggaaaatgttgttcctgtactgtgggagcaacttaaaattagtctcaagaatgagagtttggtggatggccttctaactggagcactgaagaatttatcaaagaatacagaggggttttggtcagcaactgtgcaatgtggtggagttgatatacttataaagctggttagttctggacaaacaaatactcttgcaaacacttgctatcttcttgggtctttgatgatggaagactcttctgtttgttctaaagttttatctggagaaacaacaaagcagctcttaaagttacttggtcctggcaatgagacttctattagagctgaggctgctggggctctcaagttcctttctgcacagagtaaagaggccagacgtcagatagctaattctaacggtattccttctcttataaatgctactattgctccatcaaaagagttcatgcaaggtgaatctgctcaagcattgcaagagaatgcaatgtgtgcattagcaaatatatctggtggtctttcctacgtaatctcaagccttggtgagagtctcgagtcatgttcttcacctgcacagattgcagatactcttggtgcattggcctcagccttgatgatatatgacacaaatgcggaatctatcagtgcttctaatcctgttgacattgagaagacacttttgaagcagtttaagcctaaggttccttttcttgtgcaggagcgcataattgaagctttggctagcttgtatggtaacccggttctctgcaagacactagcagattctgatgcaaaacgcttacttgttggtttaataaccatggcagctactgaggtacaagatgacctcacgaaatcactttttgctctctgcaagaaggattgtgatctatggcaagctctgcaaggccgtgaaggtgtccagctattgatttctttacttggtctttcatcagaacagcagcaggagtgtgctgttgctctacttgcgcttctttcaaaggagaatgatgagagcaaatgggctatcactgctgctggtggcatacctccacttgtgcaaattttggaaactggatcttccaaagctaaagaagattcagcaaccatccttggcaatttatgcaatcacagtgaagacataagagcatgtgttcaaagtgctgatgctgttcctgctttactatggcttctgaaaaatggaagtgataatggcaaggagatagcttctaaaacactgaatcatctcatccacaaatcagatactggaactatcagtcagttatctgctcttttaactagtgatcagcctgagtcaaaagtttatgttctggatgctttgaaaagcttgctttctgttgcaccacttaatgatattctacatgagggaagtgcagcgaatgatgcggttgagacaatgattaaaattctaagctcacccaaggaagagactcaggctacatcagcaactgctcttgctggtctatttcattgccgcaaggacctgcgagaaactcatattgcagtgaagacactttggtcagtcatgaagctgcttgatatgcagtctaacaaaatactaacgggggcctcatgttgccttgctgccgtttttctttcgatcaaggaaaataaagaggttgctgcaattggccgggatgccttaaacccacttgtctcacttgcaaattcttcagttatagaagtggcagaacaagcgactagagctttggcaaatcttttccttgatcaggaattgtccctccaggtgccttttgaagaaattctcttccgtgtaacacgtgtactaagagagggaactattgatggaagaactcatgcagccgcagcaatagctcgtcttttacagtgccgaactattaatcagccactttcagatactgttaaccgctctgggtctgtccttgctctagctgggctcttggaagctgcaaatggtgaagctgctgcaacatcagaagttcttgatgcactggtgctgttgtcgcgatcaaaggcgtcaagtgggcacaccaaggctccctgggcaattcttgcagaaaacccccacacaatacttccccttgtttcatgtattgctgatgctgctgcctccttacaagataaagctatagaagttgtgtcaaggctctgttccgacctacatgatgttgtcggtggtctggtttctgaaactccaggttgcatgtcatccatcacacggcgcatcattggctccaacattcttaaagttaaagttggtggttgtgctcttctcgtctgtgctgcaaaagagtattgtcagaagcaaatagaggttctgaatgatgcaagtctgtatattcaactaattcattctttaattggtatgatccatatggcaaacacgcaagctgaaaatgtcagcagtgaaagcatatcagatattagaatttccagacactccaaagaaaacaacagtgatggtgaaactctgtgctgtactgctgtcatctcaggcaacatgattccactatggctacttgctatcttttctcgtcatgacagcaaaacaagagcagaactcctggaaatgggagcagttgaaatgctcatcgagaagatttcacaaaatgcattccaatatgtgggtgaagaagataacacctcatgggtcagatgagccagcatacaggtactttgcggcacaagctttgtcaagtctggtctgcaatggtagcagaggaactcttctggctgttgcgaattctggggcagccattggacttatatctttgcttggatgtgctgatgttgatatagctgatcttttggaattatcagaggaattcatgttggtgcctaaccctgatcaaattgcattagagaggctattcagagttgatgatatcagggttggtgcaacttctagaaaatctattcctcttcttgttgatctacttaaacccattcctgaaagacctggtgctcctttcttggccttgggtcttctgacccagttagccgttgattgccccccaaacatgctgctaatggctgaagctggaatcctagaagcacttaccaaatacttatctcttagtccacaagatgcaacagaagaagctacaactgaattgctgggcattcttttcagtagtccagaaataaggcaccatgaatcagcacttggtgttgttaaccaacttgtggcagtccttcgtctaggaggaaggaattcacgttatagtgccgcgaaggcattagagagtttattttgtgctgaccatgtgaggaacagtgagtcaactaggcaggctatccaaccgcttgtggagattctgagtactggcatggagagggagcagcatgcagctatatcagcccttgttaggcttctttctgacaatccttcaagagcacttgcggttgcggatgttgagatgaatgctgtggatgttatgtgccggattctttcttctgattgttcagtggagttgaaaggaaatgctgcggaactatgctgtgttctatttaccaacacaaggatccgttccacaatggcagcagctcgttgtgtggaacccctggttggtttactggttagtgaagctaaccctgcccagctttctgtggttcgtgcattggataggcttctagatgatgagcaactagcagaattagtggcagcaaatggagctgtcattcctcttgtggggcttttgtatggcaaaaactacatgcttcatgaggcagttgctagagctttggtgaaacttggaaaggacagaccagcttgcaaattggaaatggtcaaggctggtgtaattgagagcattcttgatattctccatgacgctccagattttctttgcattgcattggcagaaatgcttcggattttgacaaacaatgctaccatagcaaaaggtccatcctcagccaaagtagtacaacctcttttctctttgctttccaaggcggacatgggtcctgaagggcagtatagcacattgcaggttcttgtgaatattttggagcatcctgaatgccgtgctgattataacttgacacctcgccaaactattgagccagtgataaccttactgaattcatctccaccagctgtacagcaattagctgcagaactcctatcacatcttcttctagaagaccacctccaaaaggacacagtaacagagcaggcgattactcctcttattcaagttctttcttcaggtttgccaaatttacagcagagagctataaaagctctagctaaccttgcaatagcttggccaaatacgattgccaaggagggtggtgtttttgagttgtctaaagtgttgttgcaatctgacccgcctttgccgcatgttgtgtgggaatctgcagcatctgtattgtctagcattctacagtacagtactgagtttttccttgaggtacctgttgcagtactagtgcaattgctcaggtcaggaactgaaagcactgttgtcggtgctttgaatgcccttcttgtattggagagtgatgactcaacaagtgcagaagcaatggctgaaagtggtgctgtggaagcattgcttgatctcctgaggagtcatcagtgtgaggaaactgctgccagactaattgaggcattgctgaacaatgtaagaataagggaggcaaaggctgctaaaaatgctattgcaccattgtccatgtaccttctggatccacagacacaatctcaacagggaagattgcttgctgctcttgctcttggtgatcttttccaaaacgaaggtcttgctcgttctactgatgctgttgcagcatgccgcgctctagtcaatcttcttgaagatcaaccaactgaagagatgaaagtggtagcaatatgtgccttgcagaatctagtcatgtacagccgagcaaataagagagcagttgcagaatccggtggtgtccaggtcctgctggatcttatcagttcaagcaatcctgacacttctgttcaggcagcaatgtttgtcaaacttctattcaataatcacactatccaggaatatgcgaccagtgaaacagtcagagttataactggtaaacaatatccctttcttgttctgtcatattcatttgcatagcaaattcatatttgtcaatgcctgtcatagttcttaaggcggtaaggcgaggcacggcgagtgacccctgcctggacgcctaggcggacacctagg

SEQ ID NO: 9920 - DNA, 2347 bp, Zea Mays
aaaggagttaaatcctgtggcccatcctgctaagatgaaaattgaaaaggcccatgatcctgggctctctcgtctttcctcgacgagattcccaaaccgctccgccgccgccgctcgtcagcctccgttccaaccgccgcgccggcgacatgccgcccaaagagctgccggggttctactacgacccagagaagaatcgctacttccccatcaggggccccatcccgggcgctgccgcccgccgcggcacgccagcgccacctccggccgtggacacaacgggatgcagcaggaaaagggctaggcggccggagctgctcaacgccagggagatgtacggcggcggagtcatgttctccaataaagccgccaggtccacgttcaagcagcagtgccactacgcgcaggcgtctcagcccatggtctggaagtaccaagccaccacctctgtggctgataaggcgctcgaacaattggacgccatggttcagacaccgcaagggttgaaagagtccaggctgctagtctccggcagcatgaacggttcgattcggttatacggattagggactgctctgagtaactttgagaatgaggcagagtttttgccccaacctgcttgtactcttgtgggaaagcacaagccaggaccactccccagcatttggtcacctggaacaggcttcatagctttctcatccagtatatcatgcataaagaagctcggacgtcatgtccctgatgcatcgaacaccaattcatcagttcagcgagcatggtggctactcttggatctggagaatctcgtgcctctttatatattatggatctttctgaagctgttgacttggcaatcggaccatggactacctacagagttcattcacttgatcgaacaatgtggacagctgattgtagttctgatggcacacatgcagctttcggttcggaccttggtgctggtctgatcgatttggaaacaaggggatcatcatggttatgtcgttctaaaagcgacattctttccctgaaatttgtgcactcgggaaaagttgtgctatgtggtctacggaatgggagtatagcccctgttgatgtacggcaaaaacagcataatcagcctactggagtagcttcatctagcaatgctaggaggacagttcccatgctgcccacaagacatggtgggaagcaaagaaaccaggctagcaaggataaattttcaagagttatttctatgtcgtcagcagtttgtagcttggtttcactctcatcagatgagaactacttcttaggaagctccatggatggatctatcaaactcttcgatcttcgcctcattcagaagggaggtatacagtcgtacgaggggcatgtgaactcacacacacttttaccacttgctgttgatccatctgagaccttacttatgtcaggtggggaggactgcactgttcgcatatggagcatcaaaacaggcgagctaatctttgcgcggagcatgggagacagtcccttcacgtcatcttgttggcccgaaagcagccatggcttgtgcagtccttggctgtttgatgtaaaccacagctggggagcttggttggggtcacgtgctgggttgttctatatgcatggtacttgagttattctgcactactacttacgttactaaattggagccttggagtctagagcaaaaaaaaggtggctgtattctcaagaaacatgagaccactgagctctggagtgaatgaaggacgtcgtctttggaagttacacatcacctagagctagggtgtccagtccttggtaggaattagacatgtttctcttagtggtggatactgtctagctaggaagagagtcttgagggattgatggacgcatgcatcttcaattcctgtgtattgtattactacaggtacaatctgtaatgttacacactgatgatgaattgatgatggctgatgagcaaacataccaggcagctctgtcgaagcctgttgctgatggttcaacatttcagcaacagcacatggcaaaaaagaaaagaaaaactctttctggattcctagcagacaaaatcgttgtccttgttgaacatggtcaggtctaactcctcccagttggttcgcagggtgatgaaaaagaggacgcagttctggcagaggaggccgcatatctgccccatccacagcccctggacgacacagacatgcattgttaatttggtacattaacattcattaattatttggtacatgaacattcgttcagaatagaacacatactgtaccttggtttggaagccgagcgtgaatccgaagaggatggcgagcggcaagcc

SEQ ID NO: 9921 - DNA, 2348 bp, Zea Mays
aaaggagttaaatcctgtggcccatcctgctaagatgaaaattgaaaaggcccatgatcctgggctctctcgtctttcctcgacgagattcccaaaccgctccgccgccgccgctcgtcagcctccgttccaaccgccgcgccggcgacatgccgcccaaagagctgccggggttctactacgacccagagaagaatcgctacttccccatcaggggccccatcccgggcgctgccgcccgccgcggcacgccagcgccacctccggccgtggacacaacgggatgcagcaggaaaagggctaggcggccggagctgctcaacgccagggagatgtacggcggcggagtcatgttctccaataaagccgccaggtccacgttcaagcagcagtgccactacgcgcaggcgtctcagcccatggtctggaagtaccaagccaccacctctgtggctgataaggcgctcgaacaattggacgccatggttcagacaccgcaagggttgaaagagtccaggctgctagtctccggcagcatgaacggttcgattcggttatacggattagggactgctctgagtaactttgagaatgaggcagagtttttgccccaacctgcttgtactcttgtgggaaagcacaagccaggaccactccccagcatttggtcacctggaacaggcttcatagctttctcatccagtatatcatgcataaagaagctcggacgtcatgtccctgatgcatcgaacaccaattcatcagttcagcgagcattggtggctactcttggatctggagaatctcgtgcctctttatatattatggatctttctgaagctgttgacttggcaatcggaccatggactacctacagagttcattcacttgatcgaacaatgtggacagctgattgtagttctgatggcacacatgcagctttcggttcggaccttggtgctggtctgatcgatttggaaacaaggggatcatcatggttatgtcgttctaaaagcgacattctttccctgaaatttgtgcactcgggaaaagttgtgctatgtggtctacggaatgggagtatagcccctgttgatgtacggcaaaaacagcataatcagcctactggagtagcttcatctagcaatgctaggaggacagttcccatgctgcccacaagacatggtgggaagcaaagaaaccaggctagcaaggataaattttcaagagttatttctatgtcgtcagcagtttgtagcttggtttcactctcatcagatgagaactacttcttaggaagctccatggatggatctatcaaactcttcgatcttcgcctcattcagaagggaggtatacagtcgtacgaggggcatgtgaactcacacacacttttaccacttgctgttgatccatctgagaccttacttatgtcaggtggggaggactgcactgttcgcatatggagcatcaaaacaggcgagctaatctttgcgcggagcatgggagacagtcccttcacgtcatcttgttggcccgaaagcagccatggcttgtgcagtccttggctgtttgatgtaaaccacagctggggagcttggttggggtcacgtgctgggttgttctatatgcatggtacttgagttattctgcactactacttacgttactaaattggagccttggagtctagagcaaaaaaaaggtggctgtattctcaagaaacatgagaccactgagctctggagtgaatgaaggacgtcgtctttggaagttacacatcacctagagctagggtgtccagtccttggtaggaattagacatgtttctcttagtggtggatactgtctagctaggaagagagtcttgagggattgatggacgcatgcatcttcaattcctgtgtattgtattactacaggtacaatctgtaatgttacacactgatgatgaattgatgatggctgatgagcaaacataccaggcagctctgtcgaagcctgttgctgatggttcaacatttcagcaacagcacatggcaaaaaagaaaagaaaaactctttctggattcctagcagacaaaatcgttgtccttgttgaacatggtcaggtctaactcctcccagttggttcgcagggtgatgaaaaagaggacgcagttctggcagaggaggccgcatatctgccccatccacagcccctggacgacacagacatgcattgttaatttggtacattaacattcattaattatttggtacatgaacattcgttcagaatagaacacatactgtaccttggtttggaagccgagcgtgaatccgaagaggatggcgagcggcaagcc

SEQ ID NO: 9922 - DNA, 2293 bp, Zea Mays
actctaaccgtttggacccagccagctcatgagctcacatgcctaggcgtgaggcgtatcgtcttcgacccttcgccttcctcgtccctttctctctcccagattctgactccgtcgggctcccccgtgtctgtgtcttggtaaacatcggtctctccccatcccacctggcagttgccatctcgcaaagtcgcaataacttgtcttctcgaatcggctgcaaccccaccccagaccccaccgccgccgccgctagggttttggggtgaggatcgccgatgtcgacggctcccaggcgtcccttccgaggccgcggcgccatgccctcgggcaccggctacgtccgccgcggccccgccccaggctccgccgacgccgccaagcccctgcgcaagcccgtcttcaccaccgtcgaccagcttcgcccccagacacacggtcacactctcacagcccgcgtcattgccgtccgcaccgtcctcgacaagccctccacgcacctcggccgcacccgcgtcgccgagtgcctcgtcggagacagcaccggcaccgtcctcgtcaccgcccgcaacgaacaggttgaccttttgaagccagatacaacagtgatcttccgcaatgccaagattgatatgttcaagggcaccatgagactggcggtggacaagtggggccggattgaggtgactgattcttctgttttcaaggtgaatgaagacaacaacatgtcactggtggagtacgagctggtggatgtggatgaagaggagtgagctgaagcgatattgcattgccatctgttgggccaagtcgtgctgcggatatgtatttccagctaaaggagggcggtagcgtttaggcttctatctagttatttattattattattatcctggaaggctggcgattgggacggttagttttaagaccatcctaaagaagcacgtcaaattatgtacatcagcattaggtgttctgtctgactgatgctttctgttccgcgacgccgaagtctatcctaatgctactacttttttccctctcacgttgggttgggtgtgtgtgtgtgttgttaatcctttttgacctgtagttttggtagattaaaatctagattctcttagaaaccttaaaaaatcttataaataaaaacatatttcagagtattttgattatttcaaactagaccgaatcactcactggaaactaacgtggaagtgtttctagtgaatggaggtttatagtaattctggaagttcgaaggtgtttctgtttgaaagttggaagtgttagtgatttggaggcgtattccaaaggtgtttctagtgaataggctgttcgcttcagcttaagactgatacagctgtaattcaaaaaggcaaaacattatagaagtcagtacatattaaagccaagcgaatagcctgtaagtttacttgtgttataataattcttgctatatggttatggtcgactctcttttttcccttttgtttgcagatttgcgatccttagactgacggtggttgttcaggaaatcggcataaattttacactgcatctacttgactgacctatggcgtgttcccctgggaccaggaagaagccaagccgttcccttctaccggttgtacgtgctgtcgtcatatccggagccgcctgatgcaaagctcacacccctcctgagctgggccagcctcagatttgggtcaaagaaacctggaataatcctggatatgcctagtttctcagctgcatgacaccaaagctctcatcggcctgcgaccgtagaagttcaagccgtagggcaagaaatttgccctggctgtggtgggcagatggttgttgtttccagggtccacggttgagtctccaagtacaaggagtgtagtacagcccgtagtgcggttgatcgtcattccaggtggtgccggtgcaggaggttcctgtggtggcacgaccaaccttggcggtgctggatcctgctgatccgtcggtgctggtggccgtcgatgtggtgatccccgacgtcgtggaggtggaggtggtgatgttggcccaggcgcctgcggtggcgtttgctcatctgctgttggtgcttcgggggactgtggtgcagcctccggtgcatctgctgctgatgctgctcttgcgcagtgcaactccccggcaagcaatgccactatgatgagtagcagctggaaacccctcatggcttgtgttgtatgagcaggagaaatccgcggcaagcaaagagctagggatcgatgcatgtatggctatgcagcactgt

SEQ ID NO: 9923 - DNA, 664 bp, Zea Mays
atcatgccatcttcaaagaatggcatcatgttaacaaaaatgaatgagaaatcagtcatttctaatggaaagcacttcttgcgaaaagtgggaatctttctctaactgaattaatgttagaatggagccgaacaagtttatgtttttatgcgacttcaagagttgacaaaggtttaagttctgagctccagaatcagaattggagagttctttctgtagctaatgaatgtagcatagaggttcctgtgttttaaatgttcaaaggcttcagcagttgcttctcaccttggctactctaataaaaaagggaactatgtgactcatctgttctggtgattggatatataatgaaaaatattctgtgaggaagacttcgcaaggagatgtggttctgtcacttatgtgactgttgccgtgtatggagacgaggacaagccagcgcttataatgtttacagagatgtggttctgtgactgttgtcgtgtactcaggctttatttcaacaggatttaaatatgagatgtagagtgattgatgtacatcacttcactaatcatgaaatctgtagaaggcgaaactactagccatatatgatatgcataatctgtgtggtaaacattatcaatatcacacaaattatttttaatgggttttgcattatcat

SEQ ID NO: 9924 - DNA, 784 bp, Zea Mays
ccaacctcggcgtcgagaccagtggcgccgacctcggcgccgtcgatcttggcgtcgaggttcgcaatataaacggcggccattctttccttgcagacgctgcttttttatctcattcttcacggttttcttctttctctctacgactaccatcctcaaatatcaccaaattggacctttgaaacttgtatttgatccagtggtcttctgtggcaagacaaggagtgaatgaagaagctaaataagtgggaggaagaggacaaggagatgatggagaagaaacagaaggagcttgcggcggagaaatagcgaacagaagaggtggaaaagaggcgtgttgctgcttacaaggaggagaagcagaagaagcttgagcgtgcacgccgtgtgaagcagcaatggaggagaaccccaatgctttcaagaagggaaagtggcctcgttgcactcagtagtctcgtagtttgggtagttttatattgattaagtctcgaacaatgttatgtactaatgcactttttactatcctttaattagtgcactcgatattatggttttatgtattgcatcttttagtactttagtttacttatgtgcatgttttaattttgtatttgtttgatgcaatgggcaaatattggcacttcaaacaatgggaggtctcttgtttcggcataatactgatagaacgctgaaaagtctagatgccatagatgtacgatctacacaaaatttcagcagaatttcccttgtttttgacattctcaacaaaaatatttcacat

SEQ ID NO: 9925 - DNA, 740 bp, Zea Mays
aaaaggtcccgccccggcggcggcacccgactctccatccaccgctcgcctccccttgcccctcctctcgtctactcgtcaccctacgctcggctccatcctccccgcctccccacgtgtcctcccgctacatgggagcgcgggctccctagggtgcctcgaccaccgccgccgccatgttcgagggggtggtaagccaggtgctctatggcctcctccgccgctacgtcaagggcatccagaaggagcagcttaagatcggcatctggaaggaagaaatactgcttgaaaatgtagagctgattctggaagcctttgactacctgcagctgccattcgcgctgaaaaatggacgaattgggaagctaagcatccggattccttggaaaaagctaggatgggaccctatcattattgtcatagaagatgtctatgtttgcgcatgcccaagggaggactctgagtggagctcagattctctggacaagagggaactagctggaaagttggctaaacttaatgccattgagcttgctaaattttctagaagagttacagataatcaaacgggacaatcatttttgtcctacatatcagcaaagatactggatagtatccaagtttctatgcgaaatgttcatattgtatacatggatacccacaacggtcaagttaccatgaaggtggtcaaaagtttttcaagctcatttttcattgatgtcacaatgactggaatttaa

SEQ ID NO: 9926 - DNA, 807 bp, Zea Mays
ttttaccgcacgcgggccattcgcgttcgcttccgagttccgacccgtcggcgtcgctggaggctatgctttcattccctttgaagatgagttcgatgcagaggatgctataaggcgacttgacaacgtgtcttttggttataacaggcgctgactctctgttggatggtccaggcaagttgaaccggtgccaaagagtcgtggtagacctactggggatgtaaaggcaacgagaaccctctttgttatcaattttgaccccatacacactaacattcgcgttcaaaggaactttgcgtttgtacagtatgagacgcaagaggaagctaatgctgctatcaagagcactgacaagagcaccatattggacagggtagtaactgttgaatatgccttctgggatgatgatggcgagagagatgacaggtacgggagccccaagcgaggttccttatgacaggtgtcgcggcagtgcctacatgcgctcacctagcccaaggtaccgacaggagtacagtccaaattgtgatcggcgcggacgctatcctgggtatgatcgtcgtgatggagcaatgtatgaaaggcgaagccctgtatatgatcgctacgacagcctgttgaatcaatattaaggtctggttgaatctggagcgaagccctgtatatgatcgctacgactacccgaaacattgaatcaatattcagcttgaatctggagcgttcaccgttcacaacttcggtttgttaaggtctggttgctccgttgttgcctggtgcatgctgttcagcctccgccgggctgcctca

SEQ ID NO: 9927 - DNA, 1064 bp, Zea Mays
ctcatcgccctttcaaacccgacgccttcccggtgctctccatacgtccccagtggagttattagtcctctcgagtctcgaccgatcgattacccgggggggagggcgcccccattgtttttttcgcagcgctagcgtcgccttgctccgaggggacaacaaggtttttttttttgttgggacgggcggggggaggttcaaagttctgccgcggaggaggcagcggagagacggataccatgaggccggtcttctgcggcaacttcgaccacgtcacccaccagtatagcccccatcagtcggatcgacatgaagttaggctatgctttcattccctttgaagatgagttcgatgcagaggatgctataaggcgacttgacaacgtgtcttttggttataacaggcgctgactctctgttggatggtccaggcaagttgaaccggtgccaaagagtcgtggtagacctactggggatgtaaaggcaacgagaaccctctttgttatcaattttgaccccatacacactaacattcgcgttcaaaggaactttgcgtttgtacagtatgagacgcaagaggaagctaatgctgctatcaagagcactgacaagagcaccatattggacagggtagtaactgttgaatatgccttctgggatgatgatggcgagagagatgacaggtacgggagccccaagcgaggttccttatgacaggtgtcgcggcagtgcctacatgcgctcacctagcccaaggtaccgacaggagtacagtccaaattgtgatcggcgcggacgctatcctgggtatgatcgtcgtgatggagcaatgtatgaaaggcgaagccctgtatatgatcgctacgacagcctgttgaatcaatattaaggtctggttgaatctggagcgaagccctgtatatgatcgctacgactacccgaaacattgaatcaatattcagcttgaatctggagcgttcaccgttcacaacttcggtttgttaaggtctggttgctccgttgttgcctggtgcatgctgttcagcctccgccgggctgcctca

SEQ ID NO: 9928 - DNA, 3188 bp, Zea Mays
tgggacgctcagctcccgctcccggacgacgacgatggccttggcgctgcaatggcccctccaattcccactccagctccaggcgcggcctcccgccgttaccgcgggccatcaccgtcgccgccaccgagtcctcgccgtctgccgctccccgccgctcccagctcgctgttgtgccagcgccgccgctgcggccgacacggggaaggcgcagacagcggcgaggagggcttacccattcgatgagatcgagccgaggtggcagcggcactgggaggagcaccgcacgttccgcaccctggacatcggcgaggggctcgacacctccaagcccaagtgctacatcctcgacatgttcccctaccccagtggggctgggttgcatgttgggcacccccttggatacacggcaactgacattctgtcaagattcaagcgcatgaaaggcttcaacgttttgcatccaatgggatgggatgcatttggtcttcctgctgagcagtatgctattcagacgggaacccaccctaagattaccactgaaagaaacattgagcgctttcgcacacagcttaaatcgttgggtttttcatatgattgggatcgtgaaatctccacgacagagccgggttattataaatggacacaatggattttccttcaactgttaaagagaggacttgcttatcaggctgaggtacctgtcaattggtgccctgctcttggaactgtcctggcgaatgaagaagtagtagatggtgtgagcgaacgtggtggctatcctgttatacgaaagccaatgcgccagtggatgctaaggataacatcttatgctgatcgtcttcttgaagatttgaatgatcttgattggcccgagagtatcaaggaaatgcaaagaaactggatagggagatcaaaaggtgctgagcttattttttctgcagttgaccaggaaggacatgacctgggtgccactttattggtttacacaacgaggcctgacacgatttttggtgcaacatatcttgttgtggcacctgagcatgttttactgtcatctctaacatctgaggaacaacgagcacatgtagaggaatacagagaactttcagcaagaaagagtgaactagaaaggactgaacttcagaaggaaaaaactggggttttcagtggttcttatgctaagaacccagcaaccggggaaatcattccaatatgggtggcagattatgttctaggaagctatggcactggggctatcatggcagtgcctgcacatgattctcgcgaccatgaatttgctgtgaaatatgaacttccaatcattaaggttgtaagtccaccgaatggtaattgtgatccagtggaggcatatgaagatgatggcatcatgattaattcatctagttcttcatctggactgaatattaacggaatgctttcccaagatgctgctaagaaagttactgagtggatagagaataatggttttggaaagaaaaaggtaaactacaagcttcgagattggctttttgccagacagcgctattggggtgaacctttccctgtgagctaccttgatgataccaatgaaatggttcctcttacagaagatgacttgcccttgacccttcctgaattggatgatttcactccaactggtactggggagccacctttgaccaaagcaacaaattgggttagaaccattgacccttcatctgggaagcctgcgagaagagaaacaagcaccatgccacaatgggctggatcttgctggtactatttgaggttcatggatcccaaaaactgcagtatattggttgataaggctaaagaaaggtattggggtccagttgacatctacgttggtggtgctgaacattctgtcttgcacttgctttatgcaagattttggcacaaggttctttatgacatgggtgtagtctccactaaagagcccttcaagtgcctgataaatcaaggattgatactaggagaaagacaatgaaggcagatgggtttctgcagactcagactcaagtttgattgattgctaccaagaaaaagtagctccagacaaggttacaaaagttggagatcattatgttctgaaggataatccaaacattcgtctgaatgctcgtgcctacaagatgagtaaaagtcgagggaatgtcatcaaccctgatgatgttgtttcagaatatggcgctgattctcttcgcttgtacgaaatgttcatggggccattgagacatggagcactgggggaatcgaaggtgtgcaccgcttccttggacgaacgtggagactcatagttggtccacaattatctgatggatcatataatgatggaaccatgactaccgaagatgaaccaaccttggatcagcttcgagttcttcacagatgtattgcaagggtcacggaggaaattcaggaaacaagatttaacactgcaatatctgcaatgatggagtttgtgaatgctgcatacaagtgggaaacccagccaaaatctgttattgaatcctttgttctgctgctttcacccttcgcgccacacttggctgaggagctttggtttcgcctcggacatccacaatcattggcctatgaacagtttccagaggcaaaaagtgagtacctggaggaatcaaagcttgtactccctgtccaaatcaatggaaagaccaggggtacaatccttgttgacaaagcgtgctctgaggatgatgtttttcaaattgcagcctcggatgagaaactctccaaatatcttgatgggaaaggcatcaggaagaaaatttatgtgcctggaaggatcttgaatgttatcttagatcaacaaaagtcaaggacctgataattgctcttgtttgtccatttatctcgttatgagtcaggaatagagatcaataagacatgacagatctgtaaatttgttttttagcacttgcagtttactgtcaatttgccaacaacaacaacgtcgaacactcgttaggttaatgttaaaatccaacagaaaccgtcagtcaaggttaagcatatggatagttatttttatgcactctttggggtatttgaaactgctctaggttccagcttcagtgtggagctgtagtttacaatacagatttaaatagttttaacaaatatttttaatcaaaataataaacaaa

SEQ ID NO: 9929 - DNA, 3192 bp, Zea Mays
ctgggacgctcagctcccgctcccggacgacgacgatggccttggcgctgcaatggcccctccaattcccactccagctccaggcgcggcctcccgccgttaccgcgggccatcaccgtcgccgccaccgagtcctcgccgtctgccgctccccgccgctcccagctcgctgttgtgccagcgccgccgctgcggccgacacggggaaggcgcagacagcggcgaggagggcttacccattcgatgagatcgagccgaggtggcagcggcactgggaggagcaccgcacgttccgcaccctggacatcggcgaggggctcgacacctccaagcccaagtgctacatcctcgacatgttcccctaccccagtggggctgggttgcatgttgggcacccccttggatacacggcaactgacattctgtcaagattcaagcgcatgaaaggcttcaacgttttgcatccaatgggatgggatgcatttggtcttcctgctgagcagtatgctattcagacgggaacccaccctaagattaccactgaaagaaacattgagcgctttcgcacacagcttaaatcgttgggtttttcatatgattgggatcgtgaaatctccacgacagagccgggttattataaatggacacaatggattttccttcaactgttaaagagaggacttgcttatcaggctgaggtacctgtcaattggtgccctgctcttggaactgtcctggcgaatgaagaagtagtagatggtgtgagcgaacgtggtggctatcctgttatacgaaagccaatgcgccagtggatgctaaggataacatcttatgctgatcgtcttcttgaagatttgaatgatcttgattggcccgagagtatcaaggaaatgcaaagaaactggatagggagatcaaaaggtgctgagcttattttttctgcagttgaccaggaaggacatgacctgggtgccactttattggtttacacaacgaggcctgacacgatttttggtgcaacatatcttgttgtggcacctgagcatgttttactgtcatctctaacatctgaggaacaacgagcacatgtagaggaatacagagaactttcagcaagaaagagtgaactagaaaggactgaacttcagaaggaaaaaactggggttttcagtggttcttatgctaagaacccagcaaccggggaaatcattccaatatgggtggcagattatgttctaggaagctatggcactggggctatcatggcagtgcctgcacatgattctcgcgaccatgaatttgctgtgaaatatgaacttccaatcattaaggttgtaagtccaccgaatggtaattgtgatccagtggaggcatatgaagatgatggcatcatgattaattcatctagttcttcatctggactgaatattaacggaatgctttcccaagatgctgctaagaaagttactgagtggatagagaataatggttttggaaagaaaaaggtaaactacaagcttcgagattggctttttgccagacagcgctattggggtgaacctttccctgtgagctaccttgatgataccaatgaaatggttcctcttacagaagatgacttgcccttgacccttcctgaattggatgatttcactccaactggtactggggagccacctttgaccaaagcaacaaattgggttagaaccattgacccttcatctgggaagcctgcgagaagagaaacaagcaccatgccacaatgggctggatcttgctggtactatttgaggttcatggatcccaaaaactgcagtatattggttgataaggctaaagaaaggtattggggtccagttgacatctacgttggtggtgctgaacattctgtcttgcacttgctttatgcaagattttggcacaaggttctttatgacatgggtgtagtctccactaaagagcccttcaagtgcctgataaatcaaggattgatactaggagaaattgagtatactgcatatagagacaatgaaggcagatgggtttctgcagactcagactcaagtttgattgattgctaccaagaaaaagtagctccagacaaggttacaaaagttggagatcattatgttctgaaggataatccaaacattcgtctgaatgctcgtgcctacaagatgagtaaaagtcgagggaatgtcatcaaccctgatgatgttgtttcagaatatggcgctgattctcttcgcttagattcaaagacatggagcactgggggaatcgaaggtgtgcaccgcttccttggacgaacgtggagactcatagttggtccacaattatctgatggatcatataatgatggaaccatgactaccgaagatgaaccaaccttggatcagcttcgagttcttcacagatgtattgcaagggtcacggaggaaattcaggaaacaagatttaacactgcaatatctgcaatgatggagtttgtgaatgctgcatacaagtgggaaacccagccaaaatctgttattgaatcctttgttctgctgctttcacccttcgcgccacacttggctgaggagctttggtttcgcctcggacatccacaatcattggcctatgaacagtttccagaggcaaaaagtgagtacctggaggaatcaaagcttgtactccctgtccaaatcaatggaaagaccaggggtacaatccttgttgacaaagcgtgctctgaggatgatgtttttcaaattgcagcctcggatgagaaactctccaaatatcttgatgggaaaggcatcaggaagaaaatttatgtgcctggaaggatcttgaatgttatcttagatcaacaaaagtcaaggacctgataattgctcttgtttgtccatttatctcgttatgagtcaggaatagagatcaataagacatgacagatctgtaaatttgttttttagcacttgcagtttactgtcaatttgccaacaacaacaacgtcgaacactcgttaggttaatgttaaaatccaacagaaaccgtcagtcaaggttaagcatatggatagttatttttatgcactctttggggtatttgaaactgctctaggttccagcttcagtgtggagctgtagtttacaatacagatttaaatagttttaacaaatatttttaatcaaaataataaacaaa

SEQ ID NO: 9930 - DNA, 912 bp, Zea Mays
cccacctcgccagcttcatcatgtgttcgttccccgtggcgtgtccttatcactggtcgttggactcggcttagaccccatgctttgcgtcctttcgacgttgacgacgcttagctccctcctatagctctccgtgcggcaagcccagctttcatctccagctccagcagctgcccctcctggctccagtcctctgttcgtccctcgtcgtcgatctgtgcagccttgacgcgccatcggctccctgtccgacttcatcctcgtcgccgatctcatcccgttcaggctttcaccggcgtgctgctccctcgcctcggcgccctgcgagctccttcttcctcgcccagtttgcagctcaggcctcgatggatgtcaacgccgtttctttgacctcgccttgacactcaatcgctgcagcacgctatgtcatgtgtgctacaatatcatcgttcgctatactcattctcgccaattttccttgtcgtttctcggctactacctcgtcagctcctgcgcgtcgtgcacgtcttgtgttcggatcaagcaccaggattttgaggaaaagaaagctccagtgcatcggccggtgaaataaaactggtggtagtcatcgtccttgcgaaatccaagactagcttagtcgcgaagacgagccaagtcgaccccaagatgatgtatcgggtgggctactccacaagataatgttggtggatcaacctgaagatggataaatcaagtaagtgctcggctaagagatgattagcaagcaagtctcgtctaacaaacactaacctagttttatttcaggcaagacccagtgcatgcaacccctccctcgtgttttaaatgatttttacaccctttatgtctagcgaaatgtgcattaaggtttataggagttgcttggaaacc

SEQ ID NO: 9931 - DNA, 1071 bp, Zea Mays
ggacttgactgtggacgacggtgtgcatgtcatcggagtacagacggtactgacacaaagggcccagatcagggagtccaaacgggtcgcacccacctgccaggctgccacccgcaatccgcaacagggacaccgggcacagcccacaagatgagcagcggcggcgacagcttcaggcccggtgttcactactaggcctggtacgccagtacggtgtcgtcatcaagctcaactccggcgtcgactaccgagcaaactgaagaatacgtcaatggtcagctgaagaaagaagaaggtgatgccttcataagaggaaatggtggtgcggattatatgatgtgaatattctgagatctatgtcgggcaaattcttgtagcagtcttctgaatatgcagttctgtacatcagtatacccaagcgtacccttgcagacaattaggaagatggtgaaagccaaaactgctgctataaaaaaacacaagccgatggattaaagccgcagcgaacaggctttagcgccggtctggcaaaacttggtcgtttatgagagactttaatatattgtacttttttgttatcattattatgttcatctggcaaaagaattgcaaaagggaaaaagagaagagaaatgagttacatcgccatggccatcaagatatctggtcattgtcattgctggatcctcgatgttgccctgaagcatcggcccggccttgttgtatgcagctgctggttctactttgagtgcggcctttagcttacccgattttttttggtgggggggggggggggggcacactgcagttttgttggacaaattttggtcaccaacaccgccttcaaacggtatggaatgtatcgtgcacaggtgcactgatgaacacgatgcatttcgtgttggagatggaaccaggacaattatgcttctctggcctagaatgatcaagttactgttctgcaattacacattacgccgagctaaatatggcgtggtatgagcactaatcatccataagatgatgtggccctcttgttcaaagatcgccaaactgaagcgatcactcgcc

SEQ ID NO: 9932 - DNA, 1255 bp, Zea Mays
agtagcagtgcttttagctggagtttctgaaattgctaaggcttcatttttcacatgtcctttcttccacatttatagctatggaacaaactgtgtcctttcttccacgtttataagattgattgattagcaaaaaaacaaagaacacttcaataaatatattatatatgcgcttgtcatgaattcccgttgtatataatgcctaaacagtactacttgcttaattagggcgatgaggcggctaaactaaatagagtggggttaagtccctaattgccttgcctgcagttgacttgcaacattttccctgggatgtccatttcaagccccacaagctctagaagcttaaagccatccatgtctggcatgtgcacatcgctgatacaagatcaaacaagttcttgttttgactcaacatggtcaagatcacaacagtctgattcatcgttgtgactgcaaatacgaaacaatgtgtcttacagacaaatttgcaaatgtcattgagcacgtaggtgcaacaggagagcaagcaaagcacaagcaaaagtgcaaaattgtccgaagtccaagtagaggttgcagtaccccaagcaaatgcacgagttcccaacaattcaaattagcacattgatgcatcatacattgatccattgatgcatcttcaccaggagagcagcggagttgatgcgtacccaaggtagcggaggaggatcagccatcagggtgagcctcgtgagtaggaaggtctcggcacggcccgaccgacttcgcgacgtggaccacggcgtggagtgcgcacaacacaacatgctgacttgtacttgttttgcttaaacaataaaccatttctcaataattttcccattatactgcttatgaaatgttcattgtgcacatgatttcctgtacatcggttagtgcttattttcaaacgttagtaccactccttgtgttaccatggtatcaagatgatgtgaatggctatttatcttctcttcaaattagttattaggaacaaaatgagctttagtgaatagttatgtcttggattttctccccattcaatagacttagacttctcattgttcggcctcagcagcacaccttggtgttttatcaggcctccaagccgtccctccctctagctgcttcccgccaagcctgatgctcacaagtttgctgtaattcctcatgccagctgagatcttgctctggagcaagttgtttgagatgtcaagatatcatagccggtgca

SEQ ID NO: 9933 - DNA, 1702 bp, Zea Mays
cccatttatgttgggcaaaggctttggaacccctccaacacccaaacccctcaccaacgtcacctctatgaccaaaagtagtagagaaaaaagattaggacactggcataactgcaatgacatattttaaataaaaactagagtctaaatcctgctgaatagttgctttaggaacagctctaggtgctcaaatgatgcacattgcccttggtccttgttgttttccttataactcaataaatgtcaactttttgcttgttcctgagctctaatcacagcttgtacaattagcttggctaaactgattgccttgtgtgcaaggaggcgttatttttactaatatcatcatttaactattgcgtgcgttgggttaatttggttcattgattctttttcttttttaagcaatcaagcttaaatgattagcttcatagattaggcaatccgttctgaacaaagttttgcaaaaggccaacatcacattgtcattctgtcatacacttcatacaggaaagcatttcgctagatcatgttgcattcctttttttgtttaatttaagttggcggcatagtagcagtgcttttagctggagtttctgaaattgctaaggcttcatttttcacatgtcctttcttccacatttatagctatggaacaaactgtgtcctttcttccacgtttataagattgattgattagcaaaaaaacaaagaacacttcaataaatatattatatatgcgcttgtcatgaattcccgttgtatataatgcctaaacagtactacttgcttaattagggcgatgaggcggctaaactaaatagagtggggttaagtccctaattgccttgcctgcagttgacttgcaacattttccctgggatgtccatttcaagccccacaagctctagaagcttaaagccatccatgtctggcatgtgcacatcgctgatacaagatcaaacaagttcttgttttgactcaacatggtcaagatcacaacagtctgattcatcgttgtgactgcaaatacgaaacaatgtgtcttacaggtgcaacaggagagcaagcaaagcacaagcaaaagtgcaaaattgtccgaagtccaagtagaggagagcagcggagttgatgcgtacccaaggtagcggaggaggatcagccatcagggtgagcctcgtgagtaggaaggtctcggcacggcccgaccgacttcgcgacgtggaccacggcgtggagtgcgcacaacacaacatgctgacttgtacttgttttgcttaaacaataaaccatttctcaataattttcccattatactgcttatgaaatgttcattgtgcacatgatttcctgtacatcggttagtgcttattttcaaacgttagtaccactccttgtgttaccatggtatcaagatgatgtgaatggctatttatcttctcttcaaattagttattaggaacaaaatgagctttagtgaatagttatgtcttggattttctccccattcaatagacttagacttctcattgttcggcctcagcagcacaccttggtgttttatcaggcctccaagccgtccctccctctagctgcttcccgccaagcctgatgctcacaagtttgctgtaattcctcatgccagctgagatcttgctctggagcaagttgtttgagatgtcaagatatcatagccggtgca

SEQ ID NO: 9934 - DNA, 705 bp, Zea Mays
gttcgccttagcctccaaactgactactcgaatccttcttcgtcgctgctcctcactttcgttttgccacccactgtcatcatgggagcgtttggtgtggtcttggtgcccgccatgccctagcctttgtcggctgctccgtaagcctagttgtctgggtgcttcctgcctaggtgacttttgtcgcaacttggaggagaccactcaccagtttgcctttccgattggaatttcctgtccttgtccatgttctcgcagaggagatgggctggtttatgagaacatttgaggatgggaacacagctagcagcataggatccatgacataacagccctgttaattattgtgcagcagcggagaagatcgagaagactgtcgcacgcgtttgctatagggagtagactgtcgagaagactgtcgcacgcgttttcgaataagtccagtttttcgcctctgttttatgcacttaatgaataaactagcctttcatgttttgtccttcagtgtaacttgattttgttacctattgctttcactttcaatgattttggtttattctgttatgctgttatcatgtggcattttttcatctcatcaatatcacaaattctatcctcttcataatgttgctagctcttaggagatcctaaatgaatgtatatctgatctcggtcatgcagatgcatcattttagtggttgttgg

SEQ ID NO: 9935 - DNA, 640 bp, Zea Mays
cgacggtgggggtgggcgtgggcgtggaggagtgttcggtgctgcgggaggtggtggtggcagcgtagtccatggccatgatgatgtgtctccagcttgagaaggccgaggtccaaatggagctccaccagttccactgagttttgcttaagtcttctggatggcacactcctgtcgtaccacaaatcagaaccaatgcgtcaataggcaccgtagttgataataatatctgccacccaacagaatttgatttcttcctgtgcatccatgctggggccaagggaacaagccgtcctacgcattaccatgtgctacgagatgacaacaagttcaccgcagatgctctgcagtctctaacatataacttgtgctacatatcatccagggcggacctataagatgtcaagtgtgtacgccccaacaacccacagatgcggctcgacgctctccatcgtctggtataccaggataggcttcaagagaggctaagaaagtctaagtgtttaggacttgaagaggctgcaaagaacaaaggttttgaccttggtaacgaacaaggagcggctcgttcatctcctgaaggggattacggtcggaatagagaagtgccaagcgacaccactatctcaggtactattaa

SEQ ID NO: 9936 - DNA, 1061 bp, Zea Mays
cctagagatgtccgcaggctctccgtcggtcgcggctctcgcgcggcggctcctcacccgccgtcggtcgctcctcacccgccccacgcctgaccagcgccattactcctcatcccgcaggcagtctcgggtccctgttcccgctgtcgctcgtggcccgctccaccagcacgcaggcatcaccctcggccacggcctccgaccaccagccacgcttcgccgctaaccccctcgcggcggcttccattcggtccctgccctccacgccattctcttcctgacctcgccttcaagttcatgtccccgtcgtcgcccatgggcctgctccatcggcccgcctcaccctcggccacggcctccaaccgtcggccctgtttcaccgccgactgcacgccctgccctaggctgtcaaaccacggaagtggcttaatccaacggattgggggaggagagcctggtgccgttcgagattggggcctcatgaggtaaattcagaagcaaggatggcgacgacgatgaccccgacgacatcgtccccatggacacccaagctgaagatcatgcttgctgtggagcctttgataccatcagagggaccaaagattggagagcacatttcggttacacggaatggaaaatgtgcatatatggtgctgattgcagtgagattagcctcgtccaagttaggggatctgccatgaactagacaagattagaagtttaaagaggccttacatcaagagagtacaagatcgccataaggaagtacaagtctttgaggaaagtgaccttatgagaagcttgagaaaaatcaacttgaaagtgaccttcatgatgatacaataaattgtctcaaacgcaacactattgaaatggagggatacattcgccctcttgacgtagtcataattgtgttgcagtatataccttgctctgatgaccagcattctgatggtgttgcagatgatcatcccagcgattccttattctctccaacataccatcatcacaaggttcgttatttgaataaataacctaacgaaaggtataaagataataaa

SEQ ID NO: 9937 - DNA, 2884 bp, Zea Mays
gccttaggtctgagttcagtggagttttctccctgccctcgagtctgacccgtgttcatcgcttgagggacatagctcttgagttcaagtcggtgtaaacccactccacagccacccagcatgatgtattttgtgcatcgcgtgccaatggcgaccacagcagcagttctcaccctcaccgtggacatgattcctcggaggttgtctcggccgtgtggtgcttgttccttactcctcgcaggtcaatgaaggtcacatcatttactgcttgaactctacctctgttggttgcctggaacttggtgtgaaattttctcaaagataggctgtcaggtttctggatcctaaacttagtgcataaggctgaaactaggttttagtgtattgagctcaactttggagctctgttgcacccagtctatttggttttgggataaagtttctgtagcaagtttgaagaccgtagtaagacgaacaaaattactaaaaggagatggcctaggtcctacagaaaattgggagtaattaatgtccaaactatctctatcagacgtgtgcaatgcagaccagattcagttgctgtaactatggttcagtgtttttctctagattttggagctcttttgtgtttgcttggtgaggttttggaccacattatctataccaaagcgatagagctataattagagaataattttggttaagaaaggctggtctgttaccatatgaagttgtgagatgtgaggggttaaacatagaggtgtgcaaaggttagtgagtgttgattcagctgattcaagtaatcagtgttggtttgagttgggaagctgaagaaggatcttctctccctgtggttgcacttgtggatatagttgaagatatggatgggatgcacagctaaggttctagaggtctcattctccactaaaaatatcaagtttggttaggagtgtggggtgcctgtcctgtaagttagttgaaacagtgagtcaagtccatctttggagcactataactcctgatccatgggcatttggtcttgggctgctgcaatgaacttgtagagctaggttgggtgagcaaattttgtgagccagggtcagcctgctatcaccaggaattgggagaaagtgttgctccaagtcaggatgtcagtctaggaaattctgaactcgattcagtccctaaagctatgttccagtattttctgttagtattggagctgtttggtgtctgatccaaggagtttaaggctgaagtctttatgaagaattggtagagggttgtttaatagaccagttttagtaagtgtgctccccatgttacttcgggaaattgtgtgattgaagggggtgaaaagggagagatcagggttcaacaggtactaggagttgctacaaaaatctgaagaaagatcttcacatccctgctgtcctccgcccatgtgcacaaactgagttacgttggaatggacaacaaaggatattgaggtccagtccccgtgctgaaaatatctcagttggacttgtgtgtacctatccacaagtagagtaatatccattatgtttgatagctacaaaactggacaaagttgatatttgagttaagagcgaccgagtcgtggccggggtattgtaaatggagcgaagtcgatggaccgaggtgcttttgtcagtgacaccattcgacagtggtctgggctcttgtgtgattaatctttgcggtgtggtcctttatgcaaaattgttgatgcgggcgcgggccagctttgcctactgctgggccgggtttcggcctagtatggtgctcggttttgccttttcttttactagagagcttagaaattgtagaaaaatctaaaaatagtgggaccaattctgttaggtgcctaaaatcaggaacttcctgttagagttggttttaagatttttatggtggttaccaaattttagtgtattaaatagtactcttggaacgcctatttaaattttagaaataagaatatagcaccaaaaattatagaaattcttggagagttttgtaagcacaatatgagtacttggtaaaagttggtggatgtttggaagccagttgcttaggaagctttgtaaggtccaaaatataaaggttaaatccttaataaaagtggataaagtgctttggaataagaggaaagaagtgagatctgggtgtttgcataaagtctagtatgttttaatcctttaatggctcaagcttaaagggataccttacagggttcaaagtaagagagttgaatccttgtttaagacataaatggagtgttgcttaataaagacaaggttccctagtatggtttaggatcttgggtgtggtattagagtgtttagctcttttgtgatgttgttagttcttgggtgcacctttagagatgtgtagtcttgaggttctttttgttattttttatgcatcttcgtgacataaccgcaagcatatgtgatcatgacatttcatgtagagtaccaagaagaagatcctaaagagaagtctactcagtgctattgatccagtggtggattccatctaactgcttatcgtgttagaagatctcagatctcctcctgtaataaggagaagttttattcccttatcttttggttagttacttcatgtggaggccttgaagcttagaatgttatgtgtatctcttatggaaaggcttcacccttccaattattaaaataagttatgcactttgggtactatcaggacttgtaataattaccattcttcttatgttgtaaaacttgagctttggaaatgtaaaatatgttttgtaaagtcttccgctctatctccgaagtgtgtgtatcgagtgtgattactataatatgcatgaatgtgg

SEQ ID NO: 9938 - DNA, 2367 bp, Zea Mays
tctccggcctgcctgcccgattccatccccatgtccgccaccaccaccgagtccccggagagcccggagcggcgatcagatgcggttgcgtggctacggtcgttgttggcgggctctggcctgcctctgcccccgccgcacgtgtccgacgacgacctacggtcctttctcgccgatggcgtgatcctcggcgcagcgctacgcaggctcggatgtgcttctacgtccaaccagggcggagcctcagcggcggcggcggcggggagtgatgtcgagaggttcgtcgcggcaatggagcgcctgggccttcccagctttgccgcctctgaccatgacaggggcccaatgttagctgtcatagtctgtcttcttgcactgaggggtctgtttggttccaatgttggggaaggcttgcattgtagccttgaagcaaaaagtaggatgcacaacatggagtttcccataagggtgaacggctgctgtactcaaaattgtcagtctagagaaaagggtgaagggagcataccaaaggtctccagaagtccagctacgtcagagccatcatctccgatatcaatgcctgaactatcttctatttcaaggcacactcgacataattttcatgaagtcttccatctgagacaaggaatttactctgacatgcctatttctaaagttttggagataatgaaatccaccaacttggataatgcccctactcagtcacttttgagttttgtgaatgccatccttgatcggatcattgaaaatgagaatggagaaattccttatgtaggctactcaaaagcaatacaaatatcgcttgcttgttgagaaaggtaataatggagattgaacgccgcatttctactcaagcagaacacataagaaatcaaaatagccttatcagagcacgtgaagagaaatataaatcaaggataagagtactagaggcacttgcaagtgggacaggtggacaaatgcaaataaattcaagtgcggcaaatggaaaaataaatattgctgaagatcatgtgctccagatgatgataaacaaaagcaaaattggagaaagaagattagttgataaagatatgtcaagcttgatggctcagaaggaagatgtagctagattgacaaaggataaggaagatatggttaggctgctgaaagataaggaagatataattagattgatgaaagagaaggaagaaatggttttgctgattaaggagaaagatgatatggttacctcgaggaaggagaagattgatggaagagatcaatcagccaatgcatatgcgaataaatcaactacatataatgatgaaaccattaggatgataaaggaaaaagaagacagtaatattacaattatgaaactaaagagcaaattggaagctgtaaaatcattatttgaagagagccacaaccagttagaatctgcaaaggaggaggttcttaagcttcaaaaggacaaggaaaatagtgccaatataatatcaaaactcaggcaagagctttcgttagcacatgaatcttataagacacatattcaagaactggagagtagtgctttgcaggcaagcaaattctttgaacatagaataaaagaagtagatctcatgctcgaagattctataaagaaaagaacagatctagaggaagtattaaaatctagaatggatacttggaagaagaaggaaatcatggatttgaggttatcttctgtttccattaggcatgaaatccaaaactgccagcgaagatggtctgaagaacttaatggccttggacaaagtctcaacatactgataaatgattctgaaaattatcatgctgctttagaagaaaatagaaaattatacaacgagattcaggaactaaaaggaaatataagagtctactgccggataaggccttttattcctggggaggatcagaaatctactacaattaaatatgttggtgataatggggatctgataattgcaaatcccacacgccatggaaaagaggggagcaagtcgttcaaattcaacaaagtttttggccccactacttctcaagatgacgtattcaaggacattgaaccacttattagatcagttcttgatggttataatgtttgcatttttgcgtatggtcaaactggatcagggaaaacatacacaatgactggacctgaaaatgcaacagagaatgaatggggtgtcaattacagagctctgaatgatctgttccatatttcacataatcgtggggataccatcatgtatgaaataaatgttcaaatgattgagatatacaatgaacaaatccgtgatcttctttgcagcaatggttcagagaagaaatatccttttc

SEQ ID NO: 9939 - DNA, 3043 bp, Zea Mays
cttccctcttgtgtgattcagaatctgggattcatcatccgctggtacatcccgttgcgcgtttgccttcgactagggcaaaatttagggagcaatggattatcggtgattgctatttggactttggagatggggcagggttgaaccttgtgaagacttttgttactttccggggtcatatgctagttctggtggcagctgggcataggaaagtaggaaggcacaaacaaggaggggaggacaattatttgtgtttcttaattttagttatttggaccggcgtttattctagggctatccaatttgcagttcgtaaaatgtagtgggacaaatctttcaattctacgatattttggatttcagggattgtactattgcatctgtagagggtcatccttgtgaaacttgcgatttattcattgattgccagaacaagatcagtttttttttcagcactgaccaagtgaccatgcatttgagtgccctgttgcgaagtgcctatatgttagggatagggaatgacaacggcagtgctgttttccatgataaattaggatgctgaagcttcaaattagcagtgaacaatgtcaaatggattatgtaattctgtccagggattgagatgttgtttttaatgactatgcacatggtttacttttaatgctaagatacatgaaatttgatagtgacatatattaacaagaaaaccattgggggtccaatggtccatcattcgtagcaaatcaacctatctataccactttagattttatatcctcattttttgtgtctcttgttgggtctcatatgtaggctgtagcctaccccaacttgcttgggaatggaaggctttcttgttgctgataaaaaaacaatgttcatcttatagcctacttatatttgtttcatataattatttattaaacattcagggatcaatggccatttgagaaagtgccttgtgatgctttggggctaagagaactatacatccatagacacactgaaatacatcagatgaaatttggtgaccccatatcagctctttattacttagatcctgcgggaacaacaccaagtcatgtaatgatggataggaactccatctggttttgtcaaggtccagcagccaaaaaactgaatattgatttgccagaaactgaaattgtagaaacacacaggaaccatagtgcaaggatcacttgtctgaggctatttcctctgattgatacgccactgtttcgaagtgatacacaaaaaaatgaaaaagcattagtcacttcaagcacagacagaacaatccgtctttgttggaagggctactcacgctgttacaagggccattcagcgcctgtgactgctctggctgacagattgcttatggatggtgaatctaaactacttgcaagtggaggggaagactgcaccattcgtctatggtctatgagtacgagggcgaaaaatcacccactaatagcaacatttcatgggcatgaaaaggcactgtcatttttatctgttgcgtggcataaatcgtccctgttggtgagctgttccaaagactcaaaggttaaagtttgggacacagtgtctccttcgagtggttcatcatcatgtgtaggcagtgctcacctcaactcaaacgggccaccaattgctatgaaatgccatgaatccctttgctatatcgctgctggagctgaagtgacagcgattgacttgaggacaatgaagaaggcttctgtccttgcactccagaaccacagaatactttcttgtgagatgatgccttctgaatggttaatatgtactggcacgaaagacagggctcttctatgggacatccgcaaggctcaggagctcccaaacacagtggcggagatgcaatcgagcggcccggtgacattgcttcacttggaccaatacaaggtggtgaccggagtgccgtcggacggccaggtccacgtctgggaaacacggacggggcactcgctgaacacgttgggctgtggcgaaccttcgagactgggtgtgcggagcagggtgtcggccatggccgtggacgggtgcaggatcgccatggcgggcagctctccggaaggctgcatgctgcactaccgtgacttcgcgacggcttctgcccctgtagtgtccttgccaggcaaggagaaggaggtctccaggttctggaggccccaggaattcgacgacagcgaggaagaggactccaaagcttcgtggaacaaccagacaaggtgatggtcacagaccttttctccattggaatcctgtggggacgagcgagcactcacggtcacggccatgggcacggggggatcctgggttctgcatggcacgtacatgacaaaataggcaagcaacaagaaggcaggaaggaccccagctgcccagcagcccaccctgcaggttttccacagctgtttggcctggctgcccagcccacaggaatgcctgatgcgatggttcctctgcctctccggccggcaggcggcagcagcttataaaacttgagaggggactcaattttcattggtttgtgtacaccggcggcggcaacagagtggagtaggacgacgacgacaacacgaaagcgaagagggagcaggctgtgccttactatataacaacatgcatgcatgggcgctttgtcatgtatgtatatagcagttgaaatctgattagaattctgggatgcaaaagttccagatgatcaataactatttttgaacgtaaggaaatttagaaggtatttgaatacagtagagataatagttagttagctaaaaatatactagtagaattagctagctaataactagttagctaactagtagctaatttactaagaataactaatagttgggtgtttggatatctctagttaattttagccactaactattatctctagtgcattcaaacaccccctagatagtggtattaggccgaaccatagatcacgtatagctgtaaattaaaagacgccatcgattaccggctatttgattcctgagcgtgtgca

SEQ ID NO: 9940 - DNA, 2111 bp, Zea Mays
caccacctccgttggattcgtaatcaacggaagcactgccctctgccgttcggcagacgatctggttcccctcacgcccaccaaatcccgaatcccaccaccgccttctatcgcccccaccccggctcccagatcgcggcggcacacataatggccgcctcgccgtcgctgcacgccgtggcgcaccgggggccctccctgaccgccctcctcttcctcgtcgccgcgatggtgttggttccccctgcggcggccgagatccgggagaccgcaatccgggccgacccgcggagcatcatcccgctggatgaattcggcttctcccactcgggcgtgctggagctcaacgtctccggcatcgccttcgacccgcaggcctccgcggagctggacctctcccagctcggcttcttcctctccacgctcgacgcctgggtccacgtcctccgccagctccaggacctcgacgtcacctgcgcgctccagtccgagctcgtcaagctcgccttctctttcgaccgcctccgcccgccctccaaccccgccggcgtcgaggtcgctcgctcctcctccttctccaccgccttccgcgtctccgagcccggccagtacacgctcgtcttcgccaactgcctcggcggcggcctcaaggttgacatggacgtccgctctgccatgtacaacgtcgacccggcaaccggggagcgccagtacctctccgcgggggcctccgcgctgccctccttctacttcctcttctgcctcgcctacgctggcctcgccgctgcctgggtcgccatcctcctccgcaagcgggccgccgtattccggatccactacttcatgctcgccgtgctcgtgctcaaggcgctcaacctcctcgccgaggccgaggacaagtcatgcatcgagcgcaccggcaccgcccacggctgggacgtgctattctacatcttcagcttcctcaaggggatctcgctcttcacgctcatagtgctcatcggcaccggctggtccttcctcaagccctacctggccgaccgagagaagaaggtgcttatggtggtcatccccctgcaggtcgtagctaacatcgcgcaggtggtgattgacgaatctggaccctatgcccgggactgggtcacctggaagcagattttcttgctggtcgatgtggtctgctgctgtgctgtgctcttcccgattgtgtggtccattaagaacctccgggaggctgctcgcttggacgggaaggctgcggtgaacctcatgaagctcaccctcttccgccagtactatgtggtggtcatctgctacatttacttcacgcgggtcgtggtgtatgccctacagaccatcacctcgtaccggtacctgtggactagcgtcgtggccggggagcttgtgacgctcgcgttctatgtctttactgggtacaagttccggcctgaggtgcataacccatacttcgccattgacgatgaggaagaggaggctgcagctgagacgctaaagttggatgatgaattcgagctatgaggggttaggaattggaatcacctccatggcagttttaatattggtgttgtatgccccagcacaggacaagtggcataaactgctgtattgctttggatctgcaaaaggagacatagaaacaagtgaagtcagagtcatagaagtcaactaaaacgttcagtcaatggaggaacagtgtaactatggcctgaaagggttctgattttgagccatggcgatgtctatcgagatgcaatgctgcttgcttatccatctacgcttgcagtcaagtttgatcactttcatggtttgggtcataacggtggaagcactgagttctggtcactagcattgtggagcaactttgcaagtggatggagccatgcatgctaaaagggcatcctctgtcacagttcgcctagcaaatgatttcctttcagttgtgttgacatcaaatcacaggggatgcacgcactcccatccaggttagtgccttgagcttatttggcgttgaaaacttgcatgcttccttatcgtggagagccatgctgctaaaataaatcgaggttgcttttgctgtgcggttggtaagt

SEQ ID NO: 9941 - DNA, 610 bp, Zea Mays
tttctgcgtccagcgtcgtgtctgtcaccgtgcgagggcgtcagccgcagcccgcaggggcgctagcagacgagcagagcaggctagcagcactgcagcagcaccgcagcggcgcagcgcagtccgcagccggccagccgcagcggcgcagcgcagtccgcagccggccagccgcagcccgcaggcaggggcggtaggcgcgccgcgcgcgtagccgccaggcgccaccgcgccaggggcagggcacgagcagcgggcagcggccagccggccaccggccaggccagcgacgcgcacgcgccgacgcccactccactcgaccactcgcccaggcccagtgaccagccgccagcgtgctgtactgctgtttcactgttccagttccaggcttccaggtttcaggccagcgtgattatcattctatacgacagaggaagaattcaaagatattttttcaccatttggcaccgtagaggaagctcgacttatgagagaccaccaaactggaaggatgaagggatttggttttgtcaaatattcatcgcaagcagaggcagagaaagctgtcaaggcaatggatggcaaggagagactggaatggaattgtatt

SEQ ID NO: 9942 - DNA, 1876 bp, Zea Mays
tggataagcttttcttcaattggtgctaccctaacctatcacatatatcatcattttggagtctatcccttctatatggctacaaatccaatgcaacgctgcttcatcgtgaaaaattgttgcatgcagccacgcacatggtttgcactatccacctacacagtgatctatgcttctgaccccacatgccttaggtctatctgcaccagaaagaagtgaatcgtttcaaggtgtctatatactttttggatgctttaagaaagggcctggaagcattgcacgggtaacatatttgtctgacagcgattgattttgggaaccaatttggtaatcagtacaatggagtgcaacagagaagaagccttgaaagccagggaaattgctgttaagaagttggaaagcagagattttgttggtgctaaaaggattgcccttaaagcacagaggattttcccagagatagagaacataccccagctgttaactgtctgtgaagtacattgtgcagcagaagcaaaagtaaatggaatgttggatttttatggaattctccaagtagaaggaacagcagatgaggtgaccataaagaagcaatatcgtaagcttgtcctctcacttcaccctgataaaaacagttatgctggtgcagaatctgctttcaagtttgttgcagaagcatactcaacattgtctgatcgaaccaaacgatatgcatatgatgtcaaatggagggctgctcccaaagttgcaccaaagcaggctacacaaccaatgtggactacagagccaatcaacaaaaatagcacaaatagtagtgcagcaggatatggaccttggacattttggaccgtatgcattcactgtaaaacaaaatataagtaccatggtgacatactcaatcgtcagatccgctgtcagaattgcaggcagaatttctttgcacaccagacaagtacagaggatgtgccttctgcattctcatcaaaaacagcaaatagtgctgcgcagcaaggctgctctacaaatatcttttctagagagaacaaagaggggcctgtgatggaaggagttaaattttcagcaaagaattctactgtaccagattttggtgacaggaaaaacctaggtggtggggtggatacatcagcagggccaggttctgcagaaatccctactccacggagatcttctaggagaaaggcttgtgctgatgccaacaacatcctgaattctccaaagaaaaagagtcggacactcaaagattggttctcaaatgctacctccagttctaataaagtagttgatgataatgttgcccatgctgatggacatgttagtgaacctcatgtgtctagcaaaacagataatcaagatagttgtgttgtcaatgaaggcaataaaagaaacactaaaacaacttgtgatccacctgctgagaagccttggaatactgggagtttcacgtaccctgacccagaattttttgacttcgacaagtgcagagatgtcaaactgtttgcagttgatcagatatgggcactttatgatgaattcgatgccatgccaagattctatgctagaataagacatgttaataccaccaacttcagagttaagtacacttggctggagcattctacagtgaatgatgatgaggaaaaatggattgataataaacttcctgtggcttgtgggaactttacgttaggaaacacagaggagtcacaagatcccctcatgttttctcacatggtttcgtgggttaaaggaagaaaaaggggttcttatgtaatatatccaaatataggtgaggtttgggctctttataagggctggagtatgcagtgggtctcagatgcagacagtcatagatcct

SEQ ID NO: 9943 - DNA, 4358 bp, Zea Mays
atatgttttttgaagggaaaatgctgtaggggaaacccctacaacgcgattttattgaaacttttttgaaatggaaagaaaattacaagcgggatcaaagaagacaaggaagaagctatcgagagtttagccaaagcaatagactagttttaagaggggtaaaatctcagcatttgcgtcgccaagaagaaaaagaaggagccttattcctaaagatgaagtcattcctatgcttccaaatgcaccaaaccactagtgccaaaatttccatgaagaaactgtggccaaaggcacccttggtctcatgaatcatcgaaaagaagtcaagatcatgattccaatggagacccacataactctagcagtctgtacagaaaggacaacgaaacaacaggtgctaactgctaagtcgtctcttcgcagtgcaggtcacatagagtgcagtcaaggttgttgtccggtggcaaaaagccctttcttctaagaatgttcttggagttgattctgtctccgaagaccagctatataaaaatcttgaatttcttcccaaccttggactgtcaaatctaattaaaggcagcaggaggctggattgactgaaaagtaaggctataacttggatgagctgaaagtagaattgccccacggacggataggtccatttgtctttaacagctgtagagttctgaaggtaactcacaagcttgtggaaaccaagatattcctgagcggtctgagaaaataaaggagtatggaaattgtgctctagatccatgttggttaaaaattcttgaatttagcattcttttttcttggcgaaagagaagagacaagggaaagtgaatctgggggagatattgttccaaacatcaagccacaacagaattgttctgccatccccagcccaaggcatagtatggcctctgaaatagtcaaccagcctggaaacatccttccaccataaagagcctgttttagggtagccatgggagaccctgcccccagattagtgagtggtccaaattagatttacccaaggtatgtcttctctgccatagaatttgtgaatgtatttaagcaagagggtcgtgttctgaatcttcaaattgagaacacccaagccccctctatttctaggacagcacactttgtcctaggcaaccagagggtttcaagtgcgcattttaactgctgctgacagtcccttctgattgtttaactgctgccgacagtcccttctgatacaatcgataccgttaatgaccattaccggtatcttaagtgtgcacattgtaaagatgggcatcgctgagaaagtagagttgaccagagtaagtcttcctgctatagataaccaagaactgatggtactgagccttctttcaactttggtgatgagagggagatagttttgactttcggcctcatgaggcccattggcaaacccaaatatgtgaacgggaaggtgccaacttgtgacatccaaacattgccgccagctgagtggttttggtgacatcaaggttgatcgccgacaagggaaggggaagggggaggtgatggttgccgaagcagcggacacggtggcacctgccgtggtgggggagagggtggcccgaggcatctgcaacccagcctcagaacagaggacgggtcagcggcggcgccgaccgtgatggggaaggagaggcccacccagggtgcctgcaacccaaccgatgccagatgaagagcagtctgagcagaggcggtggactgagtggcacattcattggggaggggagcggaagcacgagggccgcgttattgctggcggccgcggagaagagagcggcgatgcaccaactagtggtcgtgctcgcgccggcggctgtgcgcatgccagctgctgcgcccacgccgcagcgaaaggaggtggtggcagcagccagtaaagcaggggacactgcggcagcgacttggaggaagggggggagggtggtgttcgtggtggagaagcccgacggagcttgctactttgcttctattgcaacacagattggagaggagcttggtgatatatatgattatgttgcaccatgctttccttctagatatgaaattttccagctcatggtaaacctatacactgagagattcattcagatgcttcgacttctcagtgatagagcaaacgatattcaaaatataaacatcttgaaggtgactagttgggtcgtacaatatcaagaagatttgattggtcttggtgtggatgaatcacttgcccaagtttgttctgaaagtggtgcattggatcccctcatgaacatgtatgttgagcgtatgcaggcaacaaccaagaaatggtacaataacattttggaggctgacaaaacacaaccaccaaagagtagagaggatggaaaactatatacacctgcagcagtggatctattcagaatattgaccgagcaagttcagatagttagagacaacagcacatatgtcatgctatatcgcatcgctcttgcggttattcaggtatttatatatttgccctatgagattatggcagcagcagggtcaggaagagcggcggtggccgttgaggatagagaggggagcgccgttgagaggcccaaggcgggaaagaagagggcgagatggcgcaaggggtcaacgcaggctgagtggcagcgcagagccacgacaaggggcagtaccagagagcgtggagttgccgacaggggaagggagcagtccggctgctggagagggcagcaggaccgcagaagcgccgtgaaagagggcgttggtgtggagggtgtctacgggaaggccagcgagttggctcggtgtcgaggaagacgtcgtcatgcgaagcaccggcggcggcggacagaggtcgtgggcggtgatggggctgcaccgcgcaggcatgcgcaagggagtggccgcactgggtggcgacgcagagccacagcaaggggcggcaccagggatcgtgggggtcgccggcaggggaagggagcagcccgactgcgagagagggtcatgcttgattttcaagcagctgagaggcaaagacttgaggagccgattttttatgttggcctggcatgtctatgtgcattgattaacaataacatgcattgctacgaactttcatcagagctaagtagcagtacattggaggcgcttccacaaaactatgctgaacaggcggcgagcgggaacaccatcagatgataggttggcatagttgagagaaccgatgagacgagagtgagacggccagctctattcaaccactttcctttccatccaggaagcctctgagcaatgcgttcgatgagcggttgaacgtgtacgatcaggttaattttgaagacacctgcaaaggatttctcgaggttgccaaggaggctgtcctccaaactgttacggttatttttgaagacccaggtgtgcatgatctactcgtgaagctttaccagagagactggctggagggaatggtcacagaatatcttgttgagacatttgctgattacttcggtgacgttaaaatgtatattgaagaaagaccatttcgaagatttgtggaggcttgcatagaagaaacaatcgtggtctatgttgatcatctcctttcccagaaaaactacataaaagaggaaacaatagagaggatgaggttagatgaagagaagcttatggatttctttagggaacacgtcaacgtgacaaaagttgaaagtagagtgcggattctggcagatatgagagatctagcttcagctgggagtttggatagctttactctcattttcacaaatatactggaacatcaacctgattgcccgcctgaggttgttgagaagcttgtggcaatgcgggaagacattccaagaaaggaagccaaggagattgtacaagaatgcaaagagatatacgagaactcgctcgtggatggcaaccctcgcaagtcaggttttgtgttcggcaaattgaagtgcttgacagcaaagaaaggcatatggaggaagcgtgggcagtaagtggcgacttgcagcagagtggacgaacttatcaccaaggcaaagattgtacatttcacttctctatgatcattcttttttcgatgctactgttgggtttcacgtttatactatcagtatgtactcagcttgaggagcaaacatgtaatttattcaataaaatggttgttatttgcaataatataaaattattgcaagataggttcttcggctttctggactgcacaacagagtttagagaatggtatgctttatgattcagagtattctatatgccatttggaaactatacttatctgaggtggtcaattcaat

SEQ ID NO: 9944 - DNA, 2553 bp, Zea Mays
cacagccgcacgcgcgcaccggcgcacgcaccaccgcccaccggccacagcgccgcagcaaaagcgaagcgaaccagagtggcaatgcacgatcactgccgccgcgccgcctacttccctgccccgtgccgccgcggcctgcctgagcgagcggttgcctgccagatacgtccaatactgcagcgcatatgtcagagcagatacaagattcttctaaataaagataattaaagtgcatatggacataagttgaacacatcatggtacggtaactcactcactgggtcacttctttctggtgaggaaggaaaaggcttggtcaatcatcacagttagggtcgtggggggagggaaaaaaaaggcgatgtcagtgatgttcgtattccaggacagagagcatctttcctttgtttatcgccggccggcagctagcaattctaatcagaaatggttactgctccggtccaacaccaatagaagcacgtcgcgggcgctggatgtctgtcaagaatcaagcttcccataatcgcgatgcaggaccggacttgcggttgagccagaaaataaaaaggactgcatgccagtgccagggaagaagtgctcgttcgtccactccagaatctggagcagatgaagctgaccctacaggtgattatattattgcatgcgtgtacggacggaggtgggcattattctgacgaggggaagggaaggggaggcgggcggcggcagcggagcatggcaattaacaacaaggctggcactagaagatcacggggaaggcgagtttgacaacgggggcatcttttctggggtccccagaggcccactccccacacgatgatgcatgcacggggtcttttcgcccagaacaactagtgaatgctgctggacaggaataccctgcgagtcgccgttgtccttgtcacgccttttgttttcccctcccgttgctagctgtccgcggacgtgtacgtgcccaggcatcctatacgaacgccatgcaccaaggaaaggtggctactagatttaaatccggaatacatatatattatatatgcatctacccatctcgttttcatttctgggcctttcaatttcaacagcagctcatcccacggacaatcgtcctgaggtgtgcagtattcatgcatggacgcctggcctcctcctctgcagaattggaacatcatatcgaattggcgagcgagttttgcagatttaaagagctatttcagtcaagcttcaagtggaagtagaccaagtactcgcgctagtggagtttgcaatgaccccggaatacaagttgaagttcaagagaataatagtgaagatgccaatggtgaagtcgaagaagcagtcacacgtgcaattaaagaagaaatgggggattgtttattctctgttcttgttgatgaatcccgtgatatatcgattaaagaacaaatggctattgttgtgagatttgtcaataaaaagagtgaagtaatagaaagatttttgggcatcaagcatgtcaaggacacaacatcagaatcattgaagaaagcattagttgagatggtaagtgatcatggattatttcttgcaaaagaaaggatatattacaacataagcatcgtttgaatctcttatcaaagttagagagtggagaaatttcatcaaagagaggcaaacaacaagaaacatcattgtcaagacctggagatacaagatggggatctcattacaagactttgctccgtattgagtcaatgtgggaatcagtgatagaagttttagaaattgtgcaccaagatgagcgtaatccatcaggtgcaggtggctttgttgggaaaatggagtgtttcagctttgtgtttatgatgaagttgatgttacaaatcctccgtatcacaaatgagctttctcttctcttgcaaagaaaggatcaaaacgttgtccaagccatgtctttggttgttgatgtgagaacatgtttgataaatttgagaaatgatggttgggagccattgttggaagaagccacaacattctgccttgcaaatgatatcccaattccaaatatgagtgatgttgtaccacgatttggtcgatcaaggaaaggtgggagaaataatattaccacggagcatttttatcgtgttgatactttctatgttgttatagattctatcaccacagagtttgatcatcgctttaatgagctatctcaagagttgcttgggtgtttttcttgtcttgacccaagggattcgttctctaagtttgatgtggataagcttgctcggctcgcggatatctattctgatgatttttcttttgatgattgcaagactataaaagatcaactaagaacttttattattcatgtacgaagaattgaagagttcaaagcttgttgtgatattgctagtctatcgaagacaatggttcagcttgagaggcatattgtgtttccactggtatatcgacttattgagttagcactgttgttaccggtagcgactacaacagtggaaagggccttctcagctatgaagattattaaga

SEQ ID NO: 9945 - DNA, 2875 bp, Zea Mays
gtccgatcctacgtttcagtctcgcaccctgatcccgcacaccagtcctgctcatggctccccgaaaccgtcgccccagcctccctcccctccccggctcccccgatttcagctgcccccgaactccgtcccctgttgtccctacctcgattctgccgccgcaaacgccgatgtgagtcgtccgatcccacccgcaaacgccgctccccgcctcgaggctcgccggaacggacgcctggataccgcggccgcaacccaccgccgcgcagggaggttgcgcccgcactaaaatggagcacagggaggctttgccccccacaactcggaggacgtgtgcaggccggagggcatgggggaactcgtgttgaggtctatgcatcaacatcttcttcaagaacccaaggttgttggggttcaatgtcggctggacaggggatggtgggggcggccaggtgatgtaagccaaatcgctttcggcctcctccagcagcgctgcgaagacgaggtgctcgaggtggcccagcgggaccacgaactggtgacggaacctgctcaacaaccacgcgcgcttgacctagcccccaccggagaccctcactgtggcctcctgagtcggatcacgcctcaccttgaactgcatcgacgcctcaacctgccggggcaaggtcacgtgccttgcggaggctataagaatgttggggggttgtacaactccatagcttggtgatcacggtggaggactacaacagctcccgcagaaggcctgccagcttgttcgccatggacctcaaccacaacaagctcgatctcttctactgactgctggtgtgcatcagcaccgtcaaccttcatgcatcccctagttcatgtaccggtactttggccgcggcagagtcgacatctgagatatatgaggccttggaattgaggaatggtggatctgattattttgtcaagggtgttcttaagatattgctaaaggaggtgctcgcagggaggaggacctcaacgtggtgggcatactttgcagggtgcagagatactgtccaaggaaggaatcagtgctgaggtaattccttttgtaaacgttatagtttcactgatcagtgcacgcacccagttacaagtcggattccacgtgcccacgccgtccgcgcaagtttgcatcaaagcgctggggaggatggaatggcagatttgcattaaaccagcgacaccacttcataaccagcaggcaggcaacacactccttcagatcggtgggatgttcgaaaaagataagcccttgtaacctttgtatgcatagtaggcaatccttgtgtagtagaacccagggatgaacattacaatgcccaacatcatgaagaaaattcctgatacaacataaagggccataagtttaggtaaagggagtgaaaatattcatgcataagcactgcatttcatttgaataagtacttaactaaaactgctatatgaaagggttcaaaatgcatcagtacttgaaaggtgaatcagcatccatgcaaattatcaagcctgtgcgagcaaatcacaacttgttctaatcaacaagcagtttagtgcaaatcacaacttgttcttaatattcccctatcataggcttctagcgtggagtatgaaaatatgtgatatatattgtggtggtattgttttctgatgaaatgaatattattaccccataagtggacacaggccagttgaaccaatacgaacccgatcaactacatcgatgcatcaccaacccaagcatcccaatccaaacaacttgtaatttgaaactagaggtacattatagtaccccttttctttttagggaactagactattaaggaacaccttttctctagtggggtacaagactaatataatcagtttgtgtgacccgcctgaaaactatgttctgttatcagtattttgtgccgtcacaattcagttagcagcatgcatgttcaattgttggtgtctttgttaagtttgagtagaaaagctcaatctagcatgctcttcgctctgttttactttccatgattcgttgattatctatgcagtttctgcacgattactatgagtatgtgctttcatatattgtttactcgatgacttgaatagtttacaacgtatgattattgcttaggaccctgcactactaaatcaggggactcgcttgagtcagaaaaacttaggaaccaagttttctctctaagttactgacttcattttctactgtttatagattgcgaactgaatttaaatcaaatacttcagtattggtctctagagaggaagctctgccaaccattactaataactgagaaggatttggcaatcgcttatctttgactcaataccttatgacctcggaaaggtttgaacccgtcagggactaaagatgccaaaggttgaagaagggtcacgagcaaagagggcatttactatcctttgcaatcttcaccgttggaaggattatgataactgcaatttcatttcttcttggatatgagctccacaagaggatgagacccctctcttcgccatatgtataggtgaagcaagctagaagctcatcttgtacccgcaacaagttgatacctgcagcacgtggacaaagctagatggcgtggacaaagctagatgggaagcctagtataattgcaaagtgaatcagttagattctagtagttactaaaatttttaagtgatatttgtatgatattgccactttggctttgcttctttgtgaacacaattggcagttactgaacatgtttgctatcgagttagttagcttcttgatattttgccaaggccaaaagcaatattattgagggtttataatttgattttttaacat

SEQ ID NO: 9946 - DNA, 3078 bp, Zea Mays
gtccgatcctacgtttcagtctcgcaccctgatcccgcacaccagtcctgctcatggctccccgaaaccgtcgccccagcctccctcccctccccggctcccccgatttcagctgcccccgaactccgtcccctgttgtccctacctcgattctgccgccgcaaacgccgatgtgagtcgtccgatcccacccgcaaacgccgctccccgcctcgaggctcgccggaacggacgcctggataccgcggccgcaacccaccgccgcgcagggaggttgcgcccgcactaaaatggagcacagggaggctttgccccccacaactcggaggacgtgtgcaggccggagggcatgggggaactcgtgttgaggtctatgcatcaacatcttcttcaagaacccaaggttgttggggttcaatgtcggctggacaggggatggtgggggcggccaggtgatgtaagccaaatcgctttcggcctcctccagcagcgctgcgaagacgaggtgctcgaggtggcccagcgggaccacgaactggtgacggaacctgctcaacaaccacgcgcgcttgacctagcccccaccggagaccctcactgtggcctcctgagtcggatcacgcctcaccttgaactgcatcgacgcctcaacctgccggggcaaggtcacgtgccttgcggaggctataagaatgttggggggttgtacaactccatagcttggtgatcacggtggaggactacaacagctcccgcagaaggcctgccagcttgttcgccatggacctcaaccacaacaagctcgatctcttctactgactgctggtgtgcatcagcaccgtcaaccttcatgcatcccctagttcatgtaccggtactttggccgcggcagagtcgacatctgagatatatgaggccttggaattgaggaatggtggatctgattattttgtcaagggtgttcttaagatattgctaaaggaggtgctcgcagggaggaggacctcaacgtggtgggcatactttgcagggtgcagagatactgtccaaggaaggaatcagtgctgaggtaattccttttgtaaacgttatagtttcactgatcagtgcacgcacccagttacaagtcggattccacgtgcccacgccgtccgcgcaagtttgcatcaaagcgctggggaggatggaatggcagatttgcattaaaccagcgacaccacttcataaccagcaggcaggcaacacactccttcagatcggtgggatgttcgaaaaagataagcccttgtaacctttgtatgcatagtaggcaatccttgtgtagtagaacccagggatgaacattacaatgcccaacatcatgaagaaaattcctgatacaacataaagggccataagtttaggtaaagggagtgaaaatattcatgcataagcactgcatttcatttgaataagtacttaactaaaactgctatatgaaagggttcaaaatgcatcagtacttgaaaggtgaatcagcatccatgcaaattatcaagcctgtgcgagcaaatcacaacttgttctaatcaacaagcagtttagtgcaaatcacaacttgttcttaatattcccctatcataggcttctagcgtggagtatgaaaatatgtgatatatattgtggtggtattgttttctgatgaaatgaatattattaccccataagtggacacaggccagttgaaccaatacgaacccgatcaactacatcgatgcatcaccaacccaagcatcccaatccaaacaacttgtaatttgaaactagaggtacattatagtaccccttttctttttagggaactagactattaaggaacaccttttctctagtggggtacaagactaatataatcagtttgtgtgacccgcctgaaaactatgttctgttatcagtattttgtgccgtcacaattcagttagcagcatgcatgttcaattgttggtgtctttgttaagtttgagtagaaaagctcaatctagcatgctcttcgctctgttttactttccatgattcgttgattatctatgcagtttctgcacgattactatgagtatgtgctttcatatattgtttactcgatgacttgaatagtttacaacgtatgattattgcttaggaccctgcactactaaatcaggggactcgcttgagtcagaaaaacttaggaaccaagttttctctctaagttactgacttcattttctactgtttatagattgcgaactgaatttaaatcaaatacttcagtattggtctctagagaggaagctctgccaaccattactaataactgagaaggatttggcaatcgcttatctttgactcaataccttatgacctcggaaaggtttgaacccgtcagggactaaagatgccaaaggttgaagaagggtcacgagcaaagagggcatttactatcctttgcaatcttcaccgttggaaggattatgataactgcaatttcatttcttcttggatatgagctccacaagaggatgagacccctctcttcgccatatgtataggacctaccttcttgacatgacctatgcatccaaaagttctgagatgacccacttgtggtttactgccatgccatgcctcatatggagttttcccttgcacacttcttggcaatattatatatgaggaggtacctagaccatctaatcagattcgtacactaattgatgctattggctatgttattccttggctaattacacatgtgaagcaagctagaagctcatcttgtacccgcaacaagttgatacctgcagcacgtggacaaagctagatggcgtggacaaagctagatgggaagcctagtataattgcaaagtgaatcagttagattctagtagttactaaaatttttaagtgatatttgtatgatattgccactttggctttgcttctttgtgaacacaattggcagttactgaacatgtttgctatcgagttagttagcttcttgatattttgccaaggccaaaagcaatattattgagggtttataatttgattttttaacat

SEQ ID NO: 9947 - DNA, 2232 bp, Zea Mays
ctgttgtagagttaccttcggactccaggccctcatccgcccctcctccccaaacgaaatgctatatttgcagaaaggtcccaatccaagtccaacaaccgaaaagaagacgacactcggagggctttcctgtaagtttcgagggcggcgaagcactagggcatccacctcggcggtggcggcggcggcctccatgtcgggcagcaacgggaacggcggcggcgcctcctccgcgctctatggcttatacggtcccaacgtgaaacctgatgttgtttttaaggaggctgctttaaactctacactaaacctgcaggatgttcagggtctagttacttgggttattggtgacggcatgctgccttcttgggtgtttgttaagaacaaacctcttatacccaaagtcgtcctactatatgttcctggccttgatgcagctttatatatgtcacaaactcgacttctctcttctctgaaagaattatgtggcaatccaaaacctgttctagcttcaagctgtataccggatgataggcacacaattgatgcactcctaacctgcagagtaaagagaaagcttgatgtaaaaacatcaaatcagtcatctaaacctgacagggatggaaaactatcaagtctggatgatcttggggacataccatttcctgttacgtattacacactttcagagaaagacttggaagataatggctaccccttcaatttaccaggttttgtccctactgtttcagctccttcaggttccttgccacataaagttcttgcacttgattgtgaaatgtgcataacagaagctggatttgagcttacaagagtgacattaattgacattaaaggatcggtggtgctagatagactagttaagcctgctaatccaatcattgattacaatacaaggttcagtggaatcactgctgagatgttggctgacgtgtccacatccctgcatgaaattcaggaagagtttgttggacttgtatatacagaaacaattcttgttggtcattctttggaaaatgaccttatggcattgcagatatcccatggtttaatcatcgacacagctgttttgtacaagtataatcgaggatctcgctgtaagattgctttgcgtgtcttgacaaaaagatttctcggccgggagatccagaacacaggatctgggcatgacagtgtggaagatgctagagctgctctagaacttgctatattgaaaataagacatgatcgatattcagatacttcttgcaattcaattgctgtcttttctgatgatgatgccctctccagatcaatgaaggaggtgaagaacgacaaagtggctttcatttggacccagttctcaggattgatctcttacttccgccgaagagctgaagatcccgaaaagttgaaatcatgtgtcgcagaggctattgcattaaaaacatgtgatacaaaaactgcttcaaaaaaagcaaaaagtcaaatttgtcctgaattaaaggaaattttgtgtgaattggataaaaagataaagcagttatatggtgccctacctgacaattctatgcttattgtatgcaccggccatggtgatactcctctagtacgaagattgcggaaaatgcttcaccatgaagaagaaacaatagatagccgggaaaatattgtccaagctctgggagatttacaagcccaagccgaagttgctctgtgcttctgctgtgttaagcattaactaactgcatctttggattaatgtactgatggatatggcttcagccattatagaaggggggtggcaaaagttccggctatatggtatcggaccatgttttcgattcataatatggcccttactatttacactcagggagactgttcatgcggggaagaacattggccactgcctacggaagtgcggtaaatggcaatatgacgcacgtgctcctgatcctgatgcagccagcctgacgaatcccaaatacgggcaggctattgggtttgttgaccccaagctgtccttggagagttgaattcattaatttatttatggctagaccaggatgttatggttgcttgttactttcactgaatcttcaagtgggttcgttgtataaataatactctcttcatttttttaatctgttgcggtatagtttaaaaataaactaacgagcgacaaatattgagaaccaaggtggtacacccttcgttccagaatagtaa

SEQ ID NO: 9948 - DNA, 2315 bp, Zea Mays
ctgttgtagagttaccttcggactccaggccctcatccgcccctcctccccaaacgaaatgctatatttgcagaaaggtcccaatccaagtccaacaaccgaaaagaagacgacactcggagggctttcctgtaagtttcgagggcggcgaagcactagggcatccacctcggcggtggcggcggcggcctccatgtcgggcagcaacgggaacggcggcggcgcctcctccgcgctctatggcttatacggtcccaacgtgaaacctgatgttgtttttaaggaggctgctttaaactctacactaaacctgcaggatgttcagggtctagttacttgggttattggtgacggcatgctgccttcttgggtgtttgttaagaacaaacctcttatacccaaagtcgtcctactatatgttcctggccttgatgcagctttatatatgtcacaaactcgacttctctcttctctgaaagaattatgtggcaatccaaaacctgttctagcttcaagctgtataccggatgataggcacacaattgatgcactcctaacctgcagagtaaagagaaagcttgatgtaaaaacatcaaatcagtcatctaaacctgacagggatggaaaactatcaagtctggatgatcttggggacataccatttcctgttacgtattacacactttcagagaaagacttggaagataatggctaccccttcaatttaccaggttttgtccctactgtttcagctccttcaggttccttgccacataaagttcttgcacttgattgtgaaatgtgcataacagaagctggatttgagcttacaagagtgacattaattgacattaaaggatcggtggtgctagatagactagttaagcctgctaatccaatcattgattacaatacaaggttcagtggaatcactgctgagatgttggctgacgtgtccacatccctgcatgaaattcaggaagagtttgttggacttgtatatacagaaacaattcttgttggtcattctttggaaaatgaccttatggcattgcagatatcccatggtttaatcatcgacacagctgttttgtacaagtataatcgaggatctcgctgtaagattgctttgcgtgtcttgacaaaaagatttctcggccgggagatccagaacacaggatctgggcatgacagtgtggaagatgctagagctgctctagaacttgctatattgaaaataagacatggtcctgattttggttcccaaccatcgttgtcaaggcggaaattgacatctatactgcatgagagtgggaaaaaatgctcccttattgatgacatgtctattctagatcgatattcagatacttcttgcaattcaattgctgtcttttctgatgatgatgccctctccagatcaatgaaggaggtgaagaacgacaaagtggctttcatttggacccagttctcaggattgatctcttacttccgccgaagagctgaagatcccgaaaagttgaaatcatgtgtcgcagaggctattgcattaaaaacatgtgatacaaaaactgcttcaaaaaaagcaaaaagtcaaatttgtcctgaattaaaggaaattttgtgtgaattggataaaaagataaagcagttatatggtgccctacctgacaattctatgcttattgtatgcaccggccatggtgatactcctctagtacgaagattgcggaaaatgcttcaccatgaagaagaaacaatagatagccgggaaaatattgtccaagctctgggagatttacaagcccaagccgaagttgctctgtgcttctgctgtgttaagcattaactaactgcatctttggattaatgtactgatggatatggcttcagccattatagaaggggggtggcaaaagttccggctatatggtatcggaccatgttttcgattcataatatggcccttactatttacactcagggagactgttcatgcggggaagaacattggccactgcctacggaagtgcggttgatggtgtacttgcaatccatattctggcttggctttgtttcaaggaaggacaaattggtggtaggagagaggtggaagtagatgggatcacgattgattttgttgattgccatatatcacgaacttatattgcaagaaatattttctataccttttataaaagacatgtcctgtgcattatttatagcagatgatggaagttcaaggatcctgagatatcctgttcgctttagattaaagtcatctgtttgaactgcaatttatagagacaaagtttttg

SEQ ID NO: 9949 - DNA, 2844 bp, Zea Mays
ccaaaggctcttccttcagaccgaagcgagccactgtacacgcctgcggccttagcagaactgactccctcttcttcgtcttcgcgagcagcgaggcatcacacgcgcctgcacgatctcctcctgcgagcgagatctcaccaccgcagcggcgccgtggccatggcgggaaggtactaccagggccagggcggtggcgggggcacgtccatggaggtagtcagcacgccgaaccaggagctggccctcaccaactgtgcatacgtctgccccgcggacctccgtcgcttccccaacgcgctcgccgtcgtcgccgactcctgggtcttcaccctacgtgaacacaatgctgtcgcaagcgggcgcattgccttgaatgctattcaacgtcgtcaggcaaaggtttcagctggggattctgttactgttagcagttttgtcccccctgatgatttcaagttggctttgctcactttggagctagagtatgccaaggcaagagccaaccgaaatgacgagctggatgctgttgtgcttgcccaacaactccgtaagaggtttctggatcaggtcatgaccttggggcaaagggtgccatttgaatttcatggaacaaactatgtattcaccgtcaatcaagctttgctagagggtcaagagagttctacaccattggatagaggattcttgtcaagtgatacatacatcatatttgaggctgctcctaattcaggaattaaggtgatcaaccaaaaggaagctgctagcagcaaacttttcaaacataaagagtttaacctggaaaaattggggataggtgggttaagtgctgaattcactgacatatttcgtagggcattcgcttcaagagtctttcctcctcaagttgtcagtaagttgggcatcaaacatgtaaaaggtatactgctatatggacctcctggtactggcaagactcttatggcacgacaaattggaaaattattgaacggaaaagatcccaagattgtgaatggacctgaagttctgagcaagtttgttggagaaaccgagaagaatgtgagagatttgtttgctgatgctgaaaatgagcagaggacacgaggtgatcagagtgacctccatgtaattatatttgatgaaattgatgccatctgcaagtctagaggatctacccgcgatggtacaggtgtacatgatagcattgtaaaccagctccttacaaagatggtgttgaggcgttgaataacgtattgcttattggaatgaccaatcgtaaagatttgcttgacgaagctttattgagacctggacgattggaagttcacatcgagataaacctgcctgatgaaaatggtcgtttccaaattcttcagattcatacaaataagatgaaagagaattctttcctatctccagatattaatcttcttgagctagccgcaaggacaaagaactacagtggagcagagttggaaggtgttgtcaaaagtgctgtctcgtatgctttgaaccggcagataaccatggatgacctcactaaacctttggatgaggaaagcattaaggttactatggatgactttgtgaatgcacttcatgaaattactcctgcatttggtgcttccaccgatgatctcgaaagatgcagattgcgaggtattgttgactgtggtaaggcacataagcacatttaccagagagctatgctccttgtagagcaagttaaagttagcaaaggtagtccacttgtgacttgcctgttggaaggtcctgctggaagtggtaaaacagctatggcagcaagtgttggcattgacagtgattttgcatatgtgaaaattatatcagcagaaacaatgattggtttcagtgaaagcagtaaatgtgcacagatttgcaaggtttttgaagatgcatacaagtctcagttcagcatcatagttcttgatgatatcgaaaggttactggagtatgtagccattggaccacgtttttcaaacttgatctctcaaactcttctggtcctcctcaagagggttcctcctaagggaaaaaacctgcttgtgattggaacaacaagcgaggttggcttcctagaatctgttggaatgtgtgacgtgttctctgtgacataccatgtccccaagctgaaaaaggaggatgcgaaaaaggtattgcatcatcttgatgtgttcgatgacggggaccttgatgcagcagcagaagcactggatgatatgccaatcaagaagctgtacacgcttgttgagatggctgcacaggggccaaccggaggaagtgcagaagcaatttatgccggagaagacaagatagatatcaaccatttcttcagcatcttaagtgatattatccgttactgagcccgcatggatcctaggtatccagtgggaggttatttgcacctgtgcttcatcaccccttgtggcatccttacagcgtgttaagagtggtttgatgtgttgtttttgtttggtgcgcctactagagctgttggatttgaccagaggcgaattccacgatatagcgttttttgtattgtatgacgatgtttctacagttgataataggatccagctatagacctcagaaaagaaatgaatttcattctccttttacatatggttccagctcttctgtgctcatttttagaatacgaacaatctgttttaaggctgcaaggacgccctaatcgaacttcagccacctggaatcggcttctccgctggtcactatactgctgcagctagcttatagatcacttattttgaacattgtggttgttagaaaattagttattttcagttgcattttaatccagaa

SEQ ID NO: 9950 - DNA, 2387 bp, Zea Mays
gattctattaccagtatcaatatgctgaaggagcaaagaccatcagccaaaatgtgcagtatattggatgaagcaggctatgaaaggagagaacagtttaactgttatttaccggattcatctaagagcctcaatgctgacctctatgttgaggacgaggacatgttttatgaacctcaagctgaaaaagattggcaatcaaagcatagtagatcagatggcaatcttgctgatgagaattatgatggactctggaggatggatgaatttaattcagaggatcatctttttactcaaagagacaaacatgttgatataagtggctatggatttaaagacggatactctccagagcgaagaaactcaacaagacctgtcacagtatttgagaatacaggaattcaatcctcacatgatctcttttctgatcattcattgatggatgatgaggacactgaacttttcaagtgggaaagtcacccaccaagtaagaaaaaatccaactcaaatagcaattttggtccttctgcttggccttatgacatggtcgatggttcagagaaaaggagtccaataagtgaagaatcatgctcatctgctgcagcgatgaaggatagaacgtgcaagaaacaatcaccatcaatgaagaatgatatgaacgagaatgacgagtttcatataagattggataagctggatattccaaacatggatgcacctcttcatgggaggtcactgtttaacaatccagaaaagttggataggaaagaaacagcacctcggaagaaacttgagacaaattggttgcaaagtgttactgggcagccaagaactcaagaaccaagctgtcggttatcacttaacgagaaattttctaattgggattctcctactttccgttcaaagagtactactggactaactgataaatcgagttgcaccatgttgcataaggataaatcttctttcgatgccgctccagatttggacatgtatcaaactgtggagtcaactcaaaagaggcctgtttcaaaagttcattctatttatcagaggcctgagaaacctatttttgaagacgaaattcacatgcagcatactgtttcagatatgtttcatgataaaattgaattatcgaacccatatcagaacaagaatctccagagtgacattgatatgagcactttcattgggcagaaggtggagaagcaagaagatgaatttccatgcttcagcagttcaagtgcagacaccttccgtgcagagaaagcagcgcgttctgtaagacaaactgttgatcgacacagtacatgctcacagccttctggcagggattcattcaggcacgggttcagtcctggtttcaatttccaggagtcagaaccaaacacgttttgggcagatagctatgtttgcaatggtacttttcaggcgggtcttgagttcagtggtgtggttgcaagaaaagacagtgataagaatgaagtcaagattgaggcatctgagaaaccagatactaagatattgacaggaacatgttggctctctgcagataacaggaatgtgattaatgggactgaaacatgttctgatggctcagaagcgttcaattgttctgaagcacagaaggaaacttcagcagtagtgacacaaattcctgcgaacttgagctctcttcgggaaacctcagcagaactgttccaagttcgtaatcacgtcatacctgtaaagagggaaaagatatccacgatgttagagatcattctaaactaaatactacgtttcgatctcctttcattggagaggtggtggggattgagaagaagattgtagcgaacgtgtcacccgacaactctgatgttcagtatcagtttatgcttgaacaacgtgttcttcggcggctttgtgttcagaagatagtggtgcctacaccgatgaaggacaggctagacaaggatacaaacttcacgatagcggaggatggatctcttcatgtccttccaaaaagcgtctaacagattcacatcaggggaaggaaatgacaatgtagggaaggaactcatttcatgcccgcgaaatgcaggagcaagcccatacacacgtctgagttcctctgtgctcatattctcatttaagggcacctcgctcgtttgtagtgtctgtttggaaatagtaatctttccttcactcattagtcctagtgttgattttcaccataatatcgcttcaatgtatgcgtgtggaaatatggatttctgaattgtttgttgttacttaagtagtgtttggttccggaatatggtgggacgaagctgtttcactctcaatttattgttgtttggattggttctgtgtagaatagagtggctataaaaaaattatgctca

SEQ ID NO: 9951 - DNA, 1576 bp, Zea Mays
caccaacaccacccgaagctgattgacgctgagcgcagccaaatccagccagcgataggaatatcgccaagaattctaccgtctgcgtctgcccgtcttcctctctctctctctctcctctccctcattctggatccaccgccgcagccttagctgggtccgtcgctgtcgctccgcctcccgctcgcttgccgggcccgacacgcccgccaccgcctccgctttgtctctccggcgatccgacgccccacccggcgtctgtgcagagcagtcgtgaggagttctctgttgtgggctgcccggcgatggaccggggcgagcgtctcggccgcgcgctggacgccttcgggggcaacctgtgggcgctggttgacgcagcgctggacgcggccgctcgcgaccgccccgacgagcttcgcgcgcgccgcgatagcatcgtcgagcgcctctacgctgccgccgcgggctgtagcaactgcgccgggcgtccgccgtctgttgccgctttagcggccgcggggctggaggaagaggacggcgaggaggcggctccggcttctccgtgggcggaggctgacgcgcaagccggtggcgcggaggcacagaccgagcccgagaacgagctggtgagcttgctgcagaacctggcagacatggatgttacctacaacgcactccaggagactgacatcgggcggcaggttaatggtctgcgcaagcatccttcggccgaggtcaggcggctggtgaagcagctcatcaggaagtggaaggagatagtggacgactgggtgcgcctggacaattccggcggtgacggcagtgcctctgttatgacagctgatggtgactccccacataaaatccaaggcagaagccaccaaagccctcgggtttcggggtttcagtattctccaagcccacagagatggttcaacttcagagatggctaacaatgggtttgagtcaacaatggatgcgaagcgtagggccagccctgtaccagcacatcataactccaggcagatgaacaacaatcatcattctactactattaccaccagcacgtcatctgctccagctaaagtgacaagggagcaaaagcagagtcttgtggaccttgacaggcttgattctgccaggaagaggctccaggagaattaccaagaagcacaaaatgccaaaaagcagaggacaatccaagtgatggacatcaatgacataccaaagccgaagagcagaaacgctttcatccgcaagagcggcagcggtgggctcccggcgaggcaccgatagcctaacctccttcgtcggctggatatctgcgacacttgcgaagttgtgccctagaaccgcaacgggaaagaaaaagaagcaaacggtttcttgttctttttttccctgtaccttgactgcctaggtttacctccagtgtaatattgtcaggtacataagggtgaaatgatatgatgtttctcgaggaaaaagaaagaaattagtcactgtttttgctatggtttggttgctgttattgctgttggtcagtgctggatataatatgcataaaatgtgtgca

SEQ ID NO: 9952 - DNA, 3383 bp, Zea Mays
ggactactcccatcctgtgagcccgcggctgtagaaactgtcgtgtgtgtgacgagtttaccagcgtacggtgccacaatcaccgtcaccagaagcacgaacagagaactcggaccgtcggtcgacgaggcatcggccatcgacgcaacactctcctccgcttcccttctcctcagtcgcggctcaccccctcccccttgccgatctaacgggaacgcgtctcacagcttccacgcgactgcaccgtgccacccgaggctcgcccccgctgagccagcggagcgaatctccatggcctccacatcctcctccaggtacgcgaaacatcgtcggatcggagaggacgatgagttggaggaggttgaggaggaggccgaagaggagcttgagcggttcgatgatttcaccattgcttcgtcatgggaaaagtactgcaaatctgcaataatgcttacagtgatgctatccaagtttattatcctcatgtttggtcaattttacttatgcataaaggattgttaacagtttcttaacatctaggtttatatctgagatagaggctatttgccgtcaatggcttgcagatggcgcaaagatcttaatgcaaaaaggtgcagagggtgttcctccttttgaaaacttatatatgatcaagcgtgaattgaagcatgggaaaagagtctattctatggagtaccatttcatgaaatctgcaaaaggtcaaaactcatattgggacgatgacacacatagcatgcagctctcatttggagttgatgagtttttgataattgctccgctgagtgccagtggtgtgatcctcgatgatccagaatcaactaagcttttgagttctgtagcaattgctctttctaattgtggcagcaattggccagcgtttgtaccagttcacgacccttcacggaaagcctatatagggattcaaaatctgggaactgtatttactcgaagatttgaagctgaccgaattggtagtcaagtgccaataagactcatgcatctggaggggttacatgagctatttctgtcaaaatttgtcctatcctcgtcagattttccagctagggtaaaggttcacttctcaatgaagcttagctacaagaccccagaatatgatcatgataatgaaactttagattctgaagctactgagccattgactgaaaatgaagttgtgaaccaccctagaaaactatgggacgatgattgcccttgggcagagtggtactctgctgaggatcctgttaaaggttttgagttgactgccatctggggagagaggacatttgaagagacccttgagatggctgaagtggaaaatgcctcgtcctttgatgctgatagctggttccttcacccagttgtatctcgatacatggtagatgattctattggaaaatttgttgggtttgcatcccagctacatcttctagtagcagatacttcaggccaggataatgcaaaatctactgctactgtgcctccaccatcagttattgatcgtgttatgaaagatcttttcagtgatgagactggcaactatatggaagcagaaaacaagtatagtcgtgctatgcgaggtgcacctgcagattcactttttggccagttctgtttgcatgcactgtgcctccttgtggaagtcatggaagagctgaaatatcagtgtagagagcagctcacgatatgcattgagaggaagagatcactgaaccgtgagaaaggtactggctacaaagatgagacttcaaatagtacggcagtgaacaagtctaggaaaggatcagctggtgttgtgcctaaaatgatgctcctgaatacgtttcaggaaatgcatgctccatatactcaggatgcacctttgatgaccgaagatatgcatgaagaaaggctccatgcagctgaagcttttggcaatgccattggtctatctggacagctggaaagggatatattatgttccgatatgtctgcttttaaagctgcaaacccagatgctgtctttgaagattttattcggtggcattcacctggtgaatggttgagcgaggacaaaacagatggtaatgcaggctggcctcccaaaggaaagctttctcaccgtatgtcccaacatgggaatgtgtggcgcaaaatctggaatgatgctctgccattgcctgtttctgaacagaagtctttgcttgaccctgttcgggaaggagaaaaggtgcttcattaccttgaaactttaaggccacagcagctccttgaacaaatggtgtgtacagctttcaaatcatcagctgatatcctgaataagaccatgtatggtggcttcaaggaaatgaagacaaaaatggatcgactatatgtcaccatggcgtcaacactgaaatcttttctagggaattctgatgtcaatgatttggttggaggcctgaaacggctttgtcaagtttttgagcacatcgagaagttactgattcttgctgcttccatcaatcggaagcttattgatgctccacgactagctcaagcaatattttacgactactacaacttctaccttccaaaaatgggaactagcctggaaagcatttgctatgagaaggagttcacaactaaggaaaaggtcgggatgtatgagagagatgctgtgtcgaacctgtttcctccccctactgctaatcagtcttggaggaaagttttgagcatgggaaatcttctgaacggccatgaaccgatgcaaagggaaatcatattctcagtccaggagagaataagcaacggtcattattcgagcccaaccccattatgtaccaacaatgagaagatccagacacataggatgtatatatctgggacatctaatgacctttgggttgcattgtctgtaacgtcctgggattgagctgcacgatgtatgagaggagcaattggtgttttaattagcttagaatcccgttggtgcagataaactatcattgtattttttttttgttggatgtaccagaagtccagaaggggccaccaggacatggctagtgacgcactgaggacaagcatccatttttgacatcagatcaaagtattgattatttacgtcttgtagcagtcagaactcagaaatgctaatatattcttggcttcctctagagaaatggttgtagacaagctctatttggctgacgtttttggtctgttaggtggtgggctggtgagttgcaacacacacactggggttgatgtacgtaaacatcttgtatgacttttgcaatgagctaggctttgttcaatactcgagtccatgaaattttcaatatttgatatctgcccgcatttttttagatgggttcatcccatgtattcgcagttcgcac

SEQ ID NO: 9953 - DNA, 3815 bp, Zea Mays
atgagcatgatcgacgtgatcacgcgggtggacgccatctgcaagaagtacgagcggtacgacaccgacaagcacggcgaccccttctcgcgcctctacgctgccgtggacgccgggatcgacgccgccatcgaggtctccggtctcccctcccttggtcttcccttggctgccttaaagacgaaatcggcgagggccgcgaagaagaagaagaaccgggcggcctcggtgaccctggacgccgacgtacggcggaccaaggcgcggctcctggaggtggtggtcaagctacagaaggtagccgccaggaaggtgaacgggctctcgccggaggagaaggtgtcgcgggctggtctggtggccgcgctgccccacaggatccatgccatccccgacagccacggcggtgtaacacccgacactggctcaccacgtgatgggcctcgatgtcgcatggcccaactcggagcagcctaaaggcaggaccacaacggcaggagaggtattgaagacaaatcagaaatcggaaacagggttcgtcccttcgctcgtcttcctccacggagcggcatatcggtgcgtcaccagctcctcacgtcccggctcaccatcggcggctacggggacgtgacagttggtatcagaggtagtcgattctcgacattttcctcggtttcgtccttggtgctcgcgacgatggctgaggcggcacaacgggatgaagcgcgctgggagttggttatgaagaagctgagttgtctggtccagaagatggagtcgttggtggggggtcaggcagatctagcagcagcggtggcgcagcaagcggcggaggatctgcccgttctgcctcagttcgttcgatctgcgggcaataccacgacgccagtctttgacgagggacctgtcttcgacgacgagctgcccatcgacttcggttcccaggggaagaccgcgtccatggcggcagcaagcgccatggaggtccccggatccaccccgacgccctccgtccccttctacgacagcgtcgacatcttccacctcaatagtgaacccgtctacgacgtctacgatgacgacgaggatggcgattcgtcgcagcaggccgtggtgctcgctgcggacaagaactactaccccaccgctgaagagatgtacgggccgggcatggaggcgcttgtcatggacgaggtcgagcaaccgctggagcagcccatcgtcgcagacgcgcttgcgctgctcgaggagatgcgaggcaaggggtaccatgctgacgtgatgaggtacgatgctgtcaagctattcgatgaaatggccagggccagggtcaagcccgacgagcgcgtgtattccctcacaatcagggccttgtgcaagctgcgcgatgcagacaggacggtccaggtgctcggggagatgatggaggtcggcttcaggccatgggtcttgacattgacatacaactttgtggtggctgtgctcgtgaaggcaggaaggatggaggaggcactaaaggtgaaggatcagatgttgttggttgctggaaagaagatggatgtggttctcgcgacaacattgatgcatgggtattgcttgctcggtgaagttgggaaagcgttggatttatttaacgaggctgtcagggatggtgtgacagcaaccaatgtgacatatgcggttctgataaaaggttgtgatgcagaggggatgacagataaggcatatgagctatgtcgtcagatgatagagcagggattgctgtcaagcacacatgggttcaatttggtgataacaggtctgttaagagacaagcggtgggaggatgccatcagcttgcttgaggttatggttgatataccttctgccggtactgcggctaagtgtgaagagcttgatatcatgacagaatgtgttgctcaatgcaatcttgtcactgctgtgtcctctgattttcatcctgaattcatctgtctgtttgtcaaaaaatttggtggctctttggcagtatcaagcaagagagtattgtttctcagttggggctacatggaggagtatgaggttctgattccatttcagttgcttcaggttcgtgagagccaagtaaatgatgtttgccaggacatgggtgtgggagataagtgcttggctgccattcatgactttggcgatgttcagggtgtagatgaagcaaaggaggagcttgttgagatagtgagctgtctgcatggttcactgaactccaagaagcttggagcaaaattgccctggggtgtcctgcttgttggccctccaggaactggaaacactcttctagcatgggcagttgcaggagaggctggaattccatttttctatgtttctgctagtgagtttgttgaagcttttgttggaagaggtcttgcccgtgtcagggaattgttcaaggaagccaaagaagctgctccatccatcatttttattgatgaacttgatgttatgggtggaaatagaggtagaagttctaacgatgtgagggaccaaactctaaaccagctaattgcagaaatggatggttttgactcggacatgaaagttattgccatggctgctactaacaggccaaaagcactggatgttgctctttgtcggcctggtcacttctccaaaaaggtgtagtcttggagacttggtccttttactctaggagtaagtggtctgcaacttgggccatacatgaggagacaatgggatcctggtattacaaatgggcaattggtgatgagctgcgaggagctagctttgcagatcgcagtgttgcttggggacaagcaacatttcatcggggcgataatgtaacacccgacactggctcaccacgtgatgggcctcgatgtcgcaaggcccaactcggagcagcctaaaggcaggaccgcaacggcaggagaggtattgaagacaaatcagaaatcggaaacagggttcgtcccttcgctcgtcttcctccacggagcggcatatcggtgcgtcaccagctcctcacgtcccggctcaccatcggcggctacggggacgtgacaggcggcagcgccacagaccaggacgccggctggaatgctcggccggggatcgagctggacgattattcagctgaaagattagaagaggggtacttccagacaagtgaggagtcagagcagttcagacgagagtacgagatgcggcgaatgaagcagacaggatgaagggctggacttcgtctcgcaaggtctggacacgctcaagaatctggccgaggacatgaaccaggaactggataggcaggtccctctcatagatgagattgacaccaaggtggataaagctagtttagagatcaggaggactaatgtcagactaagacaaactgtcaaccagtttcggtcaaccaggaacttcacaattgatatcatcttgatctgcatcattcttggcattgcaacatacctctacaacattctctcccagtgaagtgactcttggccgatctaaatgatgcgctcggtaaatgcattttcaaacaactgtatagctatggcaacatcagcgtcgccggcgcagaaatgattttaggcagctgcatttttgcagagcccttagcatgtctccaggataacctatgtcagcatttgctgtaaagaaaaggaacctcacaaaaacaaaggacagacaacagtctttttgtccaaaaggctgtccgtaacttgtattgctgtcacaagaaccatacgcaaaggaaagttttgactgtccaagcaattgaaacaatgagcacatacacacaaaaacctaaggca

SEQ ID NO: 9954 - DNA, 1567 bp, Zea Mays
ccccgatccagcacagacagacacacaccggaaggaggcgcaccttcccccagccccactatacgacgaccgccgcggtcgaaccaaaacagcttcctcctcccggcgtcgcctccgcgacgatcctttccgccgccccatagggttctgctgctcccgatccgggcgccagatctcgcgtggcgacgcgcggatctcggatttctctagaggcggcggcggcggcggccggagcaggaggagatggcgctctcggggatgcgggggctctcggtcttcatcagcgacgtacgcaactgccacaacaaggagcaggagcgcctccgcgtcgacaaggagctcggcaacatccgtacgcggttcaaaaacgagaagggcttgtcaccatacgagaagaaaaaatatgtatggaaaatgctttacatttatatgctgggttatgatgttgattttgggcatatggaaactgtctcgttgatatctgcaccaaagtatcctgagaagcaggttggttatattgtgacatcttgcttactgaatgagaataacgatttcttaagaatggtaataaatacagtaaggaatgacataatcggacgaaatgagaccttccagtgcttagcattgacaatggtaggtaacattggtgggaaagaattttctgagtcactagccccagatgttcagaaacttcttatttcaagcagttgccgtcctgttgtcagaaagaaggctgctctatgccttctgcggctttataggaagaatcctgatgttgtgaatattgatggctgggctgatcgaatggcacaacttctagatgagcgtgatctaggtgtgctgacatctgtcatgagtctttttgtttcactagtatccaacaattctgaagcatattggaattgtcttccaaaatgtgtaagaatattggagagattagcaagaaatcaagatattccacaagagtacacttattatggaattccatctccttggcttcaggttaagacaatgagagctcttcagtacttccctaccattgaagatcccaacgcaagacgggctttgtttgaggttttacagcgtattttgatgggtactgatgttgttaaaaatgttaacaagaacaatgcctcacatgctgttctctttgaagctcttgctctggtcatgcatctggatgctgagaaggagatgatgtcacagtgtgtggctcttcttgggaagtttattgcagtccgggagccaaacattcggtacctcggtctggaaaacatgactaggatgctgttagtaacagatgtgcaggatatcattagaaggcaccaggcccagatcattacatctttgaaggatccagatatcagcattagacggagggctcttgatttattatatggcatgtgtgatgttacaaacgcgaaagaaattgttgaggagttgttgcagctgaatttgcaatgcgtgaagagttgtctctgaaggcagctattcttgcagaaaaatttgctccacaactattgtggtaagattttgatcacaggatctgccaattctccagctacta

SEQ ID NO: 9955 - DNA, 1083 bp, Zea Mays
gccgcgacctggggattagggttcaggacggggacgtagacggcggcggcgaggtgaccgcgtcgccgcagcacctggtgttcgcctactacatcaccggccatggcttcgggcacgccacccgcgccatcgaggtggtgaggcacctggtcgccgcggggcacgacgtgcacgtggtcaccgccgcgcccgagttcgtcttcaccaccgagatcgcctcccctagcctccacatccgcaaggtcctgctcgactgcggcgccgtccaggccgacgccctcaccgtggaccgcctcgctcgagaagtgcagtaccaccagacgaccgtggtgccccgggagtccatcctcaagaccgaggcagagtggctcaactccatcaaggccgaccttgtgatgttgtacccgtcgcgtgtagggcagctgcagatgctggcattcgatccgtgtgcgtcacgaatttcagccaccgacgccggtggcggcaagaagcccaaggagctgaagcagaagaagggcaagaagccgaaccccttctcgctcgagtacaacgactcggcgccggctagcgcgccgaggctggtggtgctgcgggagcccacggggcgggacatcgcggagcggtacgagcttggagcggagctcaggcgcggcgagttcgaggtcacctcaacttcatggagagtgtctggtgggtgtttgcaaagctctgggagaaggacctcatatataagggtgtcaaggttgcatctctaacctttacaatctcggaacttgcgcgtgaagcacatgtagtacttctacgcgtagctgccattttggtggatcaacagctcaatttatgtagaagtggatggtaaggagataggcatagcccacatgcgttggcacctttggcggagaatctatgacctgtacttagggaataggcaatttgcagttgttgagaataaaggattctggaactggacctttagcctggtggatgaagatgacaaactgttggctcagattgatcgtaattggaggggcaccggctttgagatttttttctgtgtagccttttatacagtactgggctttg

SEQ ID NO: 9956 - DNA, 944 bp, Zea Mays
aacgcctagccccaatgcactgcacccccgcatcatccaccccctccctctcatcaagcctttttctcgaccgcgatagtgacggcgacaagccgacaagcacgacccccctctgcctcgccacgtgtggcctcctccaccgcctggtttggagttttcccatccttgacggcccggttcgaaccccgatcaactatcctccagatcggatcatggcgacgacgcaagagcgagatgtggcgcagccctaacgacggaggaggcgacgtggagtaactatgtggtggcggagcgcaaagtcgacgaagactctctctgccgccttctcacgttcgactaccttcaacatgctcaagctcgccgaggaagccagcaggcggcaacatcctgttcgactacctcatcccgccgacggggatggacaagtgcagcacgaatggacaagtgtagcgcgaacaacgtgggcagtggcaacgtacacaaggcgggcatggtgatgaacaggttgcccatcagtgtgtacgcattggagacgtttgggtttacgacggcaacgtccacagacggttgatgagcaagatgctcgggcgcattggggattcaccattgatcaggttcggcacatacacatgcggcgcatgcgccgtgtcgtgcacgctcaagtgggacgtgaccactgtcatggagtacaagggcctacctctgcagcagaccgtcgactactatgttagggacacgatgtagaatatccgaagacaactattatcaataattagccaatataaactatttacaaatctttacaaatgtttacaatataggggtttagacaatatatgggtttgatatatgaacatgtatggtgtttaattgcttcttctactttgttctaattgatgaataaaaaatgaatgggtcacatctcatgaagtgatccaaaatta

SEQ ID NO: 9957 - DNA, 530 bp, Zea Mays
cagatacgcacgtacgctccggcggtttcgatcgagcgaggtgggcggaaggagaaggcatggcgaggctcctggtgatgatcttgctcgctctgtttctcctcgccgtcgcgcccgctcaagcggctcgcttcacaaggggcttgagagcgaggatcggcgaggctccggcgctagaggctgcgcaagtttcagcagagcgaacgacacaggaggggcagatctggcggtctttgcttcgaatcgtcggtgttgacgcctctgttttcttccggatgccggtgaagaagaccggcatgggagcggccggtgaatttacctacgcttcattggagaagaccgacgtgggtttggagggaggcatcgcgcgctccgtcggtggacgagggggcgggcacggcggtgggatgggtggggtgcgggtgagatttgctggggaggctggcgcaagggggcagggctggggctgcgggtgcggggcgggggcaagcgggggcacggagctatggacaacctccttagcttcttaa

SEQ ID NO: 9958 - DNA, 1872 bp, Zea Mays
gccgtccgcatcgtcatgagcaagcaaccgatgaacccatcagaagcattcaggtcccgtgccaagaatgcagcagctgggacggttgggtcgccggcgaacggcggcgacagctcgaagcagacatcaggtccagtaagctcgttcgaggagaagcagagagatgatgccgttcatgagaaggatgatgatgacccacgtgctggagttgctgctcttcctcccttgtcatcagacatcatgcaggaatcaggaggaggtcttgaagatctggaactgcaggtgcagaatgctattgcagcagcagcagctgcagctccacccaaggaaagcaatagtgtcagcagcaacgatcctggcagctcgtcctctgagatttttccgtctggtccaggaccagctgatcaagtccctgttcctgctacctctccagaaattgagcccctttttgcaaaccaaattcctgctgcttcttcggaggttaaggccgcccctccatttcatttggatccacctgtcgctgacgctgaggccaagcaaacagcgccgctgcgggagtggaagccgctgtgcgacctgacgtcgaaccgtcgcatcgactggtgcgagctggagggcgacgtccgcgtggtcggcggctccaacggcagcgtcaccctggtggcagcccctggcgcggacgagcgcagctttcacgaggagtcgtggagcatcaagccgtacccgcgcaaggcggacccgaacgccatgcgcagcgtgcgcgcgctggcggtgcggtcggtggccacggcgccgccggtggcctgcacggactggcacggcgtgccggcgctggtgttctcggcgcgcgggtacacggggaactacttccacgcgtacacggacgtgatcctgccgctgttcctgacggcgcggcagtacgcgggcgaggtgctgctgctggtgaccggcttccaggcgtggtgggtgggcaagtacctgccggtgttccggagcctgtccaactacgagccggtggacctggaccgggaccgggacccgcgcgtgcgctgcttccgccgcgtccaggtggggctcaccagccacgacgacttcagcatcgacccgcgccgcgcgcccaacggctactccatgctggacttcacccggttcatgcgcgccacctacgggctcccgcgcgacgccgtgccgcggcgggggcgggggcggccaaggccgcggctcctggtgatcgcgcgcgcgcgcacgcggcggttcctcaacgcggaggacatcgtgcgcggcgcgcggaaggtggggttcgaggtggtggtgtcggaggtggcgcaggaggtggcggcgttcgcggagctggtgaacacgtgcgacgcggtggtgggcgtgcacggagcggggctgaccaacatggtgttcctgcccccgggcggggtggtcatccaggtgctgccgctgggcccgctggagttcgtggccagctacttccggggcccggccagggacatggggctcagctacctcgagtaccgcatctcgccggaggagagcacgctgctggaccagtacccgcgggaccaccccgtgctcacggatcccatgagcgtccaggccaaggactgggtgtccttcatgggggtctacctcttcaagcaggacgtccgcctcgacatgaagcgattccgccctgtcctcaagaaggcactcgcgcgacttagagccaaacccaggaataacaacaacaaatgatcgatcgatgatcacatcatcgtccgtcccagtgtaattttggtacctcctgcttcctctgatctgtaggtaactcgatctttattttgaaccgagagctttcactcttctaattaatatatatagtct

SEQ ID NO: 9959 - DNA, 3987 bp, Zea Mays
aaaacattttgggaacaaattttttagtgctcgctcgctgagttatcccctaatccgccgggctactaaaaaccctaccttcctcatccagacactccccttgccgccgcctcctctgcccctctcgcgccgccatggccacctcgctctccaccccgtcgcagctccgcacctcacactgccacgcccgccgctacggccgcctcctcggcctccacccgcgcgtctcctgcgcgcgctgcccggctccccgccgcgccgccgccctctccgtgcgcgccaacgccgcctcgactgatggcgacgctgccgtcacggtgcgccgcttcccggccgcgccgaccaaggctgggcggctcgcgggcgtcaagaagatcatgatcctcggcgcggggcccatcgtcatcggtcaggcgtgcgagttcgactactccggcacgcaggcgtgcaaagcgcttgccgaggagggctacgaggtggtgctcgtcaactccaacccggcaaccatcatgaccgacccgggactcgcccaccgcacctacatcgggcccatgacgccgccgctcgtcgagcgcatcatcgacgccgagcgccccgacgcgctgctccccaccatgggcggccagaccgcgctcaacctcgcggtctcgctcgcggactcgggcgcgctcgaccgcctcggggtgcgcctcatcggggcatccctccccgccatccgcgccgccgaggacaggcagctcttcaagcaggccatggaccgcatcggcctcaaaacgccgccctccggcatcggcaccacgcttgaggagtgcctcgccatcgccgaggacatcggggagctaccgctcattgtgcgcccggccttcactctcgggggcacgggcggtggcatcgcttacaacaaggccgagtttgaggacatctgcagggccggcctcgccgcgtcgcacactcagcaggtgctcgtcgagaagtcgctcctgggctggaaggagtacgagctggaggtcatgcgcgacatggctgacaatgtcgtcatcatctgctccatcgagaacatcgatcccatgggagtgcacacgggggactccattaccgtggctcctgcgcagacactcactgacaaggagtaccagaggctcagggactactcggtggccatcattagggagattggtgtggagtgtggtggttccaatgtgcaatttgcagtcaatcctgctgatggggaggtgatggtcatcgagatgaatcccagggtgtccaggtcgtctgcacttgcctcaaaggcgacagggttccccatagccaagatggctgcgaagctctcagtaggctacactctagatcagattcccaatgatattaccaagaagactccagctagcttcgagccttccattgattatgtggttacaaagataccacgttttgcttttgagaaattccctggctctgagccaatattaaccacacagatgaagtctgttggtgaggcgatggcattggggcgtaccttccaggaatccttccagaaagctgtccgctcactggagactggttttgcgggatggggttgtggccctatcaaggaacttgattgggactgggaaaagataaaatatagcttgcgggtacctaatccagatcgtatccatgctatctatgcagctttcaagaaaggcatgagggtcgaagatatccatgaaattagcttcattgacaaatggtttcttacagagctcaaggggctagtggatgtagagcagttccttttatcaaagagcctagatcagttgtcaaaggatgacttttaccaagtgaagaagagggggtttagcgacaagcagattgcatttgcaacttcttcatcagaaagtgatgtgagatcaaggcgtttgacattaggcgtcactccgacatataaacgtgttgatacttgcgctgctgaatttgaagccaacaccccctacatgtactcttcctatgagtacgaatgtgaatcatctccaaccaataggaagaaggctggatacgagactattatgatgaactccaatcctgagacagtctcaactgactatgataccagtgatcgtttgtactttgagccactgacagttgaggatgtatcaaatgtccttgatttagagcgcccagatggtataatcgtgcaatttggagggcaaactcctctaaagcttgcgctacctattcaacagtacatagaggagaacaaaatggtgtctgcttcaggcactgggaatgttaagatatggggaacatcaccagattccattgatgcttctgaggacagaaaaagatttaatgcaattctcgaggagcttcaaattgaacagccaaagggagggattgcaagaagtgagtctgatgccttggcaatcgcctcagaagtaggttaccctgttgtggtccgtccatcatatgttcttggtggacgggcaatggagattgtgtacaacgacgaaaaactgatcaagtacctcgcaaccgcggtgcaagtagatccagaaaggcctgttttagtggacaaatatctaattgatgcagttgagattgatgttgatgcattggctgacacagctgggaatgttgtgattggtggaattatggagcatattgagcaggctggtatacattccggtgattcagcatgttctcttcctactagaacagtctcagcccaatgcctggaagttatccgttcatggaccacaaagctcgctaagcgtctgaatgtttgtggactaatgaactgtcagtatgctatatctacttctggtgatgtgttcctacttgaggcgaaccctcgtgcttcacgcacagtcccttttgtatccaaggcgattggccatccgctagctaaatatgcatcattgatcatgtctggtgtgaccttgccggagctcgggttcactaaagaagtgattcctaagcatgtgtctgttaaggaggctgttcttccattcgagaaattccaagggtgcgacattcttcttggaccagagatgcgcagcactggagaggtgatgggcatcgactatgagttctccggtgcctttgcaaaagcacagattgccgctgggcagaagctccccttaagtggcactgtgttccttagcctgaacgatttgacgaaacgacatcttgctgagattgggagtggattccgggagcttggcttcagcatcattgccacatctggaacagccaaagttctccagctcgagggcgttccagtggagccggtgctaaaaatacatgaggggcgaccgaatgccagggatatgctgaagaatggtcagatacagatcatggtgataacaagctctggtgatgctcttgactccaaagacggtctccagcttcgtaggcttgccctcgcctacaaggtgccaattatcacaaccgtcgacggcgcacgtgcctccatagatgccatcaagagcttgaaggacaagtcgattgagatcctcgccttgcaagattacttccagactgccgatgcttcggcagatttacaagcagcggcacagaccaccccttagtgctgtcttccttttccatgtactgtgatcctagctcgagccaaaacaacatcccatatgaattattttgtttacggttgcacctgcagcatgcatggcgcaaggacaggcatccagatcgtatcggtgacaagcatagctagacagaattggtattgggcgaatgtagttgtactctgtaatgttagttagggtgatgagcatccacaataaggcttcccaactgcgattttgatgactatcatattctttgtggagatttacattgtatcattgtcgcatacgaaactgtgcgacatacatgtaccgtatgcatgttatcagattcttagatgaccacacattggcacacccgtctctcgtctcgtgttctttcactgtgtgctctacaattgtacaaacaaacgattgtgtcaag

SEQ ID NO: 9960 - DNA, 526 bp, Zea Mays
aacttcgtcacggcgtcctgcttggcaagctcaggccacactacctctccagcgacgcctacggcctacctcattgatggcctcccctgctccaacctcgccgccggcgccgcgaagtcccccgcgaatctccccggcgtctgcggcaagacgggagctggtgaacaagattacaagacccatcaattgcctcctccaaccaccgtgtgttcccaagagaaggcccaaggctcaacgtcctcgctccatgcctcgccgcagcaggactgcaggagggtggccggcgttggcccctgttccccgggaccagtggtgtctgaggcgcaaaagaagcaattcttgaactccttacgtggcaccacttacccttgtaagctgactattatcacttagcgtggaggtggaagacttatgggtcatcaacttgtttttcggaccgccactcaagtagaaatattctgcttaggcctttctgaaagtaaaggtacttcccattttcaatagcagttgctatgataaactgacg

SEQ ID NO: 9961 - DNA, 2019 bp, Zea Mays
atttcagtaaacggtcgattcaaaatggggcgagacggagtgcagcaaaaaccccaagccccgcaaaacccctaaaccctagctccccacccccagcctccccgcggcttccagcgattggaggcgaagcagccgccatggcgatcctccttaggcgcgcgtcgctgcggcgcgtcatcgccttcgccgccgcctcctcctcctcctcttctttgcactctgagatttataagcaaggggtttgtggatccatgtttcattgccgagagttcgcatcaaaagccaaaaaaaagaagtcaagtggaacagactccgatgaggagagtatgtcaaagaaagacttggctttacaccaggctatcgatcaaataacgtctgcatttgggaagggggcaataatgtggcttgggcgttcgcaaggccttagagatgtacctgttgtgtctactgggtctttcgctttggatatggctctaggaactggtggtcttccaaagaggtctatggtccagaggcttcaggcaagacaacacttgctctacatgtcattgcagaagcacaaaagaatgggggttactgtgcctttgtagatgcagaacacgctttggatccagctcttgcagagtcaattggtgttgacactaacaatttgctcgtctctcagccagactgcgctgagcaagcactcagtcttgtggacacactgattcgaagtggatctgttgatgttgttgtagtagacagtgtagctgcgcttgttccaaagactgagcttgatggtgagatgggtgatgcacatgttgctcttcaggctaggttgatgagccaagctcttcgcaagcttagccactcactttcactttcgcagacagttttgttatttattaatcagatcagggccaaggtagccacatttggatttggaggaccaactgaggtcacttctggtggtaacgccttgaagttttatgcttctgttcgcttgaacatcaggcgtattggttttttaaaggaaggtgaagaggtagtcaggttgctgtgaagattgtaaaaaataagcatgccccacccttcaagactgcacagtttgagcttgaatttggaaaggggatatgccgcagttctgagctttttgaacttgggttgaagcacaagcttatccaaaagactggcggtgcatattatagattcaatgatatgagtttcaaaggtaaaaataaccttaaatcttaccttactgaaaacaagagtgttgcaaatgatctggagacgaaactaaggagattgatgggaaccgaagcacctaaagagcaggaggcagaagacagttcgccgagtgatttgcctgaagaggttgtcacacctgaagcatcctcagaagaggatatgggagtcgtaatcgaggcttgaccagtgatctgacgtgctggcaagcgagaccagaatttctggagctgttcctgtaaaacaatattttgggtcctgaagtcaccaccgcttggatcgacatgaccctgcggtgttctggtgattccattgtaacagacttcagcccttaccgtgcttttacagtagtgtagcatgaagagaattggcattgtgtgaaatcatgctgatagctgagaggtggaagttgaaggcggtaaggttgtggtctctggctatctgaactctagtgtagtatatagtgtaggcgacggtaaaatgtagtggcgtggtcgtgtatacatgatgctcacattttgagctcctggtttcacgtcgaagccaatttcaaaagcattctttattgagcgcagctagaattacatcgaattcccccctcttccggtacttgcctggtttctgctttgggatagctgttgcttggttattctgatctgcgctgatccgtgtttgccgatcaggcccgttggcaggtcctttatactggagtatctctttacaggcacattttctttgaggaatggtagacagtctgtggatcaagcaaagtgtcaatttttggaatcgaagtca

SEQ ID NO: 9962 - DNA, 857 bp, Zea Mays
ggaataggtctagtaaaacaaggcagggagtaaacaaaggcagtcaggctttccgattctttgtacaatgttctgtataaataaacgacaacctctgtgtccccaacagcgcaccgttgattcagaattcagctacgttgaacctgcggaacacaggcgcccacggcccacgagatctccgtaagaaggcggaacctgtagaagacatggccggcgagatgagctgggtgggcaagaagatccacctctacaacgtcaccatgggcctctacatgctcgattgattccgaccttgcttttctcgacttcgtcatcaactaaggcttatgttagatccccgtctgattctggcggggtatctttgcctctgtcccggcagggcttaggtttggacatactggtgctgatcctgctctggttcatctgcttcaacggatcccgcttcgccactgatgtctacgaaagccacctgaaggcacggattttccaaggcgcaaattacggcatgggaattggcatgccctcctcctaagccttcaacgcaaaacacagaagcagcaaaatctgctagttctggaatctgaactgggttccaacaagctgtagtgatgtgtatgatgtagttccaatatgtaagattcttaacattattctttattttaatgtactttgtgtaagtgtgtaactaaggtttgagcgcacgatatcacatcctgagttctactgtaattatatccatttccttggtattatgttttgttactcatttactatatgtggccacagtttgactgcatgacatcacattcatagtattattagcttgtttcttcaaatttcacattataattttttga

SEQ ID NO: 9963 - DNA, 499 bp, Zea Mays
gtgttaacttatattgattgtcaaacttccacggaatgatgtcctactaacagcaacatgggttattgagggtctcccaatttttggcattggtgttgggcatagcacatatgacaaagcttcggtaattactctgatgcttgctatttgtttggtaggctacaactacagccaaaatcataaaagtgtctggtttgaagctatcagcactaagccaaataaaggattccggctctcatcaagtgactccccctcacgttgactttgcggatgtctcaattctagtggtggagctacgaacaacaatccgatgtcctgatcgagagcgatggagttaatgtttgaacttgtgtgtttgaacttgtgaactaaaaatgtgaactatgtatgtgaacttgtgtgaatttgtgaacttatgtatttggacttatgtgaatttgtgaacttatatatttggacttgtgtgagtttgtgatatgaacatatatcaatgtgtttg

SEQ ID NO: 9964 - DNA, 2165 bp, Zea Mays
ctcaccgtctctcacacgctctcatcccctccacgccgccgccacccgacccgcgccgccggaccgcgtcgacgctccctcgccgctggggttaaggcgatcatcgatcgatcgagtttctgtgcacaatcgtggcgctgctgtacttcaccttcggcgaggtggacctctgccacatctcgctcccgtccttacccgtctccggctcgtcccccttccgcgcggctgccgtggcggcgcccttcgtggagcggcgcggggcttctttctattatctagcatgccctccgccacatcgagtttcagtgaagatttgttctcaagttgatctgtgcaatccagtaagtaaccgctgggcttctttctattgtctagcatgccgcatccctgaagaattcggcagggatttgtggcgggcactgtttcttcgcaacaaatttgtactggtgaggaaggaagacatatattagtactaacggtcggtagagctgttttaaactgaagaataatatcttgatcacctactttgtgctggctgtacttttctctgattgatgggaggttgctcccaggaccaacgctggaaaggcggtgcagtgtctttacacactcgctcaactcggacggcttgtactgcgtgtagtgagcaagcgtggagttctacttccagatgtaacgagtgtcgtcagccaccaagacagcatcattctcatcaggcaacaactgctacacaaagaagatatgatgccaacctacccaaggatacttcgttggctggagtacaaatctcgccaagaaaatagctgaggcagcgattagtgatggagagtaagacagaagactgtactccagcagggatagctcagcgatgtaattggccaggaactccagatgcagagcaggatcctgtacaaacaaagagtaggggcattatcacagaatccctgcctgccacatatacatgtaattcctggcagcagtacctcatcacacgcctgcatccgtgtccaagactccaactatcatacgcctgcatcctgtacaaaaaaattgttggatacttgaatacttgaatccaagctgccaagttggatacttgaatccaagctgtattcttacacctgcaaaagactccaactatcattcttgtgtcaaaaaaattgttgaaccggacacccatgtccacatccaagcagcactggtttagcatccttgtcctctacaactccatttggacaacattcatttatgggatgatggttcgtttcattatgatcaagatttatttaacagcaaaattacagtatattgaatgaagttgatatcaagcggcgccaagaggatgacataaatagggtttcaactgttctttcaatttccaaaccagaggcatgtgtcttctccgcaactataactggagtgttagtaaggtgcatgacgaatggtttgctgatgaagagcgtgttcggaaggtggttggtttaccagagaagcatattgaaatgccaaatgacagagaaaatatgcaccagggctatcccaaagaaacactggtgcatttccttaaggctagagagtggaatgtagcaaaggctcataaaatgattgtagaatgtttgaattggaggattcaaaatgaaattgatagtgtgctggagaggcctatagccccagtagatttatacagatcaatatgtgattcacaacttattggcctgtcaggatacacaaaggagggtctcccaatttttggcattggtgttgggcatagcacatatgacaaagcttcggtaattactctgatgcttgctatttgtttggtaggctacaactacagccaaaatcataaaagtgtctggtttgaagctatcagcactaagccaaataaaggattccggctctcatcaagtgactccccctcacgttgactttgcggatgtctcaattctagtggtggagctacgaacaacaatccgatgtcctgatcgagagcgatggagttaatgtttgaacttgtgtgtttgaacttgtgaactaaaaatgtgaactatgtatgtgaacttgtgtgaatttgtgaacttatgtatttggacttatgtgaatttgtgaacttatatatttggacttgtgtgagtttgtgatatgaacatatatcaatgtgtttg

SEQ ID NO: 9965 - DNA, 1676 bp, Zea Mays
ggtgactaccttttttttaaaaaaaaacaggaatatactctataataaatactaccacctgacacggagcttgatcctcgtgtgagctttccttgtgtagggcttcaagagctttccttgtgtagggcttcaacgagaatctctactaagtctgcaagggtagcataccattctttgttctgcatgtcattccttgttctgccatccctattctgcgattcagattcccattcctattccctgttatgcgattcccattctcgtttgtgcggcgtccgctgctccctcctcccttcaccacgcgacgcagcgacacgacgactgttctctcctccctcactcgccctctcctcccttccccatggcgtcttcgcgtctccgatcgatccaagccaccatggattttttcaaatccatcctcgccgagctcgatccgccacagatttctccgatcgatctgaaccgtagcctccccacaggtggagcaggagccagaacttgtcaaattcacctcctccagcggcgacgggtggggcttcgatgacctgctgaagacgctaacccgatcgatgtcctgtatagccgcttcgaggcgcagatgcgcacgctccaggcagatctggccacattcacatccgaccctgaggatgtcgactctgcatcgtcgctgaggacaggtcactactcgatcgtcgtaggtcggcggaggcaggggaggagacacaacgcacacacgccggtggcagggccgacccccacacgccgggtctaacccgatcctcgtcgtctgtggttacttcagtgtcatcacggccaccaccgtgcttctctgtgttgccgtcaacgtcgtctccgccacccagtccttccacgctggctatgacgtgcgtggaacgccccgcttgccctgttccattccagtgcaactttccctctcctggatccggctggttcggggaggtgcctcatagagcccccgcttgatctgtggtcgggatcggattagccgctatgcatctcatggtgtatgctgttgaagcctgtgaaattgttgtccacgtaatatgtcattcgatgtagttttcttttcagttcaagttgctcaggcacacgttcattttggagtcatatgggagcaaatagaacccacattcctaccattgactccagtacagtgtgctgtcgtggggtgaataaaagcagctaaacagacaatgttttgtaagatctaagttgtatcgtttgtattctgatgagaagaagaaaaaggcttgcacacctgacaacagatgaagttaggttacctcagaagtcatcaacctgtgcatcagggtttcttatatgtctgctgctgattacagtcaccttctcgtaggtttctactcagctaggcagatacgttatcactatgatgagcagtggtgttgtacttggggttggatttcatctgtcatgttagccatatacttatgcctctcgtttcatttcacttttggtataacctgaaattgcaatctaattaaataggctattgtttatccccatttaagtggagacagtcaaatgaacaaactaatttggtacagctagcttggtgggggtgattatcggcacaatgataggtgcaaacagtgtcctagaggaacactgcaaagctagactagacctcacaatat

SEQ ID NO: 9966 - DNA, 3134 bp, Zea Mays
tcccgcccggccgccgcagcgagcagcacgtccaccttctccatctacacgccgctcatgctccaccgcctcgcccacacccgcgtgtgccacttcttcatcatccccacaccccgcgcgttctccaacgctcccgctgccactccacccgctgcgccgccgctctcggccgcggacctcgagcaactcctccgccgctgtcactactctgcctccagccaccgcttccactctcttctccccctcctctcgcacccctccgtcctcctctcctgcgcgctccacctaagccaccgcgcgcacccatccctccccgtcccgccccagcccccaccaatcaccattgccgccgctgccgccgcgttctcatccccatcatcccacctccgcctcctcctcccgtcccgcatcaagggccagccgcttcccgtccccacgctaccgctccgcctcgctttgcgctgcgccgcctccgtcctcgacgccgtgttcgccccgcgcgcagccaccttcgcttaccgcggccgccacacagctgtccgatacctcaagtccattcccagcgcgtcctggttcttccgtgtcgccatcccgcggcagcccttcgcccctcgccacgtttgccgtctgctcggtgccatctccagtaaggtcgatgatcccgggttcctggagttcctgaacgaactgttcgtctctgatgcggtcgcatttgagcttggtggttgcgagctcggacgcgggctgccacaggaatcagagctcactagcacgctagtgaacatattcttcaatcgtgtggatggagagataatggccctccgtgaggaagtgcacaaaaaacatcctagaatgaaagatgacagcgttcggcatacacctgtgagagtatatgcgattcgatatctagatgatattctggttgtgacgtccgggtcgaagatgctcacaattgagatcaggaacaggataattgcagtcttggagagggatttagaggtgagggtggacagattggggagctcaatccacagcgctgtatcagagaagattgagttcctggggatagaattccaagctgtgccaccgtcagtgttgcacccacccatgtcagagaaagcaaagagagcaaggaagaagtatctgaagatgaaggcggaaaaggcgcaggagctgaaaaatgcacgggagacgaggcggaagaagcttggcttgaagatactgaaccacttgtccaagaggatgaggaggggcgaggagtttgaatttgatttccggatcgagaaagaggtgcagcaagtgttcagggactgggcagaggagacagtggccgaatacttcgaatcacgtgagcattgccgatattggcaccgactgctagcatcaggtgatttcttgtcattgaacagggtgagagatcaattgccacctgctttggtggactcatatgataaatttcaagagacaatcgacaagtttttgatgcccatgaaaggtcatgacctgacagaagaagaggagattctagctgaggaggaagaagaggaacaatatgagaaacggattgtcgaggacttgacagagcttaagatgagggccaatgtgccgatagatcttgtaaggaaggagatatcatcaaatggtatgctggcgtagggaggaggtggctagatttcttctgctgttgccgtaacttcaagatggtcaagactgttgtcacttaccacttgaggttctcctgctttttgacattagcagagaagcacgagtgcactaagaagcaagcaattagccatttcacaaaggatttaaaggtagcaaatgataatggaatggcagaagtgcacttcccaatggaacgcgagatcaaaatgatgggtgataaaaacttgtctgacccaaagcctgtggatggtgccttgacgatgacattagtaagattagcagttgatgacgcctcctatccatgcctagcacatttttgtgctaaaacagaaactgtgctttacagaatacgtttgttgcaaaatcgcctaaatgttgatccattgaatgaaaagaaatgggtccatggattaggtgccattcatgagagcctgaacaagaaatgtctccccttgtgctatatgcacgcaagtgatctctttcttggcaagatcacacttcaagatattgactgcactcaatttgttgatgtggaatgagagaaaagcttatttgcgcaatacttcttgcagattatagctcatgtagtattgcaggacttcttgcagattatagctcatgtagtattgcaggggtctcgagagccttctaggcatcagaacattacaaattgaaatactgcatgcagtgtgtggacttcaagcaaactatgtatatatatatcatgatatcaacaatactcacttcagggaggtgcctcatagagcccccgcttgatctgtggtcgggatcggattagccgctatgcatctcatggtgtatgctgttgaagcctgtgaaattgttgtccacgtaatatgtcattcgatgtagttttcttttcagttcaagttgctcaggcacacgttcattttggagtcatatgggagcaaatagaacccacattcctaccattgactccagtacagtgtgctgtcgtggggtgaataaaagcagctaaacagacaatgttttgtaagatctaagttgtatcgtttgtattctgatgagaagaagaaaaaggcttgcacacctgacaacagatgaagttaggttacctcagaagtcatcaacctgtgcatcagggtttcttatatgtctgctgctgattacagtcaccttctcgtaggtttctactcagctaggcagatacgttatcactatgatgagcagtggtgttgtacttggggttggatttcatctgtcatgttagccatatacttatgcctctcgtttcatttcacttttggtataacctgaaattgcaatctaattaaataggctattgtttatccccatttaagtggagacagtcaaatgaacaaactaatttggtacagctagcttggtgggggtgattatcggcacaatgataggtgcaaacagtgtcctagaggaacactgcaaagctagactagacctcacaatat

SEQ ID NO: 9967 - DNA, 1791 bp, Zea Mays
cgaatataccacgcgttgcgttaggctagatccgctcccctgcaggccacgccttctcgccgctcgcggaaccaccgccgccacctcaccactccagctccagcccccgcccgccataatcgcgtccccttctcgtccttccagagcttcttaaaccacccggcccgctcccagcgtcccttctccgcccacagccagcggcgaactcgatcgagcaggatggggtttatcggcgcgcacggcgtggagacgctgaagcggtataggtacagtggagaggaccgctcggtggtggccaagtacgtgctgcagcccttctggagccgatgcgtcactctcttcccgctctggatgcctacatggttatgctttccgacatttcagatcacacttacaggattttcgtttctagtactatcagcgctgcttggctatatatgttcgcctcaccttgacactgctccccctaggtgggtccatcttgcccatggattacttctcttcttgtaccagacttttgatgctgttgatggtaaacaagcaaggcgtactagctcatcgagtcctcttggagaactttttgatcatggatgtgatgcacttgcgtgtgcttttgaagcattggcccttggaagcaccttgatgtgtggaggatggacactttgtttctgggtagttgccgctgtcccgttctatcttgcaacctgggaacaaggtttgggtgggatggagccaaaaaactggattcacctggcttcaacccacacccatggccccactgtgccaagatgtcaggattttcggaaatcactaccctttttcggttggattccacttccatttctttctgaaattgaaattcctttatatgttcttgtgctgattcttatgatcgtatgtgctgttatacctactgttagatccaatgtcagcaatgtccaagaggtagttgaggcacgaaaaggaagcatggcattagcattagccatgtttggctttgctactctgcttttggaaacaatccttccttttattgtactgttagctggagttgctatctggtgctatctttctccttcaagtataatgaggaaccagccacatttgctcgtgattggaactggctttaattttggatatttggtgggaagaatgatacttgctcatttgtgtgatgaacccaaaggtctaaaatctgggatgttcatgtctctggtgtttctttgttttccaattgcaaatgctctcattgcaaagatcaacgatgggagtcctttagttgatgagcttgttctgctgctgctttattgtgcatatacagtgggtctctacctgcacctcgctgtgtcggttgtgcatgaaatcaaggatgcccttggaatctattgcttcaggataactagaaaggaggcttgaactttgtagtgaagatatattattattacttcacaagtgctagcgaggagcaacacagttcgtcaccgtgcacgctgggagtggatttttggccaagcctgagcctgacggctgaacgcgtcggccggcccctgccttctgatagctcgatagcagtcgacggcctcttctccgtctcgtggggcgtttgcgtcgaggaagaaacaacaatgcagcctttaagccttcaattctcaggcccagtttgctgctttgcatgcttgttcgtctctcaggctcttcacggtcacggcgcagcgacctggcatgttaaaaaaaatgggccgatatatatatcatgtgcaggttttctttaccacaaaacttttgcctagc

SEQ ID NO: 9968 - DNA, 1835 bp, Zea Mays
cccggcccgctcccagcgtcccttctccgcccacagccagcggcgaactcgatcgagcaggatggggtttatcggcgcgcacggcgtggagacgctgaagcggtataggtacagtggagaggaccgctcggtggtggccaagtacgtgctgcagcccttctggagccgatgcgtcactctcttcccgctctggatgccatcacacttacaggattttcgtttctagtactatcagcgctgcttggctatatatgttcgcctcaccttgacactgctccccctaggtgggtccatcttgcccatggattacttctcttcttgtaccagtttgaagcattggcccttggaagcaccttgatgtgtggaggatggacactttgtttctgggtagttgccgctgtcccgttctatcttgcaacctgggaacaaggtttgggtgggatggagccaaaaaactggattcacctggcttcaacccacacccatggccccactgtgccaagatgtcaggattttcggaaatcactaccctttttcggttggattccacttccatttctttctgaaattgaaattcctttatatgttcttgtgctgattcttatgatcgtatgtgctgttatacctactgttagatccaatgtcagcaatgtccaagaggtagttgaggcacgaaaaggaagcatggcattagcattagccatgatccttccttttattgtactgttagctggagttgctatctggtgctatctttctccttcaagtataatgaggaaccagccacatttgctcgtgattggaactggctttaattttggatatttggtgggaagaatgatacttgctcatttgtgtgatgaacccaaaggtctaaaatctgggatgttcatgtctctggtgtttctttgttttccaattgcaaatgctctcattgcaaagatcaacgatgggagtcctttagttgatgagcttgttctgctgctgctttattgtgcatatacagtgggtctctacctgcacctcgctgtgtcggttgtgcatgaaatcaaggatgcccttggaatctattgcttcaggataactagaaaggaggcttgaactttgtagtgaagatatattattattacttcacaagtgctagcgaggagcaacacagttcgtcaccgtgcacgctgggagtgtgtgtgcccctctgaaatgccacagccatctgtttgttgagcagagggatctagggattgtattgcgcagttatcttggtcatataacaatatagcagtgtgatgtacactgtagtagggtcgttagaagatatactgtgaaaaacttgcttggagaaagtgatcgtagcatgtgattatcttggttattgtctacaccctccgtttttttttaaaaaaaaaatatgtattatatttcgctataaatctagataaacatctatttagactcgtagcggaaacgactcttttttttgtgtgtgatgggcactcttttggggacggagatctgactgtttatgcgtttctgccatgacagggatttttggccaagcctgagcctgacggctgaacgcgtcggccggcccctgccttctgatagctcgatagcagtcgacggcctcttctccgtctcgtggggcgtttgcgtcgaggaagaaacaacaatgcagcctttaagccttcaattctcaggcccagtttgctgctttgcatgcttgttcgtctctcaggctcttcacggtcacggcgcagcgacctggcatgttaaaaaaaatgggccgatatatatatcatgtgcaggttttctttaccacaaaacttttgcctagc

SEQ ID NO: 9969 - DNA, 2067 bp, Zea Mays
ctactgttcatagatcaaatatattttggtgacctatttcagcaaatttcgtaaatatatttgggtactgaagaaagtgcagagaggggggcaaaatggccaccttctcctgctctaagcttatttccacatgtgagcagtgagtttcgactggatgatttccttgcgcaacagattgtggcctggagagtaaaatgctcttagactccatgtgtgctgagatttatcttttttttgttaaaacaagttttttttaataattttgccagagcactgcctttcagttaagcaataaaagagagtttatgtacaaggtcacacttaactgccaaacacagagtattcccatcccaacacctaggacctagcctctcacccctgtgctaaatcaagctttggcagagtgcacgcatcaagtttcatgttgcactttgttctttccttatcaaaacttctgttctaactaacattttttcttcgtttgcatgtgtggattcataaatagaccaaacatgatcacacttacaggattttcgtttctagtactatcagcgctgcttggctatatatgttcgcctcaccttgacactgctccccctagacttttgatgctgttgatggtaaacaagcaaggcgtactagctcatcgagtcctcttggagaactttttgatcatggatgtgatgcacttgcgtgtgcttttgaagcattggcccttggaagcaccttgatgtgtggaggatggacactttgtttctgggtagttgccgctgtcccgttctatcttgcaacctgggaacacttctttacaaatacgctcattctgcctacaataaatggaccaacggagggcctgatgctgatctatgtatcacatttgtttacattttttactggcgctgaatggtgggcacaggattttcggaaatcactaccctttttcggttggattccacttccatttctttctgaaattgaaattcctttatatgttcttgtgctgattcttatgatcgtatgtgctgttatacctactgttagatccaatgtcagcaatgtccaagaggtagttgaggcacgaaaaggaagcatggcattagcattagccatgatccttccttttattgtactgttagctggagttgctatctggtgctatctttctccttcaagtataatgaggaaccagccacatttgctcgtgattggaactggctttaattttggatatttggtgggaagaatgatacttgctcatttgtgtgatgaacccaaaggtctaaaatctgggatgttcatgtctctggtgtttctttgttttccaattgcaaatgctctcattgcaaagatcaacgatgggagtcctttagttgatgagcttgttctgctgctgctttattgtgcatatacagtgggtctctacctgcacctcgctgtgtcggttgtgcatgaaatcaaggatgcccttggaatctattgcttcaggataactagaaaggaggcttgaactttgtagtgaagatatattattattacttcacaagtgctagcgaggagcaacacagttcgtcaccgtgcacgctgggagtgtgtgtgcccctctgaaatgccacagccatctgtttgttgagcagagggatctagggattgtattgcgcagttatcttggtcatataacaatatagcagtgtgatgtacactgtagtagggtcgttagaagatatactgtgaaaaacttgcttggagaaagtgatcgtagcatgtgattatcttgggatttttggccaagcctgagcctgacggctgaacgcgtcggccggcccctgccttctgatagctcgatagcagtcgacggcctcttctccgtctcgtggggcgtttgcgtcgaggaagaaacaacaatgcagcctttaagccttcaattctcaggcccagtttgctgctttgcatgcttgttcgtctctcaggctcttcacggtcacggcgcagcgacctggcatgttaaaaaaaatgggccgatatatatatcatgtgcaggttttctttaccacaaaacttttgcctagc

SEQ ID NO: 9970 - DNA, 2135 bp, Zea Mays
cgcgttgcgttaggctagatccgctcccctgcaggccacgccttctcgccgctcgcggaaccaccgccgccacctcaccactccagctccagcccccgcccgccataatcgcgtccccttctcgtccttccagagcttcttaaaccacccggcccgctcccagcgtcccttctccgcccacagccagcggcgaactcgatcgagcaggatggggtttatcggcgcgcacggcgtggagacgctgaagcggtataggtacagtggagaggaccgctcggtggtggccaagtacgtgctgcagcccttctggagccgatgcgtcactctcttcccgctctggatgcctacatggttatgctttccgacatttcagatcacacttacaggattttcgtttctagtactatcagcgctgcttggctatatatgttcgcctcaccttgacactgctccccctaggtgggtccatcttgcccatggattacttctcttcttgtaccagacttttgatgctgttgatggtaaacaagcaaggcgtactagctcatcgagtcctcttggagaactttttgatcatggatgtgatgcacttgcgtgtgctcattggcccttggaagcaccttgatgtgtggaggatggacactttgtttctgggtagttgccgctgtcccgttctatcttgcaacctgggaacacttctttacaaatacgctcattctgcctacaataaatggaccaacggagggcctgatgctgatctatgtatcacatttgtttacattttttactggcgctgaatggtgggcacaggattttcggaaatcactaccctttttcggttggattccacttccatttctttctgaaattgaaattcctttatatgttcttgtgctgattcttatgatcgtatgtgctgttatacctactgttagatccaatgtcagcaatgtccaagaggtagttgaggcacgaaaaggaagcatggcattagcattagccatgatccttccttttattgtactgttagctggagttgctatctggtgctatctttctccttcaagtataatgaggaaccagccacatttgctcgtgattggaactggctttaattttggatatttggtgggaagaatgatacttgctcatttgtgtgatgaacccaaaggtctaaaatctgggatgttcatgtctctggtgtttctttgttttccaattgcaaatgctctcattgcaaagatcaacgatgggagtcctttagttgatgagcttgttctgctgctgctttattgtgcatatacagtgggtctctacctgcacctcgctgtgtcggttgtgcatgaaatcaaggatgcccttggaatctattgcttcaggataactagaaaggaggcttgaactttgtagtgaagatatattattattacttcacaagtgctagcgaggagcaacacagttcgtcaccgtgcacgctgggagtgtgtgtgcccctctgaaatgccacagccatctgtttgttgagcagagggatctagggattgtattgcgcagttatcttggtcatataacaatatagcagtgtgatgtacactgtagtagggtcgttagaagatatactgtgaaaaacttgcttggagaaagtgatcgtagcatgtgattatcttggttattgtctacaccctccgtttttttttaaaaaaaaaatatgtattatatttcgctataaatctagataaacatctatttagactcgtagcggaaacgactcttttttttgtgtgtgatgggcactcttttggggacggagatctgactgtttatgcgtttctgccatgacagggatttttggccaagcctgagcctgacggctgaacgcgtcggccggcccctgccttctgatagctcgatagcagtcgacggcctcttctccgtctcgtggggcgtttgcgtcgaggaagaaacaacaatgcagcctttaagccttcaattctcaggcccagtttgctgctttgcatgcttgttcgtctctcaggctcttcacggtcacggcgcagcgacctggcatgttaaaaaaaatgggccgatatatatatcatgtgcaggttttctttaccacaaaacttttgcctagc

SEQ ID NO: 9971 - DNA, 1957 bp, Zea Mays
caatcccctttcatctccaagccgaaaaaacacccacagaaccctaccctcccgagtcccgaccccgtcctgctcgctccgccgtccttcgcccgccacccgccacccgccggactgccaaagcccggaggcctgaggcccgagttacgcgaggagcagccgaaccagcggcccggcgcctcatccctcagcggccccgcccctggggccgtgtagtcagcaagcggccacgcgagtgcgcggtcggcgcggagtgagcaggagcaacccgtggctggcggtcagtcggtggctagctggagcctggagttgcgacttgcgagcggcgttagaactcgctccacctataatttttgtgtggctccgtcactgattccacccgttctgtggccggcgacagaggcacagagaagcgccaatccgccggcttgatctgaagcatggacaggccctcatcaccggtcgttgctggttctgccctctgttgctgaagatcgtgaccatggaactcgcgtcgtcgtcctagagctcctcgcgatgttgctgctccaggctgccatcctcatgtcaacggtggagggccttgtgcggatcgtgcaagaagctccacaagttcctcatcaataagatcagtttgaggcttggccatgcctttaaatatagatattgatctgttcaagctggatattgatgagctgatagctgattattccaaggagaactgtacgtcactctttgaattcaaacgagtatggatgggcaagaaattttcttatatctatgaaggcaggcctaagacaaactcgggtttattcatgcagtccctctttctgcattgtattggttatttgacttctcaaagttcactgcaccaaagattggctgggctatactgcctttactgtctgtatgagtgccagccatacaagccgcagttcaagatttacttgtctcttgaggagtgcaggcaactgaaagatatcgttgttatggcgaagcaaaatggactgcagctcgtgcctgcacttgtcaaaaggatgctggataaagacatgtttttgtttggctacatgaatttgatcgacgacaacggggacaagcaggtcgaggaattgaccgcattgcagaacaagcgagtaaaatttgcatgtgacaagttatttgcaaatacccaagcagaaagatatttgcacatggacttgggtgctgagttcgagcttgatagcatcaagaaattgtcaaaggagtatgcagaagcaaaggaactggcccttgcaggtgcctgtccattgccattgtcggatatgtgcattttccttctcctttacagtgagaggctgttgggcgacaagatagatgaagtcgtcaaagaatgggatgtccagaaggaggggttctacgagaggacaggattatcctcatcccctggcgaccagctcatggccatcgacaacgatgaatcaggagctcaatgtcacgaggatggatcccgtggcgatcagctcatggcggtcgacaatgatgaatcgggagtacaggatcacgaggacctcgacgacgacgacggctttgccgagttagaactgctgctagaatgaagaacatatacaagtctgtaaactcttactaccgccgtataaccgtgtaatcagaacaccgagagatgtaatcctcgctcgtctttactagcctctcctttttaggtgccagaccttctgttcatctacactggctgcagtaactgtacattgaaataatccagtgcgccagcctatgcaggggagaaaagaaagaggtgagcttgagtaaaaatgtacatgaacagtgacaagaaaaaaaaacgctggctgcagtaattgtgcatttaaacgatacagtgtgccagactatgcagggtgaaaattggtggacctgagtaaaaaatgtaagtgaacagtgacgaaaaaacgcaaaaaat

SEQ ID NO: 9972 - DNA, 552 bp, Zea Mays
ctttcatctccaagccgaaaaaacacccacagaaccctaccctcccgagtcccgaccccgtcctgctcgctccgccgtccttcgcccgccacccgccacccgccggactgccaaagcccggaggcctgaggcccgagttacgcgaggagcagccgaaccagcggcccggcgcctcatccctcagcggccccgcccctggggccgtgtagtcagcaagcggccacgcgagtgcgcggtcggcgcggagtgagcaggagcaacccgtggctggcggtcagtcggtggctagctggagcctggagttgcgacttgcgagcggcgttagaactcgctccacctataatttttgtgtggctccgtcactgattccacccgttctgtggccggcgacagaggcacagagaagcgccaatccgccggcttgatctgaagcatggacaggtatgaaaaggtttgttgaatgttgctttagtgagtatagcacaaagtttctgtgaaaaggcaacatacagaaagttgctaatatggaggtaaatcaataatcaggtggag

SEQ ID NO: 9973 - DNA, 4261 bp, Zea Mays
acggccagcaggtaccctgacgatcaatacgacagattatggacacctatgattattgacgccatcgactggctggtgctatccacgacggaaaaggtgcggaacatatatgatgacctcttcgaggtgccgtcgaaggtgatgcagacggcgatcacgccgcgtgacgctaccagcagcatcaacttctattggaactccaagggctcgtcgcttgggtacataccggtcttccacttctccgaggtgctgcaggcgggcgccggcgttgttcgccagttcaacatcaacatcaacggcaagcggttcacctcccatgattattacacaccacggcacctcgaaagtggctacgtatacggtaccagaccttacaccaaccagatccggtataacgtctccatcgttaagacagacacgtcaacgctcccgcctatcatcaacgccgacgagattttcatcgtcatctctacgaccaacgttggcacggactcggaggacgtctctgctatgaaggctatcaaggcgaagtatcaggtgaagaagaactggatgggagacccgtgcgttgctgggacttttaggtgggatggactgacgtgcagctatgccatttctgatcctccaaaaattactgccctaaacatgtccttcagtggtctgaccggtgacatatcatctgctttcgcaaatctcaaggctgtccaatccttctatgccgataatccagacctttgcaccaacgccggggattcatgtcagacggcgccgcaaggaaagagcaagctagtcatctactacgtcgctgttcctatggctctgatcgtggtggcgttggcagtactgctgtgttgtcttctgcggcggcgaaagacgcgagggctagcggacgtctctgtgaagccccgggacaagactccgacgagccttgcttcaatggcggccgacgaacacagacttagctcgctgcggcttgagaaccgccggttcacatacgaggacctagagatgatcaccgacagcttcaagcgtgtcattggccggggcggctttggatacgtctacgagggcttcttggaggatggcactcaggtggcggtgaagatgaggtctcagtcgtccaatcagggtgccaaggagttcctcacggaggcacagatcttgacacggatccatcacaagaaccttgtctccatggtcggctactgcaaagatggggtgtacatggcgcttgtctacgagtacatgtcagaaggatccctgcaggagcacattgcaggaaaacgcttgacttgggggcagaggcttcgaatcgcattggaatcagcgcaagggctagagtatctgcacaggggctgcaacccgcctctgattcacagggacgtgaagaccagcaacatcctactgaacgcgaaactggaggccaaggttgctgatttcggcatgtcaaaggctctagaccgcgacacctatgcgtccacgaacactcttgttggcacaccaggatacgtcgacccagagtacctggaaacaatgcagccaagcaccaagagcgacgtgtacagtttcggcgtggtgctcctggaactggtcacagggagacctcctatcctgcacagcccacagcccaccagcgtgatccagtgggcacggcagcacctggcgcgcggcgacatcgaggtcgtggtggacgcgtccatgggaggcaaccacgacgtcaacagcgtgtggaaagccgcggaggtcgcgctccagtgcaccgagcaggcgtcggcgcagcgccccaccatgggcgacgtggtggcgcagctcctggagtgcctcgacctcgagaagggccgctccgccaacgaaagtttctgcgacggagacgacagcggctccgcgaccgcgagcttgagccacagcagcgcatttgtgacggggcgtatttttgggacggtgccaatggtggagacaggccctgccacgagacgcgcgctcgtgtgtgtctcactgtctcccctgtcccctctcccgcgtgctcgtctaccttcggctcccccatgggatgagagcgccttcctcgccatggccgcctcccacctgccccccgcagccaccctcgtcaagaagtacccaactctcctccacccgttcggcgccaaaccacacgcccagaggctgatcttcaggtgccgcgcgaccagcagcgagggtgcggacgatggctgggcgtcctttgtggacgagctcaagaggtcgctgcaggtggacccgtccgacgcggtgattagcaacgccggcgcgggtctcacatcaaataacgacctcgtcaccgcgctgccactggaaccctccgctggtccggctgcgggagacgcgaccactgccgctgccggcgcggtgagcgagctcctgggcgtggacgcgtcaggcgcggtggccacccccgaccgcctcctgagctccctgctgcacctggacgcgtccaacccggtggcgagcgtggcgggcggcgcgctgtctcgcctggacgcgctcacgtcgggactgtcggacgcgcagcggtgggcgctgttcgggttcctggccgcgacgtggctgtacctgaccgcgcggcccggggtgctgagcggcgccgtggacatgtacgtgctggcgccgctgcagctggcgctggacagcgtgctgggccggcggagcctcaagatgagcgacttcgtcgtcggcgagcgcatcggggagggctccttcggggtggtgtatgccggcgccgtggtgccgaagaacggcgccgtcgtggaggagcggtccggcaaggccaagacgagcctccagaacgacgacaggtacaaggagaaggtcatactcaagaagatcaaggtcatgacggtgggggcgaaggagtgtggggactacgaggagtggttcaactaccgcgtgtcgagagcggcgccggagtcgtgcgccgacttcctcgggagcttcgtcgccgacaagaacaaggcggagttcgtcaagggcggcaagtggctcgtctggaagtttgagggcgacaggacgctggccaattacctgagcgagcgcggcttcccgtccaacctggagcgtctcatgttcgggcgcgtgctgcagggcctgggcccgctggagcgcgaggcgctggtggtgaagcaggtgatgcggcagctgatcacgtcgctgaagcgcatccacgccacgggcatcgtgcaccgcgacatcaagccgtccaacctcgtcgtgacccgccgcgggcaggtgaagctcatcgacttcggagccgccaccgacctccgcatcggcaagaactacgtgcccgaccgcgcgctgctcgacccggactactgcccgcccgagctctacgtcctccccgaggagacgcccgagcccccgccggagcccatcgccgccatcctctccccgatcctctggcagctgaacagcccggacctgttcgacatgtactcggcggggatagtgctgatgcagatggccataccgacgctgcggacgcagtcggggctcaagaacttcaacgccgagctcaggtccgccggctacgacctcaacaggtggcggcagagcgcgcggcggaggcccgacctgcagatcctggacctcgactccggccgaggctgggacctcgccaccaagctcatctcggagaggggcgccaacggcggtggccgcctgtctgccgcggccgcgttgcgccacccgtattttctcctgggtggcgaccaggccgcggcggtgctgtccaagttctcgctcagtaaatagcatccatccatggcccatggctgggtacctacgacctacgggatatatacacatcggcttattggaatcctccgatcgattcaccatccttgtatattgcgcattattgaatccttgggcataccataccggcagtgggaggcatcccaaattcaaaagggagtcatctggtaactgatgttacaacttttctgtatgggaatgctgtgaacaatgtggtgcagagtttcacacactaactaaccttacattatgctagacagagatcctacttcctttgcttcagttcctcgaatctatgcagatgcagacactcgcagagagagctcatcaactggctgcaaaattctgacctgctccttctttcagccaatcagatgtttggccatgctcgttctgatcctatactgacagacgaatccggccatggatcgcctctactgtcactggcagtacggatcgaacttcttctgga

SEQ ID NO: 9974 - DNA, 5134 bp, Zea Mays
atgaggcaatcaaagctgagagcagtgtcggcaaggccgtggttgttactcctttgcctcgcgctagcagccaccgccggcgtaatgcaagctcgcgcccagcctaacagcatcggtaatctcatggggcgcgcgggcgatcgagcacgtttcatcagcatcgactgtggtttcccggggacgacgagctacgtggacgacgccacgacgctgccgtacgccccggacgctgcgttcaccgacgccggcgagaaccacaacgtctcgtctgagcacgtcacgccggagctcccgaggatctaccgcgacgtgcgcagcttcgtggacggcgcgcgtaactgctacacgctcccgtcgaccctcgcggtggggctcaacaagtacctcttccgcgccgccttcatgtacggcaactacgacggcctcaaccggccgcccgtcttcgatctctacataggcgtcaacctctggaagacggtgaacctgtcgtcgtcggacccggccgccccagtcatcgcggaggccatcgttgtcgtaccggacgacttcgtccaggtttgcctggtgaacaccggcaccgggacgccgttcatctccgggctggagctgaggcctctcaagaactccatctacccgcaagtgaatgcgacacaggggctggtcctgcaaagcaggcgcaacttcggcccgactgatatgacagacattatcaggtaccctgacgatcaatacgacagattatggacacctatgattattgacgccatcgactggctggtgctatccacgacggaaaaggtgcggaacatatatgatgacctcttcgaggtgccgtcgaaggtgatgcagacggcgatcacgccgcgtgacgctaccagcagcatcaacttctattggaactccaagggctcgtcgcttgggtacataccggtcttccacttctccgaggtgctgcaggcgggcgccggcgttgttcgccagttcaacatcaacatcaacggcaagcggttcacctcccatgattattacacaccacggcacctcgaaagtggctacgtatacggtaccagaccttacaccaaccagatccggtataacgtctccatcgttaagacagacacgtcaacgctcccgcctatcatcaacgccgacgagattttcatcgtcatctctacgaccaacgttggcacggactcggaggacgtctctgctatgaaggctatcaaggcgaagtatcaggtgaagaagaactggatgggagacccgtgcgttgctgggacttttaggtgggatggactgacgtgcagctatgccatttctgatcctccaaaaattactgccctaaacatgtccttcagtggtctgaccggtgacatatcatctgctttcgcaaatctcaaggctgtccaatccttggatttgtcacacaacaacctgacgggctcaatccctagctccctgtcacaactgccgtcactgacaactctagatttgacggggaatcagctcagcggaccaataccctctagtcttctcaaaagaatccaagacggctccttaaacctaatctatgccgataatccagacctttgcaccaacgccggggattcatgtcagacggcgccgcaaggaaagagcaagctagtcatctactacgtcgctgttcctatggctctgatcgtggtggcgttggcagtactgctgtgttgtcttctgcggcggcgaaagacgcgagggctagcggacgtctctgtgaagccccgggacaagactccgacgagccttgcttcaatggcggccgacgaacacagacttagctcgctgcggcttgagaaccgccggttcacatacgaggacctagagatgatcaccgacagcttcaagcgtgtcattggccggggcggctttggatacgtctacgagggcttcttggaggatggcactcaggtggcggtgaagatgaggtctcagtcgtccaatcagggtgccaaggagttcctcacggaggcacagatcttgacacggatccatcacaagaaccttgtctccatggtcggctactgcaaagatggggtgtacatggcgcttgtctacgagtacatgtcagaaggatccctgcaggagcacattgcaggaaaacgcttgacttgggggcagaggcttcgaatcgcattggaatcagcgcaagggctagagtatctgcacaggggctgcaacccgcctctgattcacagggacgtgaagaccagcaacatcctactgaacgcgaaactggaggccaaggttgctgatttcggcatgtcaaaggctctagaccgcgacacctatgcgtccacgaacactcttgttggcacaccaggatacgtcgacccagagtacctggaaacaatgcagccaagcaccaagagcgacgtgtacagtttcggcgtggtgctcctggaactggtcacagggagacctcctatcctgcacagcccacagcccaccagcgtgatccagtgggcacggcagcacctggcgcgcggcgacatcgaggtcgtggtggacgcgtccatgggaggcaaccacgacgtcaacagcgtgtggaaagccgcggaggtcgcgctccagtgcaccgagcaggcgtcggcgcagcgccccaccatgggcgacgtggtggcgcagctcctggagtgcctcgacctcgagaagggccgctccgccaacgaaagtttctgcgacggagacgacagcggctccgcgaccgcgagcttgagccacagcagcgcatttgtgacggggcgtatttttgggacggtgccaatggtggagacaggccctgccacgagacgcgcgctcgtgtgtgtctcactgtctcccctgtcccctctcccgcgtgctcgtctaccttcggctcccccatgggatgagagcgccttcctcgccatggccgcctcccacctgccccccgcagccaccctcgtcaagaagtacccaactctcctccacccgttcggcgccaaaccacacgcccagaggctgatcttcaggtgccgcgcgaccagcagcgagggtgcggacgatggctgggcgtcctttgtggacgagctcaagaggtcgctgcaggtggacccgtccgacgcggtgattagcaacgccggcgcgggtctcacatcaaataacgacctcgtcaccgcgctgccactggaaccctccgctggtccggctgcgggagacgcgaccactgccgctgccggcgcggtgagcgagctcctgggcgtggacgcgtcaggcgcggtggccacccccgaccgcctcctgagctccctgctgcacctggacgcgtccaacccggtggcgagcgtggcgggcggcgcgctgtctcgcctggacgcgctcacgtcgggactgtcggacgcgcagcggtgggcgctgttcgggttcctggccgcgacgtggctgtacctgaccgcgcggcccggggtgctgagcggcgccgtggacatgtacgtgctggcgccgctgcagctggcgctggacagcgtgctgggccggcggagcctcaagatgagcgacttcgtcgtcggcgagcgcatcggggagggctccttcggggtggtgtatgccggcgccgtggtgccgaagaacggcgccgtcgtggaggagcggtccggcaaggccaagacgagcctccagaacgacgacaggtacaaggagaaggtcatactcaagaagatcaaggtcatgacggtgggggcgaaggagtgtggggactacgaggagtggttcaactaccgcgtgtcgagagcggcgccggagtcgtgcgccgacttcctcgggagcttcgtcgccgacaagaacaaggcggagttcgtcaagggcggcaagtggctcgtctggaagtttgagggcgacaggacgctggccaattacctgagcgagcgcggcttcccgtccaacctggagcgtctcatgttcgggcgcgtgctgcagggcctgggcccgctggagcgcgaggcgctggtggtgaagcaggtgatgcggcagctgatcacgtcgctgaagcgcatccacgccacgggcatcgtgcaccgcgacatcaagccgtccaacctcgtcgtgacccgccgcgggcaggtgaagctcatcgacttcggagccgccaccgacctccgcatcggcaagaactacgtgcccgaccgcgcgctgctcgacccggactactgcccgcccgagctctacgtcctccccgaggagacgcccgagcccccgccggagcccatcgccgccatcctctccccgatcctctggcagcagcagccatctttgcagctgaacagcccggacctgttcgacatgtactcggcggggatagtgctgatgcagatggccataccgacgctgcggacgcagtcggggctcaagaacttcaacgccgagctcaggtccgccggctacgacctcaacaggtggcggcagagcgcgcggcggaggcccgacctgcagatcctggacctcgactccggccgaggctgggacctcgccaccaagctcatctcggagaggggcgccaacggcggtggccgcctgtctgccgcggccgcgttgcgccacccgtattttctcctgggtggcgaccaggccgcggcggtgctgtccaagttctcgctcagtaaatagcatccatccatggcccatggctgggtacctacgacctacgggatatatacacatcggcttattggaatcctccgatcgattcaccatccttgtatattgcgcattattgaatccttgggcataccataccggcagtgggaggcatcccaaattcaaaagggagtcatctggtaactgatgttacaacttttctgtatgggaatgctgtgaacaatgtggtgcagagtttcacacactaactaaccttacattatgctagacagagatcctacttcctttgcttcagttcctcgaatctatgcagatgcagacactcgcagagagagctcatcaactggctgcaaaattctgacctgctccttctttcagccaatcagatgtttggccatgctcgttctgatcctatactgacagacgaatccggccatggatcgcctctactgtcactggcagtacggatcgaacttcttctgga

SEQ ID NO: 9975 - DNA, 1305 bp, Zea Mays
cccgcccttcgtccaggctgcagaccttatccaccaacctccggtccacggtgactggccgcaagctcctcctctcccgcaaacacccacgcccactccattgctcctctcctccaacatcgctcacgcggtctcctctccccgctcagctccgctccgctcccggagacacgcaagcttcccgttcccgggaacgcgcactaaagatgcctccagccttcgccgccgcaccttcctcctcgatatgtggcgttcgcatcccaactgtgcgccgtttcgaagcgcaaagcacggtttccacgcccagatttatgcgtaatcgggtggcagcaaaaacacggtctacatcagcttggtccttgaaggctggcttgtgggattctctcagatctggccttttgaagaataatagcagtacagagacagtagagccaccaccagcaccacttgaagtggaagagcctttgcctgtggaaatagtactcctagaaagaacactacctgatggaagcacagaacaaattttattttcttcagccggagatgttgatgtatatgatctccaagccttatgcaataagaagttatttgacagagggagaagagaagaaacagctcattgggatggcacgagcaacctcagaccatgccttcaatgcaacgatttgggatgtccttgttgatccttcataccagggtcagggtcttggtaaagcactcatggagaaagtaattcgtactttgctccagcgagacatcaacaacattacactgtttgcggataacaaagttatagatttctacaagaacctggggttcgaagttgatcctcaaggcatcaagggcatgttctggtaccccagattttagcaccagcagccagatatatcgttcgaggggttgttgtacttgaagcatctccccgttctgaaagggtaattgacaggtcagggctccacgccctgatggatctcgcacttaatatttcatccttggtgagaagctgtaattttcttcaatgctaaaacgaccatgtgatcggctcaactctccgcacccctgttgtaaccataaccccaacaaaacacgctatttgtaatacccgtgtttcatacatgcgctctagactcttgccatctgtatgtaacgtacgctttcaaatttctacattcgaaatggaaaaaaaaactgtatccatcagttatccatatgcgcacaccatcagtttttactgtctcttggaaagaatttgctttccatcaacatccacttgctgttgctggaactgtaacttaagttgagtcg

SEQ ID NO: 9976 - DNA, 1411 bp, Zea Mays
gagagacccgcccttcgtccaggctgcagaccttatccaccaacctccggtccacggtgactggccgcaagctcctcctctcccgcaaacacccacgcccactccattgctcctctcctccaacatcgctcacgcggtctcctctccccgctcagctccgctccgctcccggagacacgcaagcttcccgttcccgggaacgcgcactaaagatgcctccagccttcgccgccgcaccttcctcctcgatatgtggcgttcgcatcccaactgtgcgccgtttcgaagcgcaaagcacggtttccacgcccagatttatgcgtaatcgggtggcagcaaaaacacggtctacatcagcttggtccttgaaggctggcttgtgggattctctcagatctggccttttgaagaataatagcagtacagagacagtagagccaccaccagcaccacttgaagtggaagagcctttgcctgtggaaatagtactcctagaaagaacactacctgatggaagcacagaacaaattttattttcttcagccggagatgttgatgtatatgatctccaagccttatgcaataaggtaggatggccacgcaggcctctttcaaagatagcagcctcattaagaaatagctacttggttgctacactatattcaataattagatcttcagaaacagaagttatttgacagagggagaagagaagaaacagctcattgggatggcacgagcaacctcagaccatgccttcaatgcaacgatttgggatgtccttgttgatccttcataccagggtcagggtcttggtaaagcactcatggagaaagtaattcgtactttgctccagcgagacatcaacaacattacactgtttgcggataacaaagttatagatttctacaagaacctggggttcgaagttgatcctcaaggcatcaagggcatgttctggtaccccagattttagcaccagcagccagatatatcgttcgaggggttgttgtacttgaagcatctccccgttctgaaagggtaattgacaggtcagggctccacgccctgatggatctcgcacttaatatttcatccttggtgagaagctgtaattttcttcaatgctaaaacgaccatgtgatcggctcaactctccgcacccctgttgtaaccataaccccaacaaaacacgctatttgtaatacccgtgtttcatacatgcgctctagactcttgccatctgtatgtaacgtacgctttcaaatttctacattcgaaatggaaaaaaaaactgtatccatcagttatccatatgcgcacaccatcagtttttactgtctcttggaaagaatttgctttccatcaacatccacttgctgttgctggaactgtaacttaagttgagtcg

SEQ ID NO: 9977 - DNA, 1604 bp, Zea Mays
cacaagggtatcaaaaggcttaaggttgggcaagagggcgtttgagtttgtcaacaggaaacactccaacacaagttcagcctttgggaacagagaaaagagtggaaaacacaggccagaaagcagatgtatcaccaacatcagggcctgagtgagctcttcaccacgaggacatcctttccaatggagcagcatctgtttttgcgtggaggaaatgcccaaggagattctgggctggttctctcaactgatgctaaaccaaggctcaaatggacacctgagttacatcagcgatttgtagatgcagtcaatcagttaggtggagcagagaaagctactccaaaaacagtcatgaggctcatgggaatcccaggactcaccttgtaccatttgaaaagccatctccagaaatacaggctgagcaagaacctccaagctcaagcaaatgtcagtacatcaaagaatgccataggatgtacatccattgctgataggattcctggaacaagcgctgcaacaatgagcagtacaaatgtcgttccgcaggcagagaagactattcaaattggtgaagcacttcagatgcaaattgaggttcagagacagttaaatgaacaacttgaggtgcaaaggcatctacaactacgaattgaagcacaagggaaatacctacaagcagttttggagcaggcacaagaaacacttggaaaacagaatttgggtcctgcgaacctggaagatgcaaaaataaaaatatcacagttagtttcacaagtatcaactgaatgcttcagtaatgcaattacagatgtaaaaggaagttcaagtgtgcataggttagagcccagacaaatccagtttgttgaaagttcaacaaatagttatttgtctgtggccgaaggattcatcaaggagcagagactacagcaccaacagcaccatggagtactaaaagcacatgatggtagttcattattttgcagaaaaagaccgcatgaacatgagacccagtttgcccttaacagaagcctaagtgagcgtaggatggcacatttgcagaatgatgaacaatacagtaaagcagagtttgggtatgaaagtgacacagagatagtgcatgagtatactgcaccccaaaatggtggaggtagcaccaccagttcggcatcaggaagcaaagtagatgcggagaagctatatctagaagagcaaaagtgtgcaagacaggtcgctgaataccccagagaaagcaagctaatagattttgagaattcgtgttcagggaagaaacttgatctgaacacccataatgtagatgacactgatcaagcttacagacattttgacttgaatgatttcagctggagctgataatatgtaagatgatagaagcaaagaaaatgaagttaaaaataatttcttccaacattgaagtattgatacatgatcaaatgtacgtcaagaggtaccatttatgtttttaagtatttagtaatagggtacagaaatggttttcactttgggccatccggcagtttactcaaaactcaagcagtatagataagaaaccagacaaatagcatcaatgaaattagagcccataa

SEQ ID NO: 9978 - DNA, 3290 bp, Zea Mays
tcccctcgcaggtcccggctggtcaggctcgcgcccgccagccccacccaaacctggggaactcttcgttcgtcctcttcttcccctgtcgcctttcccaaaaggccaaaaccctaaaccatacgcgcctaactccgcgtcctcccccccctccctcgaagcggccaaggcggcggcagcagtgccggcatgggcgcaatgtcggcttcgatttcgtcggtgaattggctagtcgaggatgacatccttctcaagaacgccgtcgagcacggcacctcttcgtcgcccgtctctgaggccgcgaccggagatcttccacaagtacaacctgcgctgtagaagagcccacaccagtgggtttgtgattttgtgaagccaacacagctggtgcttcgttagagtccttagccagaggagctgtatgtttttcccgtaaattcactcttcatgaaatacaggaccgctggaattcattgctatatgacccagatatctcaacacaagcagcttctcggatggctgagtatgagaatgaactttctacttccgatccagccaaggcacataaacttttcaactcaaaagcaaaggatttttcatttcagaaacggaaaatagacagtgtaaagaatctatattatgcgatgagaaaaagagtacgcaatgatccacgcaacagtggcgaccttggatttcttgtcccctgttcgtgtacggcaattggtagtgagtgtatctgtggaggcctacctaacaatattgaaccagagctgaattcagtaagccgctatgggcaagtaggttcaaggtacaccattggacattcatattctgaaatgaacgaacatgcttttcatacgaagcatactgaaagcatgacaagagatggggatggcaccagtaatgttgtgtatggctactcagatgtaggccaactatatgaacatcatgcgtacacagcgaataatcatgggaatagagaagggaacaatctttctctaaagagtatcacaaattttcaggattctatgcagtttcagcagttggacaacaatcaatgtggtaatggggtggtagactcaaaggctttggtgatccctaaccatttcagtggaagtgtgcaggaacctatgcctctccaaatgattggtcaacctgagggttctgaagcaccaggtggtgcaatcttgagtcttcagcgaagcgacaggctcgctcttgctgatgataaggatgtaaaatcagaagacagggaccctctcacatttgaagcgcatttagatggtgggatatctggtttagatcacgctactgagtttatggacttcccatatttcactaatagtgaagaccttgatatcctgaatagtgaaaatcttttgaattctccaagtgagggaatccaggaggatttagacgatactgcattagttgttcatggggttagatcaaccatgcaaaatctggttcatgctgatgaagccaatatgtcctgtgatcaaatagatcttggtgatgtgaaaaataatgtagatgcttctggtataatcttatttcctacttcattagtagtgccctgtcctggcctgtatgttgagtgcaaattgaacacagaagatactgaaattccttgcaacgacgatgtttctacaccaacagagtatcctcttgaatgctgtacttctacctttgggcagaaatctgagaatactatctattccgtctcccctgcaatcagccctccatcaattgctgaacagcccaacccatccacttcagaacaaaaagaagattcagtggctcatgacgaaggtggtgtcctaggagctaaaccatcagaaggtgctttaacagttggaggccttttgcctggtaacattgacacaaatgatgcaaacacatgcatgctagctttgccttcttttagcactgctggatttggtgaaggatcaccttgtagtttaggaccacacgagagctttgataactctcatggtttgactttgcaaaattcagttcaagctcctgatcagatgcaacacaactcacttgatggtaaaccagaattaggtgacaaggctgctctacagaactgtatgccatcaaatgcactgcccgatttggatattcagaacactattgcaaatgcgccaacaccagctcaagcagaagaatgccctgactatgaaaaagatgttccaaattactatgatctagaagctttgattcttgaccaggatcttatcccgtgggaccaagactccgattttatgcatcctgaagttaccggatttcctcacccggaaagcaggaaggcattgattagattggagcaaggtgctcggtcttgtatgaacagagctatcatgtcgcatggtgcctttgcagttatctatggattgcacttgagatgctacataaaggatcctgaggttactcttggaagagagacagaagacattaaagttgacattgatttaggaaaagaagggagggcaaataagatatctcgccgacaggcggttatcaagatggatgaatctgggtattttcatattaagaacactggaaaatgtccaatctttgttaatagcaaggaaataccaagctgcaaacgcatcaacctaagctcagactcattaatcgagataaaggacatgaggtttattttccatgtaaaccaagaggctgtgaggcagtacattgatcgtgacctgaagccagaacgctaatttcccctggctttccagtcagcagcagcctgtgagtgactgcctcattaacagcaatagaagtagcatagcagtaaatttgagtaagcattgctcgtttaggatgttccttcatatgatgttaacaagttaggttcacttggctccggtctgtaaatggttgtagtttgttgcgttttctgtctgtttggcgggcataaatcatgcatataaccagcgcatttgcttccagtttgtacctacactcccaggaatgatttcatttgtaatactggcaccctagattgtggtgactgccgccaagagcaagaggcaaccaatgcaataaagtgcggaaaagaatcaatagaagggtagattctagggtagaacaggaggagggtgcacttgtgcaagaaaccattcggttcttgcgacgctataagcataaactttattggtttttatttatataccctgatgatcttgaagcacgaactctgaatcagctctcggggcttgacggtggtggcctggtgggttttacacatttgcagatgttggaaaagcaatgcgctg

SEQ ID NO: 9979 - DNA, 6268 bp, Zea Mays
ttcgtgttatgtcgggagattaatcctaatctcagatgctcagtaaaaatttctatttctcgatcgtgcctatctctgtttatcaggctttctcttggaagttcaccgaattcagagttaatcgatcgcgagaaacagccaattttggagcgtgttaaaacttttaattctcggaactaatgcagactcgaagatcattctcgaattttagatctcatctgaagccctttaaatcaaactctcggtgactattatctgatctgagctcgaatccaattcctcgaacttcgatcgatgttcgactattttaatccgaatccgtatctcaaaagaaatactcagtatgtcatcctctaattaatttctatccgattcggcttaatatctctgtatccaattcgatttcaaaatcagcatcgacagcaattttaaaatgccacgattcaccttctccgactaaaaatccaaagccgatcaaatctcaggacgatttattttcaaatcacgcgtagggaattattttcgagcggaatctaattagactctcggccgaattaattgctcaatcgtcagttcaccgaaatctctttcgctctgttctgtgtacaaacaaattccgcgggaacattttattccggaaaatatttagcgcagcccgtttggcattttgggccaagcccatttaaaacccagcccattaggcccactaagaaaccctaaccctagggcttcttctataaataggggtgttcacttggtcattttccactcccacccctccatttttccctagccgccaccagcagctcttctctgtttcctggacgtgcgcagggagctgagctccttctcccatggcgcctccacacttccagccgccctcctctgcccagcagccgagcgcccagctcctcccctcggcagccatggcgtcctccccttcctcccgccctctgctgtccacggcgagctacagcagggagccgagctccaagctcccacggcgctcgagctccactcctccctgttcgtcttcaacccaagtcggcgccctctcgctggctgtcctctccgtcgcgcccctactggccgtgcccctcacgctggcacacaggcgcccaggcaagcttccccatggcgctcgactccctgttccatggagccctgtggtcgcccccttcttccccttgtggctgcgctcctctgctccctccatggcgcccaggcaagcttccccatggcgctcgactccctgttccatggtgccctgtggtcgcccccttcttccccttgtggctgcgctcctctgctccctccatggcgccccctgctccttcctcgacgcgctgtaggtgttcggcaaatgcgcagctccatttctcccatggccgtggcctgcttttcccggcgccctgcgcagcatctccctcccccaagtccctgcgcgcgcacagcagcagctcgccccaccttccctcgctgcgcagcccctcggcgaaacgccgctgttcctgcagccccgacaccttccctggcttcctcactgctagcgctgcgcgcgtgccacgtgttcggcgatctgtccaagtggggtgttgagcagtgagcagcaagccgtcaacgcccgccgtgtgctcgctgttttgcgcagcccatccgcgacgccgtcgaaaaaccgtgctagccgtcaatcgccattcgtcgcgcacgcgcgttcaatacaagaccggtcgggtgaaccacgtgcttgcataactcaaatccgatcccgctcaggttgattgatttatagtttaccatacgtatgatttggttgatgtcatgcagtgcacgtatatgtatggatatgtgtaaaatgttttggttatacgcattagtaggttcgcatttgcggttggagaacaagaagttgtttgctgtgtgcgatttgtagtttgtctaaatacgttttggtcgatgtggtgtgtattggtgtttgaatatatgtggctgcgatgattcgtttatgtgtcacgaggatggttcgtggatggtattagtcgtttgttaaaatactttgtcataaagtagtgtgttagttgtggtaaattaaataaagcgtaaaacatacttagtaatttccatagttagctaatgagttagtctatgttcaatatattttatgtattcatcgtggtgtaggatagagtgggtcgaagatatgaattatgagacatgtgatttgtgtttaagaacgagaggttcgaataatcggttagtgtttcacttgtctagtcgctaagtattgtcataaataattgtgcaaaaattggttataagaatgcagtggtcacgtggtgtggttggatgcgataagtagacgagaagggtgggtttgtctgagcacgatgttgtcgaacgtgtgtatcgaaatgtgatgtagtagcgattgcgttgaattaaacggtaatgtctcgggtgcacgccgcaatatggttgcatgcgagacggggtaaaagaaagtgtgctcgacataaatgttgggtcgttgtaggtagaaattgtcttggcttaaatagaaaggtggtgacatgccagagtagtcatcgctttcctatatttataggtcaagtcatggcgatgcgtattatgcgttcattaaattatgtttcgcatatagcgtatgattgtactcacgatttcgaatagacacttcaaataagtcaagtaggttcataatgaaagatgtgtgatgaagttagttgttttaggatattgttgaaatgctccattcatgtgatagacatgtgtggataatttaaatcgagtcgatgtgtgtgacgatgatattcatgaattaagtagatgtcctaaaattgtgtagtgaagcttaggttaagttgcaagcgatgtggaaatgttttggtaaagatgtatgtgaattgtgaacgagtcattcgatgtatcatgtcgtgtcgtggtggtatgaaaaatgggttaggaatcgatcggctaaataccaagttcggttagagttattttgttacttgggattgtggggtgaagtgatggtgtgactatgtagccgtcacgtcatctattgtgcgactatgcttaagtgtgccttgctataagttagaataaatcgagtccctagaacgcgacaattttagaagtaaatagaagctgaattttgaggattgctgttttggactgcatgcgctgttttagttgtgctgtatgttgggtgaactgaattatgttttctgtagatatgtgctatagaaaagttgtagataacatgattatcttgcttgtacaaaaatttgacagccataagcctgatcgtttaggagttgtgtttttcgcaagcccagcatctgaatctgtcgaatttctggacagatttcagaaattgcaatggttgcttaagttaatgttgaaataagttattggtggccacaagaaagttgtagataaccttattatcttgctggtgttaaaatttgacagccataggtctgacagtttaggagttacatattttgcaaattcagtaactgaatctgtccaaattctgtacagatttcagaaactgtattgtttgcttaagttaatgttagaatcagtccttgtagattataagaaagttgtagatgcttttctgatcttgcttgtgttaaaatttcataactaaaggcctgacggtttaagagttatgaattttacaacttggtggctgtgttctgtccactgacagaacagatttcgaaaactgaattgtttgattcagttcaacatagaatcaattcttggtgattataaaagttgtgtagtacttttgccaagctttccaaaaagtcttggatcactctttttggtggtctgaagcttaagttatgaatatttcaattaggaagactgaatctgtccagttctggacaacaaggtcttttagtgatgtttacgcttggttagatattgaatcaccctgtgatgtttataaacaatttgtagaaaatttaattagcttttcagaaagtctaggatcactttgtttggatgtctgaattttcagttgtgaatttttgaagttgctagcctgaatctgtccaaatctggacagcgctgttgtattagcacgttttgaccttgctaagtgttgaattatgttgtgatgaaaataccaaagttgtaaagcactttttaagctttccaaaaagtcctagtttgctatttttggattcatattttaaaagttatgattaaaacaagtgactgctgtattgctgtccaaaaatctgcaagtgccccatttgatgattgagttcacccgtttggctaaaaatgcttagttagcacgtagcgggcataggctcgtaatggctaaacatagactaacatgtgttccatgattaaggtgcttgcttgctgtagttgattgtgatagatgagtccgtcgacttggatgcatcggtcctctgttaaacttgtttgtgatgcttttgtgtgatcaatagaactaatgcaaagtcgtagcaattaaataaatgcgtgtacctgtgatatcgtatttaggttgtgtaaataaataaaatgtggtcgtcttgttaatggtgttaatgataaacgccgataacatacgaatagctagcgcttgcgtatagtcgttacggtgtcttgcaattaaatgttagtttgctaccatgtatttatatagcttgtgatatttttcattgtattcatacatatgcatcttgcatctcatttaggaccgagaggtgatgatcgtgcaagtgatgtggtgccagccacaagatgcagatggtggacgacctgaagaatggacttaaccagtggatgctcgccaagcgagtacctccccagcaaacactatctaagtgttaaattaaaggcaagccccggtttatgcataaccgttatatatgctattttactgcacttaatgtttgtaggcttgtgctgtgcacttaagtgtaggagttgcctgaaaccctagttgcatgaactcaggattcctttttgagatgaatactagtatgttaggtcgagtagctgctttactaattagggatctcggtagaagtcgagtgatttttctagcactcgcgcgaggtcaggaattggctgtatccactttcttatcatattaatgttggtttgtgggcaacaatccatggggattggttgtctacgggataaaatgtgaataaggattaaggtgtggtaccgtgagtcaagcgtttgaacgtactaagcacatgccgagaaatatggtaaatcggtaagcctagtacctgagtgaacctggcagtggacatatcccctcacgcgtcctgagacgaggtctcccattccggttatggtgggtacaagtgcggtcactgcacgacggccagtcggggtcagtggggcattgtacgacaaggcggtgagccctgatctgctgacggggaatcgatggggacggttgatgtgtgtggggacggagtgcccctgcatgtcgtgtgtttaggtttaccttgcaaggataaaaactcgattcgaatcgtctgcttctcgcagctaatgagactgcttgatccatgctgctacattgagtaataagtggaaatgaggtgactgacaaaagatgttgattgataaattgtttgataccatgtatgactagctaggtacatatctagtaaagaggatcatactaaaacttgaaaagctaaaacatgattttagactcagctagtgcttttggcaaccaaacccctcagccaaacagctgcatgtctagaggtagaggagtagactcctcacaccgggtaagtctagctgagtattagtatactcagccttgcttgtggcacaatttttgcaggtactccttaggatgtttggttgatggtgtgacttggcctccatccctgccaccgggatagatggtcgagtgggttactgcttccgcaggagaggaccaggaggagtagcgtggccaggcttcgccatgttactcggttcttcttcgttagttattccgctgcaataaaatttatggttattatttttgaaactccgataatgtaatcattattgatacttattaaatttgtggtattatgctttattgtacttctctgtgcctcaccttcgagtgagctagtggtattcgatcctggtaagtggctttatcggactagatccgagggactgacgggttattcctgtttaagtgtgttgctgcccttaagggtgcgacttgggcacttaagctgga

SEQ ID NO: 9980 - DNA, 1124 bp, Zea Mays
caaccttcccaaaatttcgaactcgtattaacggtcggcggtgggtgtggagcgggacggggcggcgagatcacgacgagatggagactgacatctcttcatgcggaggcggcggcgcccaacagcggggtataggacctgtggaggtgcaagcggcgacggcagcactgcggcggtcagaggtgttccacgtcttgaaggagctcgtaggcttcgtcctctacatgcaccaccagatcccctcggttttgccgagtcttgaaaatgaatttgcaagtttaaaggaggaaatgacagaaatggcattacaaccagctgaactcaaaccatctgatcggagaaagtacaacacacgaaaaacggaggttagacgtagaataaagaagcacgagaagttgatgaatggcatctctaccttactctgttctcttcagcacgcacttgatgaagtttctagcattgaaggagttgtcctgatacttggaggaagccttgtacggcccctatttgtttatgacattacaatttctcatggtatctttggtccaggaagtgccaaagaacatgctctaaccaagttagcccaatctgtttctcggaaggctatccgtgctcttgtatcacgtggagctgggagtctgtcctacacagcaagttgtttttgttggtaagatgctccagtacattaaagctaccactggatttcctgccaaagcttgattttcgttacagcaaaaaggttgtacctcttcaaatgcatataaagtgcagtaaatcagggtgttcagggcataaccagcaccatatgcctcttgttgattccccatgttcgacttcagaatcttctctttcagatgttatttggttccagtgcaagcatacaataagaggtttaccaggcaaggcgtcactagaagggtgatgtgttcatgatatcaaagtttacccaacatgtctttgttgttgtagcgagtaatataacatatatgtacagtagatgatgcttattactttgatgaattgtagcgagtaatatcaaatcagttactacgtaccttgtgtaaagcaacttttgctagttttcaggcaaattaatccgatgttcggttggagcacattggtag

SEQ ID NO: 9981 - DNA, 1164 bp, Zea Mays
cgcccaaccgagcaaccaaccttcccaaaatttcgaactcgtattaacggtcggcggtgggtgtggagcgggacggggcggcgagatcacgacgagatggagactgacatctcttcatgcggaggcggcggcgcccaacagcggggtataggacctgtggaggtgcaagcggcgacggcagcactgcggcggtcagaggtgttccacgtcttgaaggagctcgtaggcttcgtcctctacatgcaccaccagatcccctcggttttgccgagtcttgaaaatgaatttgcaagtttaaaggaggaaatgacagaaatggcattacaaccagctgaactcaaaccatctgatcggagaaagtacaacacacgaaaaacggaggttagacgtagaataaagaagcacgagaagttgatgaatggcatctctaccttactctgttctcttcagcacgcacttgatgaagtttctagcattgaaggagttgtcctgatacttggaggaagccttgtacggcccctatttgtttatgacattacaatttctcatggtatctttggtccaggaagtgccaaagaacatgctctaaccaagttagcccaatctgtttctcggaagaacttgtatatttctaggctatccgtgctcttgtatcacgtggagctgggagtctgtcctacacaggacctagcaagttgtttttgttggtaagatgctccagtacattaaagctaccactggatttcctgccaaagcttgattttcgttacagcaaaaaggttgtacctcttcaaatgcatataaagtgcagtaaatcagggtgttcagggcataaccagcaccatatgcctcttgttgattccccatgttcgacttcagaatcttctctttcagatgttatttggttccagtgcaagcatacaataagaggtttaccaggcaaggcgtcactagaagggtgatgtgttcatgatatcaaagtttacccaacatgtctttgttgttgtagcgagtaatataacatatatgtacagtagatgatgcttattactttgatgaattgtagcgagtaatatcaaatcagttactacgtaccttgtgtaaagcaacttttgctagttttcaggcaaattaatccgatgttcggttggagcacattggtag

SEQ ID NO: 9982 - DNA, 3014 bp, Zea Mays
tggggggccttactcaaggcgactactactgtcaatcaggctactgctgctagtttcattagatcaaccatccctactagatggaccaattggcttgctgattctgattctcctgtgttcaatttcatcaacaatctctcgcctataccaccacctaaacctttagactcagcacataatgtgcagctattcaagtcatcagatttggcacctgtttcttcgatctttgcctcaccacatgttaatccaacaaagggaactaaagttctgatcagggacgaatctgttcagcttcctcatgaattgcactcacctagcagtgtcagaactcggataggcacctcaggctcttttagaatgatcagatgcaaagacattgtgccagagaattgtaatatcacttgtcaactaaacgaggcatctattgattcttcagatcatacatcaagctctacaggccaattgactcaatccataaaagatgctgctggcagtatggaaagcgataaggatcaatgcgctggtggtaaaatagaccttaccatgtcccaggagtgcacaggcctagaaggtatgaaccttgatgagagtagcccagacagaatggattcatcacattctgggatagttgttcatgaaaaccagctatctgaacaaaacaatgatgaacctgcggcatataatggggtttacatgattacacaccaatcaagtagtgatatgctgactttagccgtaccatctggaacagaagcacaaccaatgaatgatacacaaaaggctgataatccctacccttgtgaatccttgttggatgttcagtcaagtggaaattgcacccaaaattctgtgcatgaaccccatctgtactggaacggggcagttgaaggggctgcagtagcttatactccccaagcacttcctggtgctttgcaaagtcagttgatgccatgtaacaagctcaatgagccaaaagattacatgcctactgagcaaaatgctttgtcacagcatttacgtggcatgcgtaggcgcagccttttcaatgaaaaggctgggcttagtaataaaggtgtagacaaagcttcagatcatcatcctgtaaattcaactacccccaaatgcaaaaccatttctggtgacaactcaaagactctaagaacccccccatgtgcattgcctggtattggcttgcacttgaatgcccttgccgcaactgcaacacctaaagagaaaatagtccctcaagacattcagtctactataaatgaatcaagtaacttgataggccctgctggatcttctccggcaccttctgagcaaaacattataaatgatgatttcactcaaacaactgatgttgcaaccgctgaagcttctagtcagggtagtcccaagaagaaaaggcataagtttgatagtggtgatggcacttcatgcaagcgttgtagttgtaagaagtccaaatgcctgaaactttactgtgagtgttttgctgctggagtctattgttctgagccttgttcgtgtatcggctgtatgaacaaccagagtcatacggaaactgttctatctacgcggcaacagattgaatctcgcaatccattagcatttgctcctaaagtaattcatacatctgagcctggtctggaactaagggacttctccaataaaactcctgcttcagctcgtcacaaaaggggatgcaattgcaagaagtcgtcatgtctaaaaaaatactgtgaatgttttcagggtggtgtgggatgctccataagttgcagatgcgagggctgtaagaatgcttttggaaaacgggagggggctgccgtgttaagcatagaggaacctaagcagggattggaagaaaaggatgtttgtgtgaaagaagagaaaagtgaaatcgagaaacagcttgttgtctaccaaactcctgatgatgctcctgctgaaaatgtactgaccacaccttccatggtgcagtgcagacccttggcttgtcgtccacccccaagctccaagaaaagctccaaaaaaccacgatcttcaacaaaactcactggacatccttcgcggttgtgcaacttacaagctcctccgaagaccgacactatgctctccccattcgaaaactacgcggaaatggtccttggtgatagcacatcggatatcctcaagggaaattcatctcctcaaacttctgttaaagtggtgtcaccaaacaagaagcgaatctctcccctgcgaatgggtaccgggctatctccaatctgtaggagtggcaggaagctgattttaaagtccattccttctttcccttcccttggcggtgatgtaaacaatgaggatccagaaaccaagttgccagccccttgaatttaccatattttgtcactggtttatttctaccataccatctgatagtggacagccaagcgactttcctttcatcatttctatctctctcgatcaatgattatttatgtactgctataataatctgccgcgtgctggcaaaattctgcctccctagaacaaccaatggcatttggtttgctggtaaattatctcttggctccgtgtgttccctgtggctgtctgtctataatttatgttcattattttgttccggagaccgaagaatctgaggacttgtatgtatctgggatcaagatgtgaatctcgcatgtaccagatgacagaactgttaagacttatatttgtctgaggttaaactgcaagacttttatttaagctagaactttgatcactataggatatggcatgatatagcagggctcttgagatgcattctcttgtgcgtgcttggtaactgtagtcgtgcaactgttgacggcgtttgttcagaacaagtggttgatgaatttgaagatggtttagggagtgggaatgattttgtttgtgtgcgtgcgaacttgtaaaatctccgtgtatgaactggcaatgcttttatggtattgatcatctgcggtgtgttaactgagtgcaaaata

SEQ ID NO: 9983 - DNA, 3059 bp, Zea Mays
attaggacaagcattagtgttcgctcgtcactcgtcagtactcagtggaggaggcggcggcggggagggagacagatgcgggaggcccaccgcggggtcgccggaccagatggacacgccggataggccccgcgccggcgccggcgccgggattctcctgtgttcaatttcatcaacaatctctcgcctataccaccacctaaacctttagactcagcacataatgtgcagctattcaagtcatcagatttggcacctgtttcttcgatctttgcctcaccacatgttaatccaacaaagggaactaaagttctgatcagggacgaatctgttcagcttcctcatgaattgcactcacctagcagtgtcagaactcggataggcacctcaggctcttttagaatgatcagatgcaaagacattgtgccagagaattgtaatatcacttgtcaactaaacgaggcatctattgattcttcagatcatacatcaagctctacaggccaattgactcaatccataaaagatgctgctggcagtatggaaagcgataaggatcaatgcgctggtggtaaaatagaccttaccatgtcccaggagtgcacaggcctagaaggtatgaaccttgatgagagtagcccagacagaatggattcatcacattctgggatagttgttcatgaaaaccagctatctgaacaaaacaatgatgaacctgcggcatataatggggtttacatgattacacaccaatcaagtagtgatatgctgactttagccgtaccatctggaacagaagcacaaccaatgaatgatacacaaaaggctgataatccctacccttgtgaatccttgttggatgttcagtcaagtggaaattgcacccaaaattctgtgcatgaaccccatctgtactggaacggggcagttgaaggggctgcagtagcttatactccccaagcacttcctggtgctttgcaaagtcagttgatgccatgtaacaagctcaatgagccaaaagattacatgcctactgagcaaaatgctttgtcacagcatttacgtggcatgcgtaggcgcagccttttcaatgaaaaggctgggcttagtaataaaggtgtagacaaagcttcagatcatcatcctgtaaattcaactacccccaaatgcaaaaccatttctggtgacaactcaaagactctaagaacccccccatgtgcattgcctggtattggcttgcacttgaatgcccttgccgcaactgcaacacctaaagagaaaatagtccctcaagacattcagtctactataaatgaatcaagtaacttgataggccctgctggatcttctccggcaccttctgagcaaaacattataaatgatgatttcactcaaacaactgatgttgcaaccgctgaagcttctagtcagggtagtcccaagaagaaaaggcataagtttgatagtggtgatggcacttcatgcaagcgttgtagttgtaagaagtccaaatgcctgaaactttactgtgagtgttttgctgctggagtctattgttctgagccttgttcgtgtatcggctgtatgaacaaccagagtcatacggaaactgttctatctacgcggcaacagattgaatctcgcaatccattagcatttgctcctaaagtaattcatacatctgagcctggtctggaactaagggacttctccaataaaactcctgcttcagctcgtcacaaaaggggatgcaattgcaagaagtcgtcatgtctaaaaaaatactgtgaatgttttcagggtggtgtgggatgctccataagttgcagatgcgagggctgtaagaatgcttttggaaaacgggagggggctgccgtgttaagcatagaggaacctaagcagggattggaagaaaaggatgtttgtgtgaaagaagagaaaagtgaaatcgagaaacagcttgttgtctaccaaactcctgatgatgctcctgctgaaaatgtactgaccacaccttccatggtgcagtgcagacccttggcttgtcgtccacccccaagctccaagaaaagctccaaaaaaccacgatcttcaacaaaactcactggacatccttcgcggttgtgcaacttacaagctcctccgaagaccgacactatgctctccccattcgaaaactacgcggaaatggtccttggtgatagcacatcggatatcctcaagggaaattcatctcctcaaacttctgttaaagtggtgtcaccaaacaagaagcgaatctctcccctgcgaatgggtaccgggctatctccaatctgtaggagtggcaggaagctgattttaaagtccattccttctttcccttcccttggcggtgatgtaaacaatgaggatccagaaaccaagttgccagccccttgaatttaccatattttgtcactggtttatttctaccataccatctgatagtggacagccaagcgactttcctttcatcatttctatctctctcgatcaatgattatttatgtactgctataataatctgccgcgtgctggcaaaattctgcctccctagaacaaccaatggcatttggtttgctggtaaattatctcttggctccgtgtgttccctgtggctgtctgtctataatttatgttcattattttgttccggagaccgaagaatctgaggacttgtatgtatctgggatcaagatgtgaatctcgcatgtaccagatgacagaactgttaagacttatatttgtctgaggttaaactgcaagacttttatttaagctagaactttgatcactataggatatggcatgatatagcagggctcttgagatgcattctcttgtgcgtgcttggtaactgtagtcgtgcaactgttgacggcgtttgttcagaacaagtggttgatgaatttgaagatggtttagggagtgggaatgattttgtttgtgtgcgtgcgaacttgtaaaatctccgtgtatgaactggcaatgcttttatggtattgatcatctgcggtgtgttaactgagtgcaaaata

SEQ ID NO: 9984 - DNA, 1146 bp, Zea Mays
gagaaaagaataaacagcgaggccttcgtcaaatcaaatcataaacccaaacctcctcgtcctctgtcagactaccactctctccctcgcggactcgcggttgattcctcgcggcggattcgcatcttccgcgtcagggacagggagagtactccgtcggacggttggaggagaacagggagaggagctctgagatggagacggccgcctcggcagcgcgcctggtgaactacccgctcgtcgcggcgcttctcgcgttcgccgtcgcgcagtcctccaagttcttcaccacctggtacaaagatggccggtgggatgccagacagtttatagcttctggagggatgccatcatcccactcagctacagtgacagcactcgcagtggctgtggcgatacaagaaggctttcatagtgcaacctttgcaactgcactagtctttgcatgcgtggttatgcatgatgcttttggagttcggttacatgccggaaagcaggcagaggtgctgaatcaaattgtctatgagctaccagaagaacacccattatcagagacaaagccattgcgtgaaatccttggacatactgttcctcaggttgaattaaatgctttgaattacctcccttgatgttttaactattctgtggccttgccggttaggaaagacagtcaatattcaaataagatgaagtcattgggatatagggccgttccttttcaggttgtggccggttgcatccttggagttctcatggctgccgttatgcacctgtctctcgggagttcttagtcaactgttgttcatggatgtcatgacagatgatcacctaatgtctcgctggtgatggctataaagcatgaagcatgatctccgcatggatctggttgtccaagtgtttggtagtacgaagttctaaccgatttagttctggacagtaggatataggttgtgtagcttgaatcggttactgtaaatctgaaaggttttgctttcaactccaactaccaatcacggtgtaatggaagctttgttatacaatcaacagcagtaaattcattctgaggtaacgatcggtatagttgatatatcatgccatcacatttgcttcccgttccaaattgtaagtggttctgacttttttaac

SEQ ID NO: 9985 - DNA, 1644 bp, Zea Mays
cgccggcccgccccttccttgctcgagctgccgccacgccccctgtgcccccaccctccgatccatccacgactgcgctcgctgcccccgctcgagacgctgacacgccctcatacgagatctgcgccccctgtgccccctccgctccatccatgatcgcgccccccgctcgagttgccaccatgcccccgtccgagatcagcggagatgggcgtggatggtgtcgcacgcgtcgttcgacaccaaccgcagtagcatgcgcggggccacggtggcgcctgggctcgtgtccgtggaccaccgcctccatctgcgtgccctagcaaggtcgatgtcgtgggctgccgccggcgaggcggccatccttggcatccgtgccccagcacgcgaccacgggagcagaacccttctcccgccacatcctcatcgcccccgatgccaaacctgacgtcggacccgacgaccgctgcctccgtccccatctagcgatctccctctcctcgccattgccgacaccaccgcgattgaagatccggaaggagaaggataaggatgccaaggaggcgccccggtcgacggaggaggtcggccgggccacatggatgctgcttcacaccatcgcaggctcgcaatgcaggtgctcaatctattactaatctaccaatgttattatactatctcacgttacataatgatcaaaatgctatgggagaaaaaatgttatccatgtatgacaacacatttatatagattgattgttatacttgtgggacgtgggcagagactgatatcttttttcatatttggttcttgtttggatctttcagttccctaacgaaccaacaaggtgacaaagacggtatgcaaaggagttgacgctactgtaggtgtccacagattattttggtgcacggttctgccgatccctctgcccacccaccgccccctctcctccctgccatcaatgcgacgcctcacttgtttggaggttggcatgtggtggacaggcgacgagcgttctttggtagccgctccggtagaatagcaaggtggttaaaataaaagttatccgcaataggcaaacatgacagttagaggggtatggatttgttcagttcttttctcatgcattagcagaaaaggctcttcaagatttttatggtcatgtgatgccaaaccctgaccaggcatctaagttgaactggtatcatatcgcatgggtgaaaagcgaacaatgccatatcagataaaagcagatggagcttccgtaggaggtctacaaggcaccgagttttgaagaactctgatatctcagaacctgagactcttagttccagcaaagcaaaggctgacattacaccgagcaacaatgtttatacttcaacatattcctatgcctcggagaagcctctgcaacaagacaagccagatgaagaaggtagtcctatactcatcatatgaagaagatggagtagagaaatctggagggggctcgtggagatcctgggccattatttgcagaccatagtgacagcttgttggaccacttgggcacttgggttaccaatggggagtaattccacaacatgagtctccaacaatgggtcatttaagtgatttaagattctggcattttatttttag

SEQ ID NO: 9986 - DNA, 1564 bp, Zea Mays
gacatgcatatccttccagtgcagccttgtgttttcatcctccttgaagcgaaaacgatcgagcttgtatcgcaggcatttcggtacactacgttctccggctgtgtagagcttctgcggagatgggtgccgagttgggagaagcgggtgtccctgcccgggacatggtggacgcgctggaaggcgtgcgctccatcctgctgaaaccgtcggagcgcctcgacgacaagcgcttcacgaggatcgccggcgccgacttcgacgacgccggcctcggcctcgccgggttgctcggctcgctcgcgtccacggggttccaggcctccaacctcggcgacgccatcgacgtcgtcaaccagatgttggactggaggttgtcccacgagaagccaagcgacgactgcgctgaagctgaactcgatcctgcgtacagagaatccgtcaagtgcaagatattcctggggttcacttcgaaccttgtgtcttccggtgttcgggagatcatccggtttcttgttcagcatcgcatggtggacgttattgttacgactgctgggggtatagaggaggacctcatcaaatgccttgcgccaacctacagaggcgacttcactctgcccggagcgctgctgcggtccagaggacttaaccggataggaaacctgctggtgcccaatgacaactactgcaagttcgagcactggatcatgccgatcctcgacaagatgctgctggaacagtccacccaaaatgtttggacgccgtccaaggtgattgctcgccttggcaaggaaataaatgacgaaagctcctacctttattgggcgtacaagaaaacacatgggaacatctcaaagactgactcgtcaaaaaaacttgagcagaacaacatccctgtgttctgcccagcattgactgacggatcaattggggacatgctgttctgtcactcggttcacagtccaggtcttgttgtcgacattgtacaagatgtacggctgatgaacgcggaaaccatccacgcaagcccaaggaagacagggattatactccttggcggaggccttccgaagcatcatatatgcaacgccaatatgctgcgcgacggagctgactatgcggtgtatgtcaacacagctcaggagttcgatggcagtgattccggggcgcggcctgacgaagcggtttcatggggaaagatcaagagctcagcgagaactgtgaaggtgcattgtgatgcgacgattgcctttccacttcttgtggctgcaacatttgcacgcaaggttcacggcactaaatcaacaaactgaatcggaggcagtgaaattaaaatatggcgctctataactagctgaaactttcctcatatgatggttgagcttgaagcatgaacttttatttgcttgaagggtgtctatctcttagctcgtttactatttatacattactgtaacatatgtatgatatatattcatttgaaaccatttgggttattatcatacaataaaacttgtgtgtacgagaacatttgtgaccctctcttcaaattctcaaaattgtt

SEQ ID NO: 9987 - DNA, 1255 bp, Zea Mays
accctgcgcccctctcttgttctccgtttccccgcggcgtactcttcctgctcttcctccccctctgtttatctctctctcggtcctcccgtgtccatcgcgtgcgctctgtctccggtggcgccgcctccgccaccctgcaccaggtagccataccttcgccggagacgagcgcccaccagatcagattcgtggatatgtctgataatgagaaattggtgggggagggaaccacccgccgaggggcggactgggaagttgtcactctcacagcatctgcctatgaagcagcgccagggcctgttggaacggaagtaaagcctgttaacgaagatcaagagcgtagttcatccgatgcactgctcatgtctgaccactttgtgtttccgccgagtgaacacgagaacctgccaatacaaaccagttttgatgagatacatgctgagaaggatgtgcagaaacctagtaccagtgtggaggattatagtatcaagaatgatgttgggtctgagagagttcagtttgacgatgaagggaaacacctctcagatgatgatgtggagatgaaagatgacacccctgggtacggttcctctcacgctgaagatgatgcacatggttttgttgcccatggtgatggcattgagtctggtgaagattttgatgaaaaatcaggccaccctttagagctctcagacagcaagagctgtgatactggtgcctcttgcaaatgttggttgaagaagcatatgacatgcctgtataaccaaacaaaggaaacaaatgctatctggtctgtggtggttgcagctgcactagttggtattgtgatcttgggacgttggcacaaagataaattccaccttaaccagcttaagtggtgctctggctcagcagtgagaggatgatcaacaattggcttgttgaaaactcagatgagtcaattcaactgtcaccaaaatggttttggaatattgttgtgacggtgacgaaaaggagtatgttcaattttttcttgcaacctggcacatgatttttggttcctggcttcctgctacttgctgtggtgtatcatatatgttgactgatggctgtagaacatagtacaattgcatactgcaaagtctgttgaaattttggtggttctgcgagaacaattcacgtgcgattgtgaaaatggaggacaaggaaagtttgtttggctcttatttgttgttactcctgagtattgaaatattgcttaggtctagtttgg

SEQ ID NO: 9988 - DNA, 1559 bp, Zea Mays
accctgcgcccctctcttgttctccgtttccccgcggcgtactcttcctgctcttcctccccctctgtttatctctctctcggtcctcccgtgtccatcgcgtgcgctctgtctccggtggcgccgcctccgccaccctgcaccagatcagattcgtggatatgtctgataatgagaaattggtgggggagggaaccacccgccgaggggcggactgggaagttgtcactctcacagcatctgcctatgaagcagcgccagggcctgttggaacggaagtaaagcctgttaacgaagatcaagagcgtagttcatccgatgcactgctcatgtctgaccactttgtgtttccgccgagtgaacacgagaacctgccaatacaaaccagttttgatgagatacatgctgagaaggatgtgcagaaacctagtaccagtgtggaggattatagtatcaagaatgatgttgggtctgagagagttcagtttgacgatgaagggaaacacctctcagatgatgatgtggagatgaaagatgacacccctgggtacggttcctctcacgctgaagatgatgcacatggttttgttgcccatggtgatggcattgagtctggtgaagattttgatgaaaaatcaggccaccctttagagctctcagacagcaagagctgtgatactggtgcctcttgcaaatgttggttgaagaagcatatgacatgcctgtataaccaaacaaaggaaacaaatgctatctggtctgtggtggttgcagctgcactagttggtattgtgatcttgggacgttggcacaaagataaattccaccttaaccagcttaagtggtgctctggctcagcagtgaggtgcgcccgtacagctgggaaaggataatagggggcgattgcaggcccaagccatcagcgtgtgcaacttaacagattttaggaatgtcatccaaggaaatgcaaacttagaatagtggccgttcagggaagttggaaattttgaaggcattcaggggatcaatataaatttcagtggcaatgaggaatttattcatattctagcgtgaggattagcctttcacttttcaccagaaccaagaggatgatcaacaattggcttgttgaaaactcagatgagtcaattcaactgtcaccaaaatggttttggaatattgttgtgacggtgacgaaaaggagtatgttcaatgtaataatatgttcaactggaatttcacttgccacctacaatgagtgcctcgtgggcttctaagtcaaactcactcctgccatacacattatcttacagtttttcttgcaacctggcacatgatttttggttcctggcttcctgctacttgctgtggtgtatcatatatgttgactgatggctgtagaacatagtacaattgcatactgcaaagtctgttgaaattttggtggttctgcgagaacaattcacgtgcgattgtgaaaatggaggacaaggaaagtttgtttggctcttatttgttgttactcctgagtattgaaatattgcttaggtctagtttgg

SEQ ID NO: 9989 - DNA, 1169 bp, Zea Mays
gcctctctcgccgtcgttttcttggcgttattagtcctgccggccggcctggaggggaggatcgatcagcaaggccaatagccaatagccaggagccagtcgccagccagccagccagccgcataaatccatccatctcctccatcttgctctccctctccctgcaggccggcagccgctggaggcacagacgacaaggcatcggccccggatcgagcccgacccctcttctcgtctcgtctcgtctctgcgctgggaacgccggctgccatggctcagcagaagaacgcgcacgtgcccaagttcggcaactgggacagcgacggcaacgtgccgtacacgctcttcttcgagaacgcgcgcaagggcaagggagccggagccgccggcggcaggatgatcaaccccaacgaccccgccgagaacccggaggccttctccgtggccgcgccgtcgccgccgccgggccgccacgagcgccgccccagcgacgcgccgccgccgccgatgtcgcccaacccctactacgccgccgggtcgccgtaccaccgccacgccgccggcgagccgccaaggagggccgccgggtacagcgtcgaccagtcgccggcgcacccctacagctccgagagcgccgggtacggcctcgtcgccagctccgtcgaccgctcccgcgccaagggcgcctcgcgcggcaacgagacgccgacgaggggctcggcggtgcccaagttcggcgactgggacgccaacccggcgtcggcggacggctacacgcacatcttcaacaaggtgagggaggagaagcagacgacccaggcggggaagccagcggcgtacggcaaggacggcatgcgtaccaacggccccaagcagcacgacgacgacggctacgtctcatcgacgctggttcctctgggtctggggatgtaagtctggagaacgaggggcatgaaacgatctccatgatctttcctgtggtagattttcacttcaatttatgaagtgagacatagagttgctgtcatgttagaagtaagcattccattgttgcgttggttcttccgtattgaattgaatttacagtacatgtatcatgtatgtacgattgtacgcaggattggactctgaactccgaggtgaatatatgtgtgtttgtttggtgtcca

SEQ ID NO: 9990 - DNA, 5683 bp, Zea Mays
aaaagaaaggactgcagcccgcgcccgccacgcctttctctcttccgtgcagctgcagactgccgtgccggtgcggtgcgccccgctcccgtccggccggaccccaaaaaaaaaccacccagaccgctgcgattttttacgggaaaggcttccccctgtttacggctttacgccaagcccgccagctcgcccgttgcattcccgtttcgagcttccgccctccctcctgtgtactatctctttccctctgcccaccgctcgcagtcgtacaccaaccacttcatttcggggccgtgagagagaggccgcgcggcggcgacgaggcccggagcgagggtggaggacgacttagggtttttggtcggctgatccatggacagggggacgggcccgggcgccgaggtgctctcccccggcgaggccgagtggcccccagagctccgcctcccgccgccgcctcctcccgtgccggagcccccagggccgcatccgcccgcccctgactccgcttcgatgcgaatgcccgcacctcatctacacctgcagcttcctcccgcggcggcggcgaggaaggacccgtctccgcctcgccacggggagggcttcgatgaccagctgttcctcggatcgctcatgggggctgcggccccgctccagcatcagcaccaccaccagcagcagcccgccgccgcggcaccggtgaagaggaagagagggaggccgccgaagaacagggacggtgcggcgccggtgcctgcgccggtcaagccggtgagcaagaaggatgaggaggtggtgtgcttcatctgcttcgatgggggcaacctcgtggtttgcgaccgaaggggttgcccgaaggtgtaccatcctgcgtgcatcaagcgagatgaatccttctttcggtgtcgggtcaagtgggattgtggttggcacatatgcagcagctgcgaaaaggcagtacaatacatgtgttatacttgtacgtactctgtctgcaaagggtgcgtcaaacaaggcaaattctttggcgttagagggagcaagggtttctgtgacacatgttatggtactatattattgatagaatccaaagacgatggtgcaaaggttggtgttgattttgatgataaaaatagctgggagtatcttttcaagttatattggttggatctgaaagggaagcatttactaacgattgaagagctaaaaagtgcaaagaactattggactgttcctactactgctggtaggagagagaaagaggagtcatctgatgaactatatgatgcaagcaatgaccaagatgctacgtttgacatttcctcaaagaaacaaagacagaataactcttcaggaaaaagaggacaaaaacgtaaaaaagatggtggcattacttcaaggaagcgtggaatctcaattaatagtgctggaagcttaccgaatggatcaacaggtgaagggatgtccttggcaggtgacacaaaatgggcatcatctgagttattggaattcattggtcacatgagaaatggtgatagttcttatatttcccagtttgatgtccaggttcttttgctcgaatatataaagcaaaataacctctctgatcctcgcagaaaaagtcagattatctgtgatgcaaggcttagcaatttgtttagaaaaccacgtgttggtcattttgagatgttaaagcttttggagatgcattatcttgtgaaacaggttccaacattgaatgcagatagtgaaagagcatttgattcatactcggcccaagtaaatcatggaggatataatgagttgtccgataaattaggttctgataagaggaggaaggctcatatgaagattgaaagagaatcgacaattaatccagaggattatgctgccattgacatgcacaatatcaatctgatttacttgcgccgcagtgttatggaggatcttattgatgaggttgctgttttctctgacaaaattgctggggcttttgtgaggataagaatttccggtcttggcaacaagcaagatatgtaccgactggtgaaagttctcggtacacataaagttgcagagcgatacactgttggtaagaagacaacagattatgctcttgagatatctaatttagaaaaaaaagagattatcacaatggacacgatctcaaatcaggatttcacagaggaggaatgcaagcggttacgccagagtatgaagtttggtctaactgcccggttaaaagtgagggatgtctatgataaagctaaaatcttccaatctctgcaatttaaagataggctgagccgtcttcgtgatcgtgctagtgaaaccggacgccgaaaagaattgagagagtgtgtagaaaagttgcagcttctgaacactcctgaagaaacagagcgcatgattaatgaagctcctgaagtacatgttgatccccagatggatccaagttatgaatccgctgaagaacccgattataagaaagctgttgattggaccatgcatcggaacggaccagatctattatttccaggaagaaaagggacaaaattgaattctgtggagaatcatacacaaaatagtctggatgcaagcggtcacattagcagtctacctacagaggatgtggaccatagattaggtgctggaagtaacattaatttaaacaatatggcaccagagcctgcatcacttggagttttatcaaatgacactgagccagaaaaagtttggcactacaaagaccctaatggaaatgttcagggaccgtttactcttttgcagttatccaattgggcaagttttttcccacgtgacctgagaatatggcttacatttgagagtgaggagaactcactactgttgactgaagtgctcccaaagcagcagaaagattttattcagccttcaacagttactaccagtgataaatcaatatgggcaggctctggtcaagatagaattaactcaaatgcaaataactcttcctcccctagcttgtctgctgagtgctatgatccaacaaaatatctaaagcctctaggtggaacgtcaccatcaagatctctgaaagattctcatgctttgcatgaggtccagaatcaggttaacgattcatccacaattctttcttcagctggttcatatgtaccaaccagttctcatgatgaaagggtctcaagagacagggttgatgagtggaacagtagtcaggacaatggtggcatttggaatccaaccatgaatcatagtcggaagagtaatgcacagcaacatcctgacggttttacagggaaggaccaaatgctaactgaatctaaatgtagttcacatatggtctcagttcttaccccacaacaatctgagagagaccctgccacttctcttagtactacaagtcgtccggagtgcaaaaccatgtgccggcaggaaggttcttcatggagttcagctacaaatgctggagttcatgaccttcagttaactattgctttaacaaagccagagacatgttctccaacaaatcctgttgaagacagagattcgagttctgcttctgcggtgtcttgtcagtcaggggctcctgcctgcattccccaacccgatccaacatctacatgtaattcaagtaagattgaggcaaccatggatctgcataaaacatgccagcctgacacatcaaatgaatcattcggccggcttcctgaacctcaaagtggctcactcttttccttgaaaactctaaatcttgagtccgagcaccctagttctacgccaaaactggaggggaaggaaacttccatgaaccagtcaggatcaacatcagtagcacatgagaatttagctacaaagacacgtgtccgcccacctaccagtaaaattgatagcttgcaaccacttaaggaaagatcatgtccaacagaaagggactcaatcactcaattagagcatctgtttgaagagaatgtggtaaagagaaataacgaagtggtcaatcctgtatctgatgctgaagggattgctgtatcagatgtgttggaatcgttaacagaacaagattgtgaaaaatacagtacacatggagcagattgtgaaaaatacagtacacatggagcagcgcctttacaaaatttggtgccagcttcagccgaggaagaacaaccacaatgctccagtcctattgcattgtccccttggggggaaccaagttactatcagggtgaagctgttgattctgctctatggggcgtccaggatggtaatgacatgtggtcaatgccttcaccaacacctggtctccagccttcatcagaggaggcgagagcggaccatggagatggtgcatttgtcgaaacattaccaagacaaggggacgaaaagacggaacatgcaaactcaagtgtctcaggttctggagtgccagaacaggtaaaaccaaaagcaagcactgcatcaggtccatctctagatgggagcacaaaagctttgggttggcaactgctgggctcatctctagaggggagtgcaaaagcttcaggctggaaaccgccagctttatcgattgaagggattgctaatgcctcaggttcgcaagcattgtatcctacgcaagggagcacaaaatcttcaggttgtcagcgatcaagttcatccccagatgggagtagaaaagcctcaggttggcaacagtcaagtacatcaccggtggggagtggaaaagctcatggctggcaacgatcaggttcttttacccagggtggtacaaaagctgcaggctggcaaccctctggttcttctacagatcggagtgcaaaagttgatggctggcaacgaacaagttcatctccggagggaaacagaaaagcttcaggctggcattcatcaggtcgtgagagctcaaagatcacatatggtgccagtgaaaaccgtaaatcattttctagccaccaagcgacgacaccaacagggagacactctttggcaaggaggcagggaagcagcgacaagggtgctgctggttgggaagagagtctaggaaacacttgggaagcatcaaagagacaacagagaaacagcgacaagaatgcaggctgcggagaggctctcggaagcaacaggacctggcacccatcgtctggtaaccccagtcggagcagccaggggaatcaccaacatgacaggcattctcacggcagtgattcgcggcggggtagctcaaactaccctcggaggtccgaccatcgtcatgaccatggcagtggtggttcgtcaagaccctcgtcaagagggcagccccagaggggggtttgtaaatactacgagaatggccactgctggaagggctcgaaatgccagtacctgcaccgatgactgccgtgaccgtgggaagcggaacgccctcacatttttgtatagcagcatatggtctcgtcgtagtcagtaaaaggaggaactgtgtcggcgggaccactagttcgtagtagtacatatccttcagagcaggagcatgactaaagattctccgctttggtgcaggaatgcgccccttttgttcagttaaacggaggtgtgggcatttgcaaacatggattttctccataagccagggtgttgtgcaatcgtacggaataactactgaagagctgcacgtccgattgagaatgacactacggaagag

SEQ ID NO: 9991 - DNA, 1491 bp, Zea Mays
agattacgggcccgagccatcgtcatcgagacatcgaccgactccgactccgactccatccacggtctccttccgagatccctcttctcctcccgcccccgcctgaccgcctccctcctcactccggccccttccgcatgtcaatccatgggctgatactcgaagtcagagtcaccgggtgccggaagctgcgggacacggagttcttcacccgccaggacccctacgtcgtcgtcgagtacgccaccaccaagctccgcactcgcacctgcaccgatggaggaagaaacccaactttcgatgagaagttccatatacccctcattgaagggctccgcgagttgaatgttattgtgtggaatagtaatacgttaactcatgatgacttcattggaagcggaagagtatatctgcacaaggtgctgacaaatggctatgatgactcctcatggccgcttcaaacacgccacatgagatctgctggggaagtgaagctcattatgcatgttgatgtctcagcaatgaagaacaagatgggtagaagtgtcgccgcatcaagtgcacatcctgttcctgcactttcaatgccagccccatctccaaccccagccccagccccatctccagcttcggccgcaacccctgctccagcaccagcactagcatcagcgattccatacacgggagtctcaccttcatatccaccggtttcagcatatcctggtgcaaccgcataccctgcttacccaacttctagccatgcaccatataccactgctgaatatccaccacctccgcagcaaccataccaacccccacctgctggataccctccatcctatccaccacaaccatatgagcaatcttacccaccgcaaccatatgagggatcttacccaccacaaccatatgagcgatcttacccaccgcaaccatatgggcaacaaccatacccacccccgccagcagcagagtcgccgtacccaccagcgccttaccctggtacttatccaccaagaccctattgatatagcagcgtcagtaatgatctcagtttaaggtcagattccaatcgattggtgacaaattggagctgatggggtttcgttaagtgcaacggatggaaatgtattccttgatcagatcgtgtcaacagctcagtgaccagtcatatgtacaataggtagcttgcagattgtgtcagtgaaatccatcctatattgctttgcagtggtggtttagagaccagaactagcttccttcttctcctatcttggaatcacatctgactgatctgtgaccacacaattgtacatgtagtagggtaacctgtgaagtctgctgcttttccaaaacaacaataaatctgaatgtatttgtaacagtcaataaatttgcttcggtggtgaaagctgttggtgtgtgtgagaagtatttgtaacaataaatttgtttttccatgccttttcttctctggcacatggatttatc

SEQ ID NO: 9992 - DNA, 1914 bp, Zea Mays
cttgtgatgctgcggggctggcgacaaccaccagcagcatcgaagacaggaggagaaaggagaggtggtggggcgatggcagcgactgcggcggagggggtggccgcgacggcgctgcgagccgtgctggggcgggcgggtatggcggcggagcggtcggggtgcgccgcggaggcggtacgggttgtggcggtggggaagaccaagcctgtttcgatgctgcggcagctatacgacgcgggccaccgctgcttcggcgagaactacgtgcaggagttcgtcaccaaggccccccagcttccgcaagatacccggtggcattttatcgggcacctgcagagcaacaaagtgaaaccactgttagctgctgttccaaatcttgatatggttgagggcgtagacaatgaaaagattgctaaccacctagatcgagctgtcaacagtttgggaaggcagcctttgaaagttttggttcaagtgaacactagtggagaagaatctaaatctggaatcgatccctccaaatgtgtcgaccttgctaagcatgtgaaactagcatgcccacacctaatattttcaggtctgatgacaataggtatgaaagactactcgtcaacaccagaaaattttaaggcattggttaattgtaagcttgaagtttgcaaggcccttgacataccaacagaacagtttgaactctccatgggaatgtctggtgactttgagcaagcgattgagatgggcagcacgaatgtgaggattggatcaaccatttttggaccaagggagtatccaaacaaaaggcagaactagttggagtttctgaatggccagcccaggggatgcggagggcatcaccatctccatgggggagctgagcgtagaagcagcgacttcgtcagctaacggcggtggtgatgttgccgctgtcgaccaggatgatgtgtgggaagatgtttcagattctcatgggcacgcgtctaccttagacagagaatggatccacaggcagaaccagtttcaaaagatgggctatcgggacggaataacacaagggcagaaggactctgcccaggaaggcttcaatgctgggttcaggcaatctgtaaacgctggctacaagtggggccttgttcgcggggttgccaggtgtatatccttccaagaactgatctcttgtattgccattctcctctagtcttgccctccgattttgatttcctttcctatctgtcgtcattccaaagtagtgcgctagccaatcttccagacagcttgaaagagaaactggtgccggacgtccagtgcagagggaaactacaggatctgcacagctccgtgcgagaaatatcagcagatgacgctctccagatgttccacgagagtatccgccagagtaaccctccgtcagaggggtcaggatcatatgtagtagcatcagccaccgatggagctacggaaccaaacaggatgaaaagcctaccgaaggatctcgtgttgttgctgcgtgaatgctcggatatcaaagtcagcaaggagttggcgtgggattcatgaacaaggcgactcagaaattccaaccactacaagtgtggcagaatcacactgagttcccagattactgaacgcctacctgggctgatggatgaatgtgattcggggattttgttttggaagtgactgagatactcgaaaggttcagggacctcgaatcgaatgtgtctgtagtaatgcagatttttattccatatttcccttttttttgctgcaacctgtaactagaattgtaactataaatttgcagttcttaaacaattgtaatgtttttttttctctccctgaattctgtcatcttcctgaacaatggtcttcatgtggaagtatagtattttgccacgttttgagccgacattc

SEQ ID NO: 9993 - DNA, 1978 bp, Zea Mays
aaaaccccaccgctgttcgcgtcctcgtttctctcaatctctctcctctcctcgcctctccttggtgtccgtgttcacgccgtcgctagcgcctgccgcggcgaagcttctgccctccccggcgccgggctcgggtcgtcgtcggccaggcagctgctacgcgtgaacacggtcacaccagtaccacgtgacgtgaacggtgaactcgtgaagaacagagccgccactgaggaaccctagcgacggcggcgtgctaccggtgacattgtccccctcggtccctcctccatccccgacgcagcggcgccagcctgcaggaagcctattcgagacaaggtcgatctttgctgccttggcgagcttcagccgaatcaaggtcgagcatggcggcaggccagtaaatagagcaacacaaaacccttcaaatcaatggagacctctgcagcaaccccgacccggccgccacaccaggcggccacttccccatcgccatcgccctcgtcgtcgttgaggctgtggaggccagcggcgcagcgcaacatgcgcaatcagtggtcccatctgagcgccgccaaggagcagtggctggccgccgttgctgacggtcgtgcccacgcctccgcgctcgtcaacgtccacctctcctgcaggaacatgccggcgatggatttgggggtgctcaaggatatgccggggatccgcgataaggcgaactccaagttggcgcttagagagcggcatgcttctgtcggcctacaaggagatggtctgtcagctgtcctacttggttgaagcttcccattctatgcgctgtttttctaaagcggctccaaattgctccatcacacagttttctgaccgccaagataatttgaatgattcaggggatggtggaggagccccagtattcaaatggttctccgtattagaatttgagagtcttgcccaggagcttgttcagatgtttgtttcagagcaaaagttgaagaggctgctactcttggaatttctctcgattgctttaaaggaaggtgtagaactccagacatcattaaattggggtgatgaactatatgatggtgaatcaaataaacttcagagtattggccttcagtcaggagatgcctactcaccgcctgaaaattggtgtgcagaacgtttagggagtcagagacctggcaatctccctctgcatgaagttttacaggtttatttaaccacttggcatgctaatatgaacatcaaccggagtagaattggtgaaatatttgagcttgttgaggaggagatgaagattaaactgtcttgaagattccgattcattttgttgggctatccatcaaggaagaagaaatggaaaagaaagatcaatcagttcactattcaccaggattctatatccagtgtctttatctgccttagtagaagccttcagagcttacctatgatcttagaatatagtactggtctccttgtgacccataatttttttaaaaaatttaatgttgggttacactggaatcatattgggaagagcgttggaccaacatatgttattgaaatgagatttctaagttatcaggatcattcgcctagcttcagggtttagatgggcgtcgaggcagcaatcgaggcaaggaggaggcgggggtgggggatgctacaccgaccgtgacgtcgcctactgtcttggaccttctgtgcgccctccttgacaccctcgacgctccacggagctcggaggcggtgaccgtcgaggaggtcggtccctcgaggcgacccggggaaccggttgaaaagtacatcatcccgcctcctatcgttggggcgggtggcgacctcgttcgtgccggatcggacctctcgacatggggagggccgaccctgaggtggatggccaccgagggcaacccctacttcgtccttaatgacacggaggagagggagatgtgggcggagtttcgagcaatggctcagg

SEQ ID NO: 9994 - DNA, 2098 bp, Zea Mays
aaaaccccaccgctgttcgcgtcctcgtttctctcaatctctctcctctcctcgcctctccttggtgtccgtgttcacgccgtcgctagcgcctgccgcggcgaagcttctgccctccccggcgccgggctcgggtcgtcgtcggccaggcagctgctacgcgtgaacacggtcacaccagtaccacgtgacgtgaacggtgaactcgtgaagaacagagccgccactgaggaaccctagcgacggcggcgtgctaccggtgacattgtccccctcggtccctcctccatccccgacgcagcggcgccagcctgcaggaagcctattcgagacaaggtcgatctttgctgccttggcgagcttcagccgaatcaaggtcgagcatggcggcaggccagtaaatagagcaacacaaaacccttcaaatcaatggagacctctgcagcaaccccgacccggccgccacaccaggcggccacttccccatcgccatcgccctcgtcgtcgttgaggctgtggaggccagcggcgcagcgcaacatgcgcaatcagtggtcccatctgagcgccgccaaggagcagtggctggccgccgttgctgacggtcgtgcccacgcctccgcgctcgtcaacgtccacctctcctgcaggaacatgccggcgatggatttgggggtgctcaaggatatgccggggatccgcgataaggcgaactccaagttggcgcttagagaggagcaatacagcggcatgcttctgtcggcctacaaggagatggggatggtggaggagccccagtattcaaatggttctccgtattagaatttggtgggttaatcatctcttgcttctatggattaagtcaccactatgatctttcgtctgttgggtgtgacaatgatctcctaacccatctatatctgagactactcagagcactatatattctcacatttgaggatgccgatcaatatctgagacagtacacacattcatgtttacatgttttaaatccacatgataaaaatatattatgtttcctttaatcacctcagagagtcttgcccaggagcttgttcagatgtttgtttcagagcaaaagttgaagaggctgctactcttggaatttctctcgattgctttaaaggaaggtgtagaactccagacatcattaaattggggtgatgaactatatgatggtgaatcaaataaacttcagagtattggccttcagtcaggagatgcctactcaccgcctgaaaattggtgtgcagaacgtttagggagtcagagacctggcaatctccctctgcatgaagttttacaggtttatttaaccacttggcatgctaatatgaacatcaaccggagtagaattggtgaaatatttgagcttgttgaggaggagatgaagattaaactgtcttgaagattccgattcattttgttgggctatccatcaaggaagaagaaatggaaaagaaagatcaatcagttcactattcaccaggattctatatccagtgtctttatctgccttagtagaagccttcagagcttacctatgatcttagaatatagtactggtctccttgtgacccataatttttttaaaaaatttaatgttgggttacactggaatcatattgggaagagcgttggaccaacatatgttattgaaatgagatttctaagttatcaggatcattcgcctagcttcagggtttagatgggcgtcgaggcagcaatcgaggcaaggaggaggcgggggtgggggatgctacaccgaccgtgacgtcgcctactgtcttggaccttctgtgcgccctccttgacaccctcgacgctccacggagctcggaggcggtgaccgtcgaggaggtcggtccctcgaggcgacccggggaaccggttgaaaagtacatcatcccgcctcctatcgttggggcgggtggcgacctcgttcgtgccggatcggacctctcgacatggggagggccgaccctgaggtggatggccaccgagggcaacccctacttcgtccttaatgacacggaggagagggagatgtgggcggagtttcgagcaatggctcagg

SEQ ID NO: 9995 - DNA, 2810 bp, Zea Mays
caaacgagaaaaaggagaagaaagcaaaacggacgggcgccgccaccacaccacccctcccaacccaccttctgcctggctgccttctgcctccccttcggctccggtccttcctctcaagtcccacacccgtgtcccaccgcaccggccctcaagcagggcagggcagggcagctacctccaagtctccaaccccccaaccccaacagacgggacgccgcctcgtgtccggcacgccgttccctcccgtccccgctccttcccctcgctaaaacccatcgaatcgaccgacgcacgtcctgacactcctgctcccctgtcgccaccgcgtcgcgcgcgggcagaggcctctctcgccatctcgcggccgcggcaccccacagctatcctaccacccgacctcccaccaccgccgccgccgccggcctgctcccaaccacaagtccaggaggacgccccttcgatccgccgcagggaggcaggcgcccgcgcccccgccccccgccaggctccatctccggatccgatcgcccgccggctcggttcaatccgtttacttaattatactgaccttctcatatggcgttggatccgtgatgcctcctccattcctgaagctatttggaattcattgcctgaatcagtgttctgaagtgctatctaacagtcagaaatggatggatccgagcttgaaaatcctacttctagaagctcatcccagaaatctagccgacgttcgagtagtaggcgttctcaaaagtcagctggacagcattctttgaccggtgctcaagagaaaagaagcaaatcgaaatcttcaaggcagaaacacttggttattgacgacaaagaggctaaaaaagggaaaaaacatgaccacaaaattgacgtggcagatgagaggtccaattttctaggttatgaagtgtatgctggaaagctgattcttcaaaagaaaaatagaagtgcgagtgataataatcagttaccgtcaaacggaaaagctgatgcaattgatgctagactcacaagtaaagctctgatctggggcagctctgtactcctactggaggatgttgtctctgtatcatataattctggagtcaaacattttacattgcatgcatactcaactaaaaagtctttatttaaaaagacatgcagagttcagaaagatttctgctttatagcctctacccttgacgaggccattttgtgggtgacatgctttgctgaacaaagtatatatgttaacttactacctcgccttggagcatctagtatcaatcaagactcagaaaatcccctcagtgagtctttatttgaccagccaccgattaaatgcaaatctccgcaaagagtacttgttatattgaaccctcgatctggacatggtagatcaagtaaagttttccatgagaaagctgaacctatatttaagggtggtttcacagctctagatatcttggctgtcgagtgggttcaatctgggcaaatacattttggctcaactgtttcatactatggttttgttagtgatgctacttctatgaactggaatatcttccttcgccaaaggagatggccgtgaatggaaaaggtacagatcaagacaaggcccacctgtccaatgtctataccgatgtgatgcacagcagatcaaagaaagaaggaattccaagagcctccagtttgtccagtattgattctattatgactccaagtcggatgtcgcttggggatgttgatacatcaggtagtacagtggcaagcactgaaccatcagactatgtacgtggtctcgatccgaaagcaaaacgcttgtctctgggaagaagtaacattgtttcagaacctgaagaagtgctacaccctcaaccacatcatggatcattctggccaagaaccaggtccaaagcaagggctgatagaaattcagttggtataacgtctactaatgacacacggtcgtcttgggcagccccatcaatgcatgataaggaagacatttcctcaacaatatcagacccaggacctatttgggactgtgaaccaaagtgggacacagggccaaaatgggatagtgagctaacttgggagcctgaccaccccattgaacttcctggaccacaagaggacatgggaattggagcaccgatggaacttgtgccaaatttggatgagaaatgggtagttaggaaagggcactttcttggtgtcctagtatgcaaccattcatgcatgacagtgcaaagtctgagttcacaggttgttgcaccgaaggccatccatgatgacaacagcttggacttacttttagttggtggaaaaggaagatggaaattgctgagatttttcatacttctgcaattcggtcgccatctctctttgccttacgtcgaatatgtaaaggtgaagtcagttaagcttaaacctggtgcaaacactcacaatggctgtggcatagatggcgagctttgccgtgtcaagggacaggtactctgctccctgcttccggagcaatgcagactgattggccggcgatgtagacaatctatttaagcgctgtgttgaatttcatggatcctggggttctttccacttctaacaaatgtttatataactatactttctgatgggattaagcttgggttggtgttgcaaatgttgagagtttgaaccagaagcaatgttgtgaggtttctgtatatttgagcggttataggatgatatgctgattctgtttaattatgttgattttgcttatatatattcaatagagtaatttagtcccacttcggcgtggcggg

SEQ ID NO: 9996 - DNA, 1052 bp, Zea Mays
ccgcctcccatcgccgcatcagatatccgcacaaaccaagccatcagcgccatggcgatctccacctggagcgcgcgccttctcctcacccctgcttcctcccgcgccaccctatcaccccctcgccctcccactacaaacccgctctcatcgttctttcctcgcaatcgtctccatttcgtgcgcccgcgcccgcgcccgccgtgcgcctacatctctgcgccagcgccgggcccggaggccgcatacgcgccgccttctctcgacgccaccgccgcggcagccgatgtcgccgctgcgatatcctcctccgacgcggtcacttgggccggcgtctgggcgctgctctcgcgacacagggcccgcatcgcggtctgcatcgccgcgctcgtcgcctgcaccacctgcacgctctccatgccgctcttctcagggaggtttttcgagaccctgattgggagggggaacgagccattgtggaggctcttatccaagattgcgatactgtacacactggagcccatcttcaccatcatattcgtgatcaatataactatcatctgggagcaggttatggcaaggctgcggagccagatatttcgaaggattctgatccaaaagatgttattttttgatcgtcacaaggttggtgaattgaccggtttgttgacatctgatttgggttccttgaagagtgttgtaagtgataacatatccagagatcgtggactgagggcactctctgaggcaagaaattttacactatgagaatatcattggtacactttgtatacttttcacactatcaactgagctagctccagttcttgggctccttatggtgtccgtctccgtgctagttgctattttcaagaggtcaactgttcccacttttaaatcttatggaatcgtgcaagcacgcatatcagactgtgcatcagagacattttcagctattcgtactgttcgatcatttggtggtgaaaaacgacaaatttctttgtttgacaatttgcgtgctgcagggacaacaacatctccttttcagcttt

SEQ ID NO: 9997 - DNA, 2549 bp, Zea Mays
attaatttaagtgtgtagtgtaacgacgattaattaagtatcgaactaattaggatctagtgctaattttatttacgcatcgcatgaatatcaattaatatgattatgttgagataagtattttaatctatagctgcttaacgtaatcgttatgtctctcggctgcagcttcgaccgtcgtagtttcttttctcgcatagtcgtagatgcgagccctgcgccacgcgtctgtttagttgttctattttattgtgtggtgtattgttgttttctatgttaaaaatgtggaatgtatgtttgaactcatataggtaacggtccgttggcagagtccgaaggagttgcaggcgaagaccctgagcaacagctggttggtgaaagcaagtgtcctataacccatttatgtcctacttattttataattcatcccccgtatttacataattcatatataaggatttactagtttttgtttatcttgtccttgttcacctatttgggttgaattatttctggattagctctatgctagcgctcactttaatcaataaacataatgagaattatttatgatacgaggtttacttttagaaattgatgatgacattgtgatatttaaggggctcaagcggtttctcgagtgtctctccgtaaggactggtttgttggatgatcacaaggaaaacagtacaaccatgagggtagatggatgctcttagctaattaattagaggaaccgatgtgtagtttacttcgccgtcatgctgctaataaggttcgatgtatgcggctcgctctaccgagggtggtttgccccttcggacgggcgaataccgaaatgcggacgggcgaataccgaaagacgccttgtgacagcaaacacggaaactgagaacacgagcagaaggcactcgatcgcataggtacagacgtacagtagcacagccgcgcacactaccaccagtcggacacccgccccgagctccggctatggaggaagccgccgccgccgccgctgcttgggcgtctaatgccgccacgcccgtcccatccgagcccatgagatcccctcctgatgctgaagcctccgttgatcctaccgctgttggtgacgatgagcacgactccaaggaggtcgttctgcgcaggtacttcctccaggagtgggagctggtctcagcgatcctccaccgtgtcgtcgccggcggcggcgttgccgaatccgccgatgtccataggatccgctctatcatggacaaatatcaagaagagggtcaactattagagccataccttgagaacattgtttcaccacttatgtcgttggttcggtcaaagacaatggaacttggtgctagtactgatgaacttcttgacattatcaagcctctgtgtatcatcatctacacccttgtcacagtgtgcgggtacaagagtgtcatcagattcttccctcaccaggtttcagatcttgagctcgcagttgctcttcttgagaagtgtcatacaatgagttcagctactgctcttaggcaagagagcacaggagaaatggagactaaatgtgttgttctattgtggctttatatactggtcctgatcccatttgacatatccactgtggatacaagcattgctactgctgataacgtcgatgggcctgaggtcgttccactggtgacaagaatactggacatctgtaaggattatctctccagttctggtccaatgagaaggatgtcaggattattgcttgcaaggctcttgactcgtcctgacatggcaaaagctttcagcagttttatggactgggcacacaagatgttactgtctgtatcagatgactttgttgatcaatttagatccattggtatagtggaagctttagcatcaatatttaaggagctttttgcacacacaattattttttgtggttatcaacagggaatgggatgtgagcatttggtttcacaattacataccgctaatttagtttgatgtcttccttttggttcctcttgttgcagattggtaaccgtagagcactgcatgatgctgtttctggtacttggagtgattgttcacttgtgatgaagactaatgtctcagccaggagtccacttcttagaaaattcctggtgaaactggcccagagagttggtctcatcagcttgcctccacgtttaccatcatggcagtataagtcaattagcagttcgttgggtgcaaacctttcaagttatacagctggagaagtgtattcaagtggatcaagggaacaagttaacattgatcaaataggcatgtgttttttggaagaagatatggatgttccagaaatagcagaagagattatcgacttgctattgactggtttgagggattcagattaatggtggtatctgaattgaaataagctctcctgactgtgtatatgagaaactatgtacacaatttgaagtcatgattcactgcttcatgtacttaggaaaacagtagggagtctggtctttgtacttgctattatgtttttttttgcatgttaaaat

SEQ ID NO: 9998 - DNA, 2470 bp, Zea Mays
cctgacgtgagaaaaaaatatcgtgcccactgcggtggtcggctcgagccaagccagaaaggacccaatagccaatgtggtctgtcagtcgtgggctcgccgttgactaaagcagacaccagctcagcccaacgacggcccagagagttctagcccatagcaacatgccaacatcccgccccggagctctcagttctcacttttcggacggcagccgacgacacttccggcgggcggcggcgaaagattctccttctcccgcgccgccgggaccctatcgactcgctcctgctctccttgtcgtttcatttctctcggcatttagtttcccttttgcatcctagtctcagaatccctggatctgctgcaggtttcaaactaattttgcatgctcaggtgttgatttactgaaaaatgtccatgtgcaagcaatcgtcgggccacagacatctactcaagctaaatttcttacagagcttgggaacaagacatcagttccaatcatttccttttctgcaaacagcccgtcccggtcatccagccagaccccatatttcatcaggacagcatggaacgactcctgccaagctgaagctattgcctcacttgtccagaaatacaattggagggaagtcattcctatcatcgaggacgatgattccaacactagatttatccctgatctcgttgatgccctgggacatgtcgatactcgtgttccgtacaggtgcaagatccatccttctgctggagaagatgagataaagcatgctatatcaagcttaaaagaatattggacaagtgtctttgttgtgcgcatgtcatatcagttagcccttaagtttttccagcttgctaaggatgagggaatgatgggccagggctttgtctggattacagcatatggtttgacagatatcttcaatgtagttggttatcctgcacttgatgtgatggaaggtgttgttgggattgagccttatgttcaagaaactgcgaaactaaacaaatttaggcaaagatggtgtgagaaatataggtcagaaaatcctggtacatcaattaatgagtctataacgtctggtctgtatgcgtatgatacagtatgggcaatagcattggctgcagagaaggccggatatgttaattctgattttgtgctatctgaaacaaacaatggttccactgatttcaacaaaataagtacttctagggctgctaaaaaatttcatgctgcattcttggaggttaatttcacaggcattactggccaatttgtcattcaagatatgcagttccagttagtatcaacaacttacaaaataatcaatgtagttggtcatgagaggagagcagttggtttttggactccaggattgaacatatccagaattctagaaaagaaagatgatatcagtactattgtatggccaggaggcagtgagaagacacctagaggatggcttttgccagtgaataaagtactcaaaataggagtacctgggaaatctgggtttagcagttttataagatctgaagatggtatccccaagggtttctgcattgacatatttgaggaagttattagtaaactgccctacaaagttcccaagcactatgtggagtttggaaatggaaaaggagaaagtaatggaacttatgacgaactcgtctacaaagtttatcttaaggaatttgatgcggtagtaggtgacataacaattttagccaaccgttctctatatgtggactacactctcccttatactgagtccggggtacgcatgctggttccagtttgggaccggagacagaagactgcatggacattcctagaacctttaacagctgatctatggttacgaactggagccttcattgtcttcaccggctttgtagtttggtttatcgagcacagaacaaatcaggaattcagaggaccgccagccactcaaattggatcactcttctacttctccttctcaacatttgtatttgctcatagggagaggattgtgaacaacttgtcaagaattacagtagtagtttggctttttgtggtgctaatattgcagcagagttatactgcaagcttaagctcaattctcactgtagaacagcttcaaccaacagtcaccaatttagatgaagttatcaggcgaggggattatgttggctacctcagtgattctttcatgcctgagcttttgaaaaggttgaaaattaatgaaacaaaaatgatcgctttcagctctcctgaggagtacaatgacgccctatcaactagaaaagttgccgtcattgttgatgaaataccatatctcaaagtgtttctctcaaagtattgccacaactacactatggttgggccaacttacaaattcgatggatttggttatgtaagtaacatttctttgacttctctacagttgtctgttttcagtagagctaggtgatgaatcaagtagca

SEQ ID NO: 9999 - DNA, 742 bp, Zea Mays
gaaactggtttgatggctttgcaattcgggggtgtctgattcacttgatcgtagcggtagctgtagcagatgtgttgacaactaggcactggagaagtggatactctgatctactctgctgaacgagtttaatatttgagtatggcggcggcattgacatggcggttcaatggaagcaatggcggcacccatggcagcgccgatctggaaaggcacgtggacaaagttcaagactcagagccaccaactcctatgtcagtcatgaaaatgggcaagaaccgagtttaatgtggaggatgaggagacactttcaagcgttgctcaatgtattgagcatctacgacagagttcttcatcctcacaggacaaagagagctctttgaagcagttattagatcttgttcaaactcgtgatactgcattcggagctgttggatcgcattcacaggctgttccaatacttgtatctcttcttagatctgggccatctggagttaagatgctggctgctactgttcttgggtctctttgcaaggaagaggagttaagggtgaaagtcttacttggtggttgcatccctccattgcttgctcttctcagatcgaagtcagctgaaagccaaactgcagctgccaaaaccatctatgcagtttcacaaggtgggataagggatcatgttggatcaaagattttctttacggaaaatgttgttcctgtactgtgggagcaacttaaaattagt

SEQ ID NO: 10000 - DNA, 977 bp, Zea Mays
gggggggatctcggcttgaatgagttgatttcgcagtttatgggtaactttgagccatgggcacagttgtggatgctccagcagttgtggctgaagaggtcactgagaacatgttgggtggtaagaaagttacagctgtatttgttctaggtggtcctggaagtggaaaaggcacacagtgtgccaacattgtggaacactttggattcacccatcttagtgctggagatcttttgcgtgcagagattaaatctggctctgagaatggaaccatgattgaaaacatgataaaggagggaaagattgttccatcagaggtgactataaagctgttgcaggaggcaatgataaaaaatgaaaatgacaaattcctgatcgacggatttccaaggaatgaggagaatcgtgcagcatttgagaatgttaccaaaatttctcctgcatttgtgctattctttgactgttctgagaaagagatggagaaacgtctcttggggcgcaatcagggaagagttgatgataacattgaaactatcaaaaaaaggttcaaaacctttgttgagtcaagtttgcctgtcattgagcattacaactcaagggacaaggttaaaaagattgatgctgcaaaaccaattcctgaggtgtttgaagacgtcaaaaccatttttgccccatatgctccaaagcatttgttggcgctcccattcccctccttcccgcttttgagtcctctgggctaggttcaatgaattttgcccacttccaatctaagaagggaaaacgatacagctcgtgggcccttcttcagcgacgccaaaaagaactgaacaaaactgaaatacattcatttgtatccataatcccaattctaaaaacaccaagacctcgttcgattataatttagatatacatatatgtactatttgtttttatgcaattgttatataccaacatgttattgaatatttgtgtgccgt

SEQ ID NO: 10001 - DNA, 1573 bp, Zea Mays
gccgttgccgcgtcggcgttgctggatcctcaagcagaccgcccggacccgggaacccgcccgcgcgcttattaataacggccacctcgttcccccgcccgccccgaaggccgagggaagtgtacgcgcctagcgaccagcatagattcgttccacgcctacctcctgccctcgcccgtgctctcagatctcgcgcgcgccccgcaaaggtcactgagaacatgttgggtggtaagaaagttacagctgtatttgttctaggtggtcctggaagtggaaaaggcacacagtgtgccaacattgtggaacactttggattcacccatcttagtgctggagatcttttgcgtgcagagattaaatctggctctgagaatggaaccatgattgaaaacatgataaaggagggaaagattgttccatcagaggtgactataaagctgttgcaggaggcaatgataaaaaatgaaaatgacaaattcctgatcgacggatttccaaggaatgaggagaatcgtgcagcatttgagaatgttgtaaggccctcttttttgtacacaaaatttgttgattctcatgccagtttaagaaattattgctcctttcttttagttactcaaatgaattcgtagactattaattctttctcattccttcagaccaaaatttctcctgcatttgtgctattctttgactgttctgagaaagagatggagaaacgtctcttggggcgcaatcaggtttccttcatcattgaccaatcgtcgtttttagtcacaaaattcttgtttccaacatttcttactttctttgcagggaagagttgatgataacattgaaactatcaaaaaaaggttcaaaacctttgttgagtcaagtttgcctgtcattgagcattacaactcaagggacaaggttaaaaagattgatgctgcaaaaccaattcctgaggtgtttgaagacgtcaaaaccatttttgccccatatgctccaaaggctgaatagagcagtctaaaagggacatgataaaggtgtcataggcaacacacaaacatatatgtgattatgaacccttcaatatagaacagaagttttggctcatatgagctaccagcgcatcagtaggcaattcgatttgttatcagcaatatttagatctgattctcaggggtcctgctagagtaacattttaccactgttgtttatgtatatcctttgatgttgtgttgtaccaatgtggaatttactttagggctagtttggacatggaaatacaggggatccatcaggcctgaggcaggaatccccttgttatttataaattaataagaggattcctgcctcatggattctctccattttcctatccaccaaaccagcccttatagagcaatgagaccttgtgcgatcccatcagatttcttgtggcattatggaaagtataaaactgctgccatattctttatacgttgaaatatgttcattgcactgaacatttgttttgatgactttgtatgtatataataccctcccaacagtaagtatctaagcttagcaagcctcttgtagttgt

SEQ ID NO: 10002 - DNA, 858 bp, Zea Mays
tatatgcgctggctgctaatcctgttggtgccgttagtgaattcattgctcagttgcagattttagagttgcttgacaatgctattttcactgccggctacaaagctgtgttgcatattcactctgttgtcgaagagtgtgagattgttgagctcatagaggaaattggcatgaagaaaaagaaagaagaagatccaaagaagaaaaagccaaagaggaagcctctttttgtgaagaacggtgcaattgttgtttgccgcattcaggtgaataacttgatatgcatagagaagttctctgatttccctcagcttggaaggtttacacttagaactgaaggaaagacggtagctgtaggcaaagttgttgatattccgcctgctggtagcccaacattctgagcttaagtcaattttgaacaggatggataatcatgaagcagtgcgttcgcttaagatacttttttttgggaagtgagattagttgttgaggttagattttttttcagtccatcttgagaatggtctatgcctttatggtttaggctagcaagtcttagattggttgcataaaattacatctctggttacatgtgaggttgtaaaatcagtatggaattatggatgagtgtaccaaccttaatgtacccgttcaagattatggtggtatctttgcgtacaatgctgtaactatccatttttttttgtgtgtgtgtgaagttaaatataagatgaccacacgtggacaggccgcattaggcctcattcgtttatgtgggattgtaccggaatcattccactccacattattcctcatttcagttgttcaaagtttatataagggtgcgtttggttgagg

SEQ ID NO: 10003 - DNA, 1864 bp, Zea Mays
attcaatcatctcttcaatccttggagcttaaaacaaatgaagatgctcatgtggttgaagacgatgtagaggaaacaaaacgacatttgaatgtggttttcattggccatgttgatgctggaaaatcaactaccggaggacaaatattgtttttgagtggtcaagttgatgataggaccatccagaaatatgagaaggaagcaaaggataaaagtcgggaaagttggtatatggcttacatcatggacacaaatgaggaagaaagggttaagggaaagactgttgaagttggtagggcccactttgagacagaacacacaagattcactatcttggatgcaccgggtcacaaaagttatgttccaaatatgataagtggtgcatctcaagctgacattggtgttctggtcatatctgctcgaaaaggtgaattcgaaacaggttatgaaagaggaggacagacccgtgaacatgtactacttgcaaaaactttgggtgttgctaagctggtagttgtaataaataagatggacgaacctactgttaaatggtctaaggaaaggtatgatgagattgaagcaaaaatggttccattcctcaaatcttcagggtacaatgttaagaaagatgtgcaattcttgccaatatctggtcttgtgggaaccaatatgaaaaccaggatggataaaagcatttgtagttggtgggatggcccatgtctttttgaagttctggaccgtattgtagttcctttacgtgaccccaaaggttcagtaaggatgccgattattgataaatataaggatatgggcactgttgcaatgggcaaaatagagtctggcactatcagagagggtgacagtttgttggttatgccaaacaagtcccatgtgaaagtcattggtttgaacttggatgagagcaaagtacgtcgtgctggacctgctgagaatgtccgtgttaaattgtctggagttgaagaggaggatgtaatggctggttttgtactttcaagtgttgctaatcctgttggtgccgttagtgaattcattgctcagttgcagattttagagttgcttgacaatgctattttcactgccggctacaaagctgtgttgcatattcactctgttgtcgaagagtgtgagattgttgagctcatagaggaaattggcatgaagaaaaagaaagaagaagatccaaagaagaaaaagccaaagaggaagcctctttttgtgaagaacggtgcaattgttgtttgccgcattcaggtgaataacttgatatgcatagagaagttctctgatttccctcagcttggaaggtttacacttagaactgaaggaaagacggtagctgtaggcaaagttgttgatattccgcctgctggtagcccaacattctgagcttaagtcaattttgaacaggatggataatcatgaagcagtgcgttcgcttaagatacttttttttgggaagtgagattagttgttgaggttagattttttttcagtccatcttgagaatggtctatgcctttatggtttaggctagcaagtcttagattggttgcataaaattacatctctggttacatgtgaggttgtaaaatcagtatggaattatggatgagtgtaccaaccttaatgtacccgttcaagattatggtggtatctttgcgtacaatgctgtaactatccatttttttttgtgtgtgtgtgaagttaaatataagatgaccacacgtggacaggccgcattaggcctcattcgtttatgtgggattgtaccggaatcattccactccacattattcctcatttcagttgttcaaagtttatataagggtgcgtttggttgagg

SEQ ID NO: 10004 - DNA, 1829 bp, Zea Mays
ccacgctccactcccgacacctgttccgtttaaaatctccggcgtcgacgtggccgcgtgcgcagccacaaaccctccctcccgccgcaattaacaatccgctaatcagctcggcgcagcccgaaccctccctctaatcgcccgctaaaccgctccctccctccgccaaaaggccagtccgggggcttttcctatctccacttgttggcgacttggtagtagactcgcggatacgatccttctagacacttcgacgcgcccgttataaaggccggcgcatccgggccatgaccacacagccccttgctcattggctagggcggggaaggaaattgcgggaggatgcgaagccattggtgtattgcatatggtggcaccaagcatgaggcaggaactgcattacttgcaagaaagtcacaagctcattccaatctgattctctaaactttggaggtctcttacacctaggcctgaaagctcctctcccattagttgcctacaacattggaaaagagtttctcacattatcttagaatccattgcaagatcatacttgtggctttcttgcaagttgtgcagttgttgcctcaagcttgctgcctccctttgccagagctatcggtccctagaaaggaaaatcgtgatttggaaaggaaattcatcaacaaacctgagtcggaaggatgcttaggaagcgggattcaatcaattatttctggggtggtctacagccaatgcatagtctctatctgtgtgtgtgttttgtgtttcccgtgcactctattcctttcgagaggcactctatgtcaggtgcctgaaatatggtttagcttcaggcaatgaagtggacgtcggatggagatccgagtgtccacgatgacagagaccgggttttgaatctctcgtctctccatctctcatgcgttcccaacttccaactccaatgccgtctccgctggctgatcagtgatcacctctgaccctctctggtgatgtgtacccattgttaatctctccaatgaagctaccctgcctgaccaggcccacaggctgtctcctgcatacggtggcaacacaccaacactgctggcctgccctaagacacatcttcgcgttgcgtccactggatacctgctttcttagtcagcagcatgccgaaaccctccatttgtgaaacctcagcggtgataggcggtggttgtcgaacgctggcatgaaggtgtgagctcccaactgctgaatcgtgttcctcttttacatgcacgtgtccaacaagaaccaagaaccgagattagcgctacctcagtacactgccggtgcaagataaacgaaggaagctgggattgcatggcactgcggtctgttatgtagccgtggaacagcaagacaaaaagacatggatattccttgtttggattggggtgtttgatccagaaacagtctcattgctaattgtttcattattactacaaatcttggtcgaggcgtgaatatccttgctcttgatataattatagtattttgaatccctattgtgttttttacttaagtgataaatgttgcaaagaaaccattagataattgttgaatgattagttattgattacattgattgattttgatttaatgaatcttaaataaaccagaagattcatgtgtatgaatatttgtgttgggaatttcttggtcacatgttttccgcataataatatcataaaactgtggaatgaaacagcttttgcatattccgctataactttttatagcacccctatcaaatttatggggtgtttggcatgcaaaactcgagtcaaatatttcaactcaag

SEQ ID NO: 10005 - DNA, 1870 bp, Zea Mays
ccacgctccactcccgacacctgttccgtttaaaatctccggcgtcgacgtggccgcgtgcgcagccacaaaccctccctcccgccgcaattaacaatccgctaatcagctcggcgcagcccgaaccctccctctaatcgcccgctaaaccgctccctccctccgccaaaaggccagtccgggggcttttcctatctccacttgttggcgacttggtagtagactcgcggatacgatccttctagacacttcgacgcgcccgttataaaggccggcgcatccgggccatgaccacacagccccttgctcattggctagggcggggaaggaaattgcgggaggatgcgaagccattggtgtattgcatatggtggcaccaagcatgaggcaggaactgcattacttgcaagaaagtcacaagctcattccaatctgattctctaaactttggaggtctcttacacctaggcctgaaagctcctctcccattagttgcctacaacattggaaaagagtttctcacattatcttagaatccattgcaagatcatacttgtggctttcttgcaagttgtgcagttgttgcctcaagcttgctgcctccctttgccagagctatcggtccctagaaaggaaaatcgtgatttggaaaggaaattcatcaacaaacctgagtcggaaggatgcttaggaagcgggtactccctatgttccagattatagttcatttagatttgatgattcaatcaattatttctggggtggtctacagccaatgcatagtctctatctgtgtgtgtgttttgtgtttcccgtgcactctattcctttcgagaggcactctatgtcaggtgcctgaaatatggtttagcttcaggcaatgaagtggacgtcggatggagatccgagtgtccacgatgacagagaccgggttttgaatctctcgtctctccatctctcatgcgttcccaacttccaactccaatgccgtctccgctggctgatcagtgatcacctctgaccctctctggtgatgtgtacccattgttaatctctccaatgaagctaccctgcctgaccaggcccacaggctgtctcctgcatacggtggcaacacaccaacactgctggcctgccctaagacacatcttcgcgttgcgtccactggatacctgctttcttagtcagcagcatgccgaaaccctccatttgtgaaacctcagcggtgataggcggtggttgtcgaacgctggcatgaaggtgtgagctcccaactgctgaatcgtgttcctcttttacatgcacgtgtccaacaagaaccaagaaccgagattagcgctacctcagtacactgccggtgcaagataaacgaaggaagctgggattgcatggcactgcggtctgttatgtagccgtggaacagcaagacaaaaagacatggatattccttgtttggattggggtgtttgatccagaaacagtctcattgctaattgtttcattattactacaaatcttggtcgaggcgtgaatatccttgctcttgatataattatagtattttgaatccctattgtgttttttacttaagtgataaatgttgcaaagaaaccattagataattgttgaatgattagttattgattacattgattgattttgatttaatgaatcttaaataaaccagaagattcatgtgtatgaatatttgtgttgggaatttcttggtcacatgttttccgcataataatatcataaaactgtggaatgaaacagcttttgcatattccgctataactttttatagcacccctatcaaatttatggggtgtttggcatgcaaaactcgagtcaaatatttcaactcaag

SEQ ID NO: 10006 - DNA, 1940 bp, Zea Mays
ccacgctccactcccgacacctgttccgtttaaaatctccggcgtcgacgtggccgcgtgcgcagccacaaaccctccctcccgccgcaattaacaatccgctaatcagctcggcgcagcccgaaccctccctctaatcgcccgctaaaccgctccctccctccgccaaaaggccagtccgggggcttttcctatctccacttgttggcgacttggtagtagactcgcggatacgatccttctagacacttcgacgcgcccgttataaaggccggcgcatccgggccatgaccacacagccccttgctcattggctagggcggggaaggaaattgcgggaggatgcgaagccattggtgtattgcatatggtggcaccaagcatgaggcaggaactgcattacttgcaagaaagtcacaagctcattccaatctgattctctaaactttggaggtctcttacacctaggcctgaaagctcctctcccattagttgcctacaacattggaaaagagtttctcacattatcttagaatccattgcaagatcatacttgtggctttcttgcaagttgtgcagttgttgcctcaagcttgctgcctccctttgccagagctatcggtaaaacaggaagtactgtcagtttccgagctacaaacaagctataagtttagaaaaataatttagaaatgtccctagaaaggaaaatcgtgatttggaaaggaaattcatcaacaaacctgagtcggaaggatgcttaggaagcgggtactccctatgttccagattatagttcatttagatttgatgattcaatcaattatttctggggtggtctacagccaatgcatagtctctatctgtgtgtgtgttttgtgtttcccgtgcactctattcctttcgagaggcactctatgtcaggtgcctgaaatatggtttagcttcaggcaatgaagtggacgtcggatggagatccgagtgtccacgatgacagagaccgggttttgaatctctcgtctctccatctctcatgcgttcccaacttccaactccaatgccgtctccgctggctgatcagtgatcacctctgaccctctctggtgatgtgtacccattgttaatctctccaatgaagctaccctgcctgaccaggcccacaggctgtctcctgcatacggtggcaacacaccaacactgctggcctgccctaagacacatcttcgcgttgcgtccactggatacctgctttcttagtcagcagcatgccgaaaccctccatttgtgaaacctcagcggtgataggcggtggttgtcgaacgctggcatgaaggtgtgagctcccaactgctgaatcgtgttcctcttttacatgcacgtgtccaacaagaaccaagaaccgagattagcgctacctcagtacactgccggtgcaagataaacgaaggaagctgggattgcatggcactgcggtctgttatgtagccgtggaacagcaagacaaaaagacatggatattccttgtttggattggggtgtttgatccagaaacagtctcattgctaattgtttcattattactacaaatcttggtcgaggcgtgaatatccttgctcttgatataattatagtattttgaatccctattgtgttttttacttaagtgataaatgttgcaaagaaaccattagataattgttgaatgattagttattgattacattgattgattttgatttaatgaatcttaaataaaccagaagattcatgtgtatgaatatttgtgttgggaatttcttggtcacatgttttccgcataataatatcataaaactgtggaatgaaacagcttttgcatattccgctataactttttatagcacccctatcaaatttatggggtgtttggcatgcaaaactcgagtcaaatatttcaactcaag

SEQ ID NO: 10007 - DNA, 2224 bp, Zea Mays
tcagctcggcgcagcccgaaccctccctctaatcgcccgctaaaccgctccctccctccgccaaaaggccagtccgggggcttttcctatctccacttgttggcgacttggtagtagactcgcggatacgatccttctagacacttcgacgcgcccgttataaaggccggcgcatccgggccatgaccacacagccccttgctcattggctagggcggggaaggaaattgcgggaggatgcgaagaatccattgcaagatcatacttgtggctttcttgcaagttgtgcagttgttgcctcaagcttgctgcctccctttgccagagctatcggtaaaacaggaagtactgtcagtttccgagctacaaacaagctataagtttagaaaaataatttagaaatgtacaacaaagtctagtaatacattgttaaagataaatcaatactcaataagttcctcatgctttggatttggggataacatacctgttttatttacatgctaatatttggaccaacaaaaaataccttaggaacagccatttgagaaaaaaacaaagccttttagtcctaagcaagttagcatagcttagagttgcaacttctacatgagcacaataaacagaaaagaaagagaaaaggaaaataaatatatatggcaccaaaagctattaccatgttataatataaatttaatgaccgaaattataaacatttttacaatcttagcaaacctctcaacgtgtagtctgaatcgacagaacatcagtagagtaatttttgttacatttatagtccccaatgtcgtttcaaggcaaagtttgtttggtttctctgttttcctaaacactggcttctcaattgcattctcaatgtgcatctgtactagtttgacatctgtggctattgtgattcttcctggaatatcatctgtccatcacctttaaagcataacattaccctgatggccatgtgatctgtaggtccctagaaaggaaaatcgtgatttggaaaggaaattcatcaacaaacctgagtcggaaggatgcttaggaagcgggtactccctatgttccagattatagttcatttagatttgatgattcaatcaattatttctggggtggtctacagccaatgcatagtctctatctgtgtgtgtgttttgtgtttcccgtgcactctattcctttcgagaggcactctatgtcaggtgcctgaaatatggtttagcttcaggcaatgaagtggacgtcggatggagatccgagtgtccacgatgacagagaccgggttttgaatctctcgtctctccatctctcatgcgttcccaacttccaactccaatgccgtctccgctggctgatcagtgatcacctctgaccctctctggtgatgtgtacccattgttaatctctccaatgaagctaccctgcctgaccaggcccacaggctgtctcctgcatacggtggcaacacaccaacactgctggcctgccctaagacacatcttcgcgttgcgtccactggatacctgctttcttagtcagcagcatgccgaaaccctccatttgtgaaacctcaggcggtggttgtcgaacgctggcatgaaggtgtgagctcccaactgctgaatcgtgttcctcttttacatgcacgtgtccaacaagaaccaagaaccgagattagcgctacctcagtacactgccggtgcaagataaacgaaggaagctgggattgcatggcactgcggtctgttatgtagccgtggaacagcaagacaaaaagacatggatattccttgtttggattggggtgtttgatccagaaacagtctcattgctaattgtttcattattactacaaatcttggtcgaggcgtgaatatccttgctcttgatataattatagtattttgaatccctattgtgttttttacttaagtgataaatgttgcaaagaaaccattagataattgttgaatgattagttattgattacattgattgattttgatttaatgaatcttaaataaaccagaagattcatgtgtatgaatatttgtgttgggaatttcttggtcacatgttttccgcataataatatcataaaactgtggaatgaaacagcttttgcatattccgctataactttttatagcacccctatcaaatttatggggtgtttggcatgcaaaactcgagtcaaatatttcaactcaag

SEQ ID NO: 10008 - DNA, 2367 bp, Zea Mays
ccacgctccactcccgacacctgttccgtttaaaatctccggcgtcgacgtggccgcgtgcgcagccacaaaccctccctcccgccgcaattaacaatccgctaatcagctcggcgcagcccgaaccctccctctaatcgcccgctaaaccgctccctccctccgccaaaaggccagtccgggggcttttcctatctccacttgttggcgacttggtagtagactcgcggatacgatccttctagacacttcgacgcgcccgttataaaggccggcgcatccgggccatgaccacacagccccttgctcattggctagggcggggaaggaaattgcgggaggatgcgaagccattggtgtattgcatatggtggcaccaagcatgaggcaggaactgcattacttgcaagaaagtcacaaaatccattgcaagatcatacttgtggctttcttgcaagttgtgcagttgttgcctcaagcttgctgcctccctttgccagagctatcggtaaaacaggaagtactgtcagtttccgagctacaaacaagctataagtttagaaaaataatttagaaatgtacaacaaagtctagtaatacattgttaaagataaatcaatactcaataagttcctcatgctttggatttggggataacatacctgttttatttacatgctaatatttggaccaacaaaaaataccttaggaacagccatttgagaaaaaaacaaagccttttagtcctaagcaagttagcatagcttagagttgcaacttctacatgagcacaataaacagaaaagaaagagaaaaggaaaataaatatatatggcaccaaaagctattaccatgttataatataaatttaatgaccgaaattataaacatttttacaatcttagcaaacctctcaacgtgtagtctgaatcgacagaacatcagtagagtaatttttgttacatttatagtccccaatgtcgtttcaaggcaaagtttgtttggtttctctgttttcctaaacactggcttctcaattgcattctcaatgtgcatctgtactagtttgacatctgtggctattgtgattcttcctggaatatcatctgtccatcacctttaaagcataacattaccctgatggccatgtgatctgtaggtccctagaaaggaaaatcgtgatttggaaaggaaattcatcaacaaacctgagtcggaaggatgcttaggaagcgggattcaatcaattatttctggggtggtctacagccaatgcatagtctctatctgtgtgtgtgttttgtgtttcccgtgcactctattcctttcgagaggcactctatgtcaggtgcctgaaatatggtttagcttcaggcaatgaagtggacgtcggatggagatccgagtgtccacgatgacagagaccgggttttgaatctctcgtctctccatctctcatgcgttcccaacttccaactccaatgccgtctccgctggctgatcagtgatcacctctgaccctctctggtgatgtgtacccattgttaatctctccaatgaagctaccctgcctgaccaggcccacaggctgtctcctgcatacggtggcaacacaccaacactgctggcctgccctaagacacatcttcgcgttgcgtccactggatacctgctttcttagtcagcagcatgccgaaaccctccatttgtgaaacctcagcggtgataggcggtggttgtcgaacgctggcatgaaggtgtgagctcccaactgctgaatcgtgttcctcttttacatgcacgtgtccaacaagaaccaagaaccgagattagcgctacctcagtacactgccggtgcaagataaacgaaggaagctgggattgcatggcactgcggtctgttatgtagccgtggaacagcaagacaaaaagacatggatattccttgtttggattggggtgtttgatccagaaacagtctcattgctaattgtttcattattactacaaatcttggtcgaggcgtgaatatccttgctcttgatataattatagtattttgaatccctattgtgttttttacttaagtgataaatgttgcaaagaaaccattagataattgttgaatgattagttattgattacattgattgattttgatttaatgaatcttaaataaaccagaagattcatgtgtatgaatatttgtgttgggaatttcttggtcacatgttttccgcataataatatcataaaactgtggaatgaaacagcttttgcatattccgctataactttttatagcacccctatcaaatttatggggtgtttggcatgcaaaactcgagtcaaatatttcaactcaag

SEQ ID NO: 10009 - DNA, 2385 bp, Zea Mays
tcagctcggcgcagcccgaaccctccctctaatcgcccgctaaaccgctccctccctccgccaaaaggccagtccgggggcttttcctatctccacttgttggcgacttggtagtagactcgcggatacgatccttctagacacttcgacgcgcccgttataaaggccggcgcatccgggccatgaccacacagccccttgctcattggctagggcggggaaggaaattgcgggaggatgcgaagccattggtgtattgcatatggtggcaccaagcatgaggcaggaactgcattacttgcaagaaagtcacaaaatccattgcaagatcatacttgtggctttcttgcaagttgtgcagttgttgcctcaagcttgctgcctccctttgccagagctatcggtaaaacaggaagtactgtcagtttccgagctacaaacaagctataagtttagaaaaataatttagaaatgtacaacaaagtctagtaatacattgttaaagataaatcaatactcaataagttcctcatgctttggatttggggataacatacctgttttatttacatgctaatatttggaccaacaaaaaataccttaggaacagccatttgagaaaaaaacaaagccttttagtcctaagcaagttagcatagcttagagttgcaacttctacatgagcacaataaacagaaaagaaagagaaaaggaaaataaatatatatggcaccaaaagctattaccatgttataatataaatttaatgaccgaaattataaacatttttacaatcttagcaaacctctcaacgtgtagtctgaatcgacagaacatcagtagagtaatttttgttacatttatagtccccaatgtcgtttcaaggcaaagtttgtttggtttctctgttttcctaaacactggcttctcaattgcattctcaatgtgcatctgtactagtttgacatctgtggctattgtgattcttcctggaatatcatctgtccatcacctttaaagcataacattaccctgatggccatgtgatctgtaggtccctagaaaggaaaatcgtgatttggaaaggaaattcatcaacaaacctgagtcggaaggatgcttaggaagcgggtactccctatgttccagattatagttcatttagatttgatgattcaatcaattatttctggggtggtctacagccaatgcatagtctctatctgtgtgtgtgttttgtgtttcccgtgcactctattcctttcgagaggcactctatgtcaggtgcctgaaatatggtttagcttcaggcaatgaagtggacgtcggatggagatccgagtgtccacgatgacagagaccgggttttgaatctctcgtctctccatctctcatgcgttcccaacttccaactccaatgccgtctccgctggctgatcagtgatcacctctgaccctctctggtgatgtgtacccattgttaatctctccaatgaagctaccctgcctgaccaggcccacaggctgtctcctgcatacggtggcaacacaccaacactgctggcctgccctaagacacatcttcgcgttgcgtccactggatacctgctttcttagtcagcagcatgccgaaaccctccatttgtgaaacctcaggcggtggttgtcgaacgctggcatgaaggtgtgagctcccaactgctgaatcgtgttcctcttttacatgcacgtgtccaacaagaaccaaggtggaactgtaaagccttgtgtctttgaactttgcagccacgtattcagatttttttttgagttattgtaatttatttacattccctctagaaccgagattagcgctacctcagtacactgccggtgcaagataaacgaaggaagctgggattgcatggcactgcggtctgttatgtagccgtggaacagcaagacaaaaagacatggatattccttgtttggattggggtgtttgatccagaaacagtctcattgctaattgtttcattattactacaaatcttggtcgaggcgtgaatatccttgctcttgatataattatagtattttgaatccctattgtgttttttacttaagtgataaatgttgcaaagaaaccattagataattgttgaatgattagttattgattacattgattgattttgatttaatgaatcttaaataaaccagaagattcatgtgtatgaatatttgtgttgggaatttcttggtcacatgttttccgcataataatatcataaaactgtggaatgaaacagcttttgcatattccgctataactttttatagcacccctatcaaatttatggggtgtttggcatgcaaaactcgagtcaaatatttcaactcaag

SEQ ID NO: 10010 - DNA, 2408 bp, Zea Mays
ccacgctccactcccgacacctgttccgtttaaaatctccggcgtcgacgtggccgcgtgcgcagccacaaaccctccctcccgccgcaattaacaatccgctaatcagctcggcgcagcccgaaccctccctctaatcgcccgctaaaccgctccctccctccgccaaaaggccagtccgggggcttttcctatctccacttgttggcgacttggtagtagactcgcggatacgatccttctagacacttcgacgcgcccgttataaaggccggcgcatccgggccatgaccacacagccccttgctcattggctagggcggggaaggaaattgcgggaggatgcgaagccattggtgtattgcatatggtggcaccaagcatgaggcaggaactgcattacttgcaagaaagtcacaaaatccattgcaagatcatacttgtggctttcttgcaagttgtgcagttgttgcctcaagcttgctgcctccctttgccagagctatcggtaaaacaggaagtactgtcagtttccgagctacaaacaagctataagtttagaaaaataatttagaaatgtacaacaaagtctagtaatacattgttaaagataaatcaatactcaataagttcctcatgctttggatttggggataacatacctgttttatttacatgctaatatttggaccaacaaaaaataccttaggaacagccatttgagaaaaaaacaaagccttttagtcctaagcaagttagcatagcttagagttgcaacttctacatgagcacaataaacagaaaagaaagagaaaaggaaaataaatatatatggcaccaaaagctattaccatgttataatataaatttaatgaccgaaattataaacatttttacaatcttagcaaacctctcaacgtgtagtctgaatcgacagaacatcagtagagtaatttttgttacatttatagtccccaatgtcgtttcaaggcaaagtttgtttggtttctctgttttcctaaacactggcttctcaattgcattctcaatgtgcatctgtactagtttgacatctgtggctattgtgattcttcctggaatatcatctgtccatcacctttaaagcataacattaccctgatggccatgtgatctgtaggtccctagaaaggaaaatcgtgatttggaaaggaaattcatcaacaaacctgagtcggaaggatgcttaggaagcgggtactccctatgttccagattatagttcatttagatttgatgattcaatcaattatttctggggtggtctacagccaatgcatagtctctatctgtgtgtgtgttttgtgtttcccgtgcactctattcctttcgagaggcactctatgtcaggtgcctgaaatatggtttagcttcaggcaatgaagtggacgtcggatggagatccgagtgtccacgatgacagagaccgggttttgaatctctcgtctctccatctctcatgcgttcccaacttccaactccaatgccgtctccgctggctgatcagtgatcacctctgaccctctctggtgatgtgtacccattgttaatctctccaatgaagctaccctgcctgaccaggcccacaggctgtctcctgcatacggtggcaacacaccaacactgctggcctgccctaagacacatcttcgcgttgcgtccactggatacctgctttcttagtcagcagcatgccgaaaccctccatttgtgaaacctcagcggtgataggcggtggttgtcgaacgctggcatgaaggtgtgagctcccaactgctgaatcgtgttcctcttttacatgcacgtgtccaacaagaaccaagaaccgagattagcgctacctcagtacactgccggtgcaagataaacgaaggaagctgggattgcatggcactgcggtctgttatgtagccgtggaacagcaagacaaaaagacatggatattccttgtttggattggggtgtttgatccagaaacagtctcattgctaattgtttcattattactacaaatcttggtcgaggcgtgaatatccttgctcttgatataattatagtattttgaatccctattgtgttttttacttaagtgataaatgttgcaaagaaaccattagataattgttgaatgattagttattgattacattgattgattttgatttaatgaatcttaaataaaccagaagattcatgtgtatgaatatttgtgttgggaatttcttggtcacatgttttccgcataataatatcataaaactgtggaatgaaacagcttttgcatattccgctataactttttatagcacccctatcaaatttatggggtgtttggcatgcaaaactcgagtcaaatatttcaactcaag

SEQ ID NO: 10011 - DNA, 2521 bp, Zea Mays
ccacgctccactcccgacacctgttccgtttaaaatctccggcgtcgacgtggccgcgtgcgcagccacaaaccctccctcccgccgcaattaacaatccgctaatcagctcggcgcagcccgaaccctccctctaatcgcccgctaaaccgctccctccctccgccaaaaggccagtccgggggcttttcctatctccacttgttggcgacttggtagtagactcgcggatacgatccttctagacacttcgacgcgcccgttataaaggccggcgcatccgggccatgaccacacagccccttgctcattggctagggcggggaaggaaattgcgggaggatgcgaagccattggtgtattgcatatggtggcaccaagcatgaggcaggaactgcattacttgcaagaaagtcacaagctcattccaatctgattctctaaactttggaggtctcttacacctaggcctgaaagctcctctcccattagttgcctacaacattggaaaagagtttctcacattatcttagaatccattgcaagatcatacttgtggctttcttgcaagttgtgcagttgttgcctcaagcttgctgcctccctttgccagagctatcggtaaaacaggaagtactgtcagtttccgagctacaaacaagctataagtttagaaaaataatttagaaatgtacaacaaagtctagtaatacattgttaaagataaatcaatactcaataagttcctcatgctttggatttggggataacatacctgttttatttacatgctaatatttggaccaacaaaaaataccttaggaacagccatttgagaaaaaaacaaagccttttagtcctaagcaagttagcatagcttagagttgcaacttctacatgagcacaataaacagaaaagaaagagaaaaggaaaataaatatatatggcaccaaaagctattaccatgttataatataaatttaatgaccgaaattataaacatttttacaatcttagcaaacctctcaacgtgtagtctgaatcgacagaacatcagtagagtaatttttgttacatttatagtccccaatgtcgtttcaaggcaaagtttgtttggtttctctgttttcctaaacactggcttctcaattgcattctcaatgtgcatctgtactagtttgacatctgtggctattgtgattcttcctggaatatcatctgtccatcacctttaaagcataacattaccctgatggccatgtgatctgtaggtccctagaaaggaaaatcgtgatttggaaaggaaattcatcaacaaacctgagtcggaaggatgcttaggaagcgggtactccctatgttccagattatagttcatttagatttgatgattcaatcaattatttctggggtggtctacagccaatgcatagtctctatctgtgtgtgtgttttgtgtttcccgtgcactctattcctttcgagaggcactctatgtcaggtgcctgaaatatggtttagcttcaggcaatgaagtggacgtcggatggagatccgagtgtccacgatgacagagaccgggttttgaatctctcgtctctccatctctcatgcgttcccaacttccaactccaatgccgtctccgctggctgatcagtgatcacctctgaccctctctggtgatgtgtacccattgttaatctctccaatgaagctaccctgcctgaccaggcccacaggctgtctcctgcatacggtggcaacacaccaacactgctggcctgccctaagacacatcttcgcgttgcgtccactggatacctgctttcttagtcagcagcatgccgaaaccctccatttgtgaaacctcagcggtgataggcggtggttgtcgaacgctggcatgaaggtgtgagctcccaactgctgaatcgtgttcctcttttacatgcacgtgtccaacaagaaccaagaaccgagattagcgctacctcagtacactgccggtgcaagataaacgaaggaagctgggattgcatggcactgcggtctgttatgtagccgtggaacagcaagacaaaaagacatggatattccttgtttggattggggtgtttgatccagaaacagtctcattgctaattgtttcattattactacaaatcttggtcgaggcgtgaatatccttgctcttgatataattatagtattttgaatccctattgtgttttttacttaagtgataaatgttgcaaagaaaccattagataattgttgaatgattagttattgattacattgattgattttgatttaatgaatcttaaataaaccagaagattcatgtgtatgaatatttgtgttgggaatttcttggtcacatgttttccgcataataatatcataaaactgtggaatgaaacagcttttgcatattccgctataactttttatagcacccctatcaaatttatggggtgtttggcatgcaaaactcgagtcaaatatttcaactcaag

SEQ ID NO: 10012 - DNA, 2314 bp, Zea Mays
tcggctcctccagtgtccctcgtctctcgcctgagaaaaaaaaaatccacgaaccaatttctcagcaaccagcagcacgacctgtgagggttcgaaggaagtagcagtgttttttgttcctagagggaggaagagatggcaaagggggaggggccggcgatcgggatcgacctgggaacgacgtactcgtgtgtcggcgtgtggcagcacgaccgcgtcgagatcatcgccaacgaccaggggaaccgcaccacgccgtcctacgtcgccttcaccgacaccgagcggctcatcggcgatgccgccaagaaccaggtcgccatgaaccccaccaacaccgtatttgacgcaaagcggttgattggtaggaggttctcggacccttccgttcagagtgatatgaagctatggccattcaaggtcgtggcgggccctggcgacaagccgatgatcgtggttagctacaagggtgaggataagcagttctctgccgaggagatctcctctatggtgctgaccaagatgaaggagatcgctgaggcctacctcggctccaccatcaagaatgccgtggtcaccgtgcctgcctatttcaacgactcgcagaggcaggccaccaaggatgccggcgtcatctccgggctcaacgtgatgcgtatcatcaacgagcccaccgccgcggccattgcctacgggctcgacaaaaaggccaccagcagcggcgagaagaacgtgctcatcttcgacctcggtggtggcaccttcgatgtgtcgctcttgaccatcgaggagggcatcttcgaggtgaaggccaccgccggtgatacccatctgggtggggaggacttcgacaaccgcatggtcaaccacttcgtccaggagttcaagcgcaagcacaagaaggacatcagcggcaacccgcgcgcgctgcggcgtctgcggacggcctgcgagcgggccaagcgcacgctgtcgtccaccgcgcagaccaccatcgagatcgactcgctgtacgagggcatcgacttctacaccaccatcacccgcgcccggttcgaggagctgaacatggacctcttccgcaagtgcatggagcccgtggagaaatgcctccgcgatgccaagatggacaagagcaccgtgcacgacgtggtgctcgtgggcggctccacgcgcatccccaaggtgcagcagctgctccaggacttcttcaacggcaaggagctctgcaagagcatcaaccctgacgaggccgtggcgtacggtgctgctgtccaggccgccatcctgagcggcgagggcaacgagaaggtgcaggacctgctccttctggacgtcaccccgctgtccctgggcctggagactgccggcggcgtgatgaccgtgctgatccctcgcaacaccaccataccaacgaagaaggagcaggtgttctccacctactccgacaaccagccgggggtgctgatccaggtgtacgagggagagcgcgccaggaccaaggacaacaacctccttggcaagttcgagctgtccggcatcccgccggcgcctcgcggcgtgccccagatcaccgtgtgcttcgacatcgacgccaacggcattctgaacgtatcagcggaggacaagactacaggacagaaaaacaagatcaccatcaccaacgacaaggggcggctgagcaaggaggagatcgagaagatggtgaaggaggcggagaagtacaaggcggaggacgaggagcataagaagaaggtggacgccaagaactcgctggagaactacgcgtacaacatgcgcaacaccatcaaggacgacaagatcgcctccaagctaggtgcggatgacaagaagcgcatcgagaacgccgtggacggtgccatcagctggctggacagcaaccagctcgcggaggtggacgagttcgaggacaagatgaaggagctggagggcatctgcaaccccatcatcgccaagatgtaccagggcgctggcgcggacatgggtgctgctgccggcatggacgaggacgcaccggccgccggcggcagcgccgctggccccaagatcgaggaggtcgactaagtgcttccacctgtggtcgtgttatcgtggtagaagttgaattgcttctgtttctgtgggaacagtaaactctgaggctgtaggcagtccacactgcagagagcatcgcactcggtgctgaggatcaatgttggtgagtaaagctgccctgatggagatagtctggggagccatttttcattaatagcgccataacaagttgcgagaatttgacaggatatgatttttc

SEQ ID NO: 10013 - DNA, 1506 bp, Zea Mays
gcgacggcgccgtggacctccactccggaaattccggccgcacgtcgcccgtctcgcccggagtccggatccctaggctatacaagccatgccttcgcatctctctattcccctgctcctttgcgcccacgccaacccagttaccagagccgccattgccgccggccctgcgtatcggcaacaccacacgaccgcagccattgtatcacctattcggtccgagacgcttcgattcagctcgctgttggtgttcccggactcgctgcgcgggattgatggcaggtgacgcgtgaatttgtcgtcggagttgaagctccgccgtgaccgcgctcactgccgtggcccggaacatttgcgctactaacctcggtggaggtggttctcaaatctcaagtccatccacgcggaatcggacttgacctttatttaaggcgcagggctgcaggcccgttccctcagctgaccatacgcaaccgcacaggaaacaggaccgtcgccgcgaaccgccgtactctataccgacttctccgaacctcctgtcctccataccggcgctcctaccctcgctgcaatggagttgaggaggcctgcgccctctcctctcgtcgacaactacgtggtacctggtgatgtcgtcctggacctctccgagatgaacaaccagaccattaaactcggcgcgggcctgcgtcaggagtgtgacaccatcgaggcgactagtgctgggaagttgcggcagttgaaacccaacaagtattgtattgaaaactcccagaagcggtactttcatttgaaggcggtacaaggagaaacatacccaagttcaagattggtacattaatatatgctcgagtggtgaaagcaaatagtatcatgaatcccgagctctcatgcatggatgctactgggaaagctgccaaatttggacagctgaaagatggttatatgttcgacacatcaactggcatgtcacgaatgttgttaagttccccaacgtgtccagttctggaggtccttgggaaaaaactgtcgtttgagattgctgttggactcaatggtcgagtctgggtgaatgctcctgcagcaagtactgtcattcttgtatcaaatgcaattatgaggtcagaatctttgagcggcataaaacaaagagctatggtagaaaatctattggagagattgtcatgatgataagtcagcaagcattagtctaaagtaaaatgggggaatttccattgtgtcagttcaaagtaaaagtaggaaagtttgagatcaaagtgactatccacatcaaaagattattatgtatcacgtgtcgtagtatacagtacactatactctttttttattaaatttatcaatgtatttatcaaagtcttgcatcccttgtttaatattcgggtctagtgcaaccgtgagagcaccaggacacggttttgaagcagtcttttcatgtttgtgggaaaaaggcttgcctcgatttatctatcccttcggagttctgac

SEQ ID NO: 10014 - DNA, 2103 bp, Zea Mays
ctggtgctgttttagttttcatgactggatgggacgatattagttgcttgaaggatcaactgaaagcacatccattgttaggtgatccgaatagggtttttctgcttgcatgccatggttctatggctacttctgagcagaggctaatttttgagaagccacctcctaatgttcggaaggtagtccttgccacaaatatggcagaagcaagtattacaataaatgatatcgtttttgttgttgattgtggtaaagcaaaggaaaccacatatgatgctctaaacaatactccatgcttactcccctcatggatttcgaaagcttctgcccgtcagaggaggggtagagctggccgtgtgcaacctggagaatgctaccatctgtaccctagatataaaaagtttgcaagttggaagcattggggagttcctatcagctgctctacagcctccagaaccacgagctgtcgagaatgcagtggaattcttgaagatgattggagcattagatggaaatgagaaccttactgatcttggacgatacctttccatgcttccagttgatccaaaattgggaaagatgctcataatgggtgcagtttttcgatgcatagatcctatacttactgtagttgctgggcttagtgttcgggatcctttcctgttaccacaggaaaagaaggatgaacagcaaaagctagattctcagcaaaggattatagtgatcatatggcccttgttcgggcttatgaaggatggaaggatgcagagagagaagggtctgcttatgaatactgctggagaaatttcctttcttctcaaacactacaagccattcactctctccggaagcaattcagctatattttaaaggattccggtttgatagactctgatgggaatacaaacaacagtttgagccataatcaatcattggtccgcggtattatatgttctgggctttttcctgggatagcatctgttgtgcatcgagaaagctccatgtcctttaagaccatggatgacgggcaagttcttctttatgctaattcagtgaatgcaaaatatcagaccatcccatatccatggctggtctttggtgagaaggtgaaggtgaatgctgtcttcatccgtgattcaaccggagtatcagactccatattgattttgtttggcggtgctgtagcaaaaggaggcatggccgggcacttgaagatgctcgatggctacattgatttcttcatggaccccagcctgtctgaatgctacctgcaacttaaagaagaactcgataaacttatacagcagaagcttgaagacccaaacttcgacatccacaaggaaggcaagtacatcctattcgccgtacaagagctcgccgccggcgacctgtgcgaagggaggttcgtgttcggccgcgagacgagccgggcccggctccggagccccgaggacgacggcaagagcaacctcataaaggacgggatgaaccccaagagcctgctgcagacgctgctgatgcgggccggccacaccccgcccaggtacaagacgaagcacctcaagacgaacgagttcagggccgtggtggagttcaaggggatgcagttcgtggggaagccgaagcggaacaagcagctcgcggagcgggacgccgccatcgaggcgctggggtggctgacgcagacctccggcgtgaaggctccggacgagaacgacgacgactcgccgctggacctgactgacagcatgctcaagctcctcaccaggccgaggcggcactcgaagaatagctctaggaaacggtgattttttgggcgaggatttgctgtagattgatcgcgcacacgcacaaaaggcatagagagagagagagagataggaaacgtcagctttggttacacgaatgcctcatggtctcgatgtgttgctttgtacattttttatttttatttttccacgctatgtcatcagaatcagaagttcctccatcctgctgattgctgtcaccgtagaacatggtttaaaaaattaaaataactgcctatagcgctgttatttctatagaaataaccttccgaagaatctaaatctacgatattac

SEQ ID NO: 10015 - DNA, 3769 bp, Zea Mays
caggctggctggctcggtgcctcccctgagttccatctcctgtcatgccgccgccgcagtagagctaacgagccacgggtagcatgcgccgcggcctgcgtcgcgggttgggcatcctcctcgtcccgctcccgcacgcacccagccgcctgccgccgatctctctcgcggctctcctcccccgacgcttcaatggcttctcccgccactccttctgcagcttccccgtcggggagcgcgccgtcgagcagttctcagacgacgaatacgaccacgagtacgaggacctccggccgtcgtcatcggtggcgaacatcgacgagtggaggtggaagctgagcatgctgcagcgcaacgcggaggaacaggagatcatctccagggaccggagggaccgccgggattatgaccagatagccaacctcgccaagaggatgggactctacagtgagatgtacggacgggtcgtggttgcgagcaaggtaccactgccgaactacaggcctgatctggatgacaagcggccgcaaagagaggtggtaatcccgctgggtttgcagaggagagttgaaggacttgtgcaggagcacctagaccgcgcattcttaccactgaataaatgtggtggcaacacaaaaaatggctctgacatgactgagaatgcgaacctggatgagcagcatgattcccttcttgatcggtcagtcatggagaagatacttcagaggaagagcattcggatgcggaattttcagagaagttggcaggaatcacccgaaggtgctaagatgctagaattccggagatcccttccagcagacaaagaaaaagaaaggcttctagcagccattgcacgcaatcaggtcattgtaatttctggtgagacagggtgtggtaaaacaacacagctgcctcagtttgtattggaatcagaaattgagtctggtcgaggggctttttgtaacataatttgtacacagccacgaagaatatctgcaatggcagttgcagaaagggtatccacagagagaggagaaaatcttggtgaatcgcttttttaataggttggctataaagtccgattggagggaattaaggggaaagatacacatttgcttttctgcaccagtggcatcttactaagacgcttactgagtgaccgaaacttgaatggtgtgactcatgtatttgttgatgagatacacgaaaggggcatgaatgaagatttcctgttgattgtactaaaagagctgttatcacgtcgccgtgatttgaggctgatattgatgagcgctactctaaacgcggaactcttctcaagttattttggaggagcgccaactatccatattcctgggttcacacatccagtaagggcacattttttggaagacatattagagaggtcaggctacaagttgacctcaagcaatcaacttgatgattacgggcaagataaagtctggaaaactcagagacagctattgcctagaaaaaggaaaaatcaaattactacacttgtcgaggaagcccttaaaaattcaagcttcgagatctatggctccaggacacgtgattctctagtgaattggaatcctgattgcataggtttcaacctcatagaggctgttctgtgccacatatgtcgcaaagagcgacctggtgctgttttagttttcatgactggatgggacgatattagttgcttgaaggatcaactgaaagcacatccattgttaggtgatccgaatagggtttttctgcttgcatgccatggttctatggctacttctgagcagaggctaatttttgagaagccacctcctaatgttcggaaggtagtccttgccacaaatatggcagaagcaagtattacaataaatgatatcgtttttgttgttgattgtggtaaagcaaaggaaaccacatatgatgctctaaacaatactccatgcttactcccctcatggatttcgaaagcttctgcccgtcagaggaggggtagagctggccgtgtgcaacctggagaatgctaccatctgtaccctagatataaaaagtttgcaagttggaagcattggggagttcctatcagctgctctacagcctccagaaccacgagctgtcgagaatgcagtggaattcttgaagatgattggagcattagatggaaatgagaaccttactgatcttggacgatacctttccatgcttccagttgatccaaaattgggaaagatgctcataatgggtgcagtttttcgatgcatagatcctatacttactgtagttgctgggcttagtgttcgggatcctttcctgttaccacaggaaaagaaggatttggcaggaacagcaaaagctagattctcagcaaaggattatagtgatcatatggcccttgttcgggcttatgaaggatggaaggatgcagagagagaagggtctgcttatgaatactgctggagaaatttcctttcttctcaaacactacaagccattcactctctccggaagcaattcagctatattttaaaggattccggtttgatagactctgatgggaatacaaacaacagtttgagccataatcaatcattggtccgcggtattatatgttctgggctttttcctgggatagcatctgttgtgcatcgagaaagctccatgtcctttaagaccatggatgacgggcaagttcttctttatgctaattcagtgaatgcaaaatatcagaccatcccatatccatggctggtctttggtgagaaggtgaaggtgaatgctgtcttcatccgtgattcaaccggagtatcagactccatattgattttgtttggcggtgctgtagcaaaaggaggcatggccgggcacttgaagatgctcgatggctacattgatttcttcatggaccccagcctgtctgaatgctacctgcaacttaaagaagaactcgataaacttatacagcagaagcttgaagacccaaacttcgacatccacaaggaaggcaagtacatcctattcgccgtacaagagctcgccgccggcgacctgtgcgaagggaggttcgtgttcggccgcgagacgagccgggcccggctccggagccccgaggacgacggcaagagcaacctcataaaggacgggatgaaccccaagagcctgctgcagacgctgctgatgcgggccggccacaccccgcccaggtacaagacgaagcacctcaagacgaacgagttcagggccgtggtggagttcaaggggatgcagttcgtggggaagccgaagcggaacaagcagctcgcggagcgggacgccgccatcgaggcgctggggtggctgacgcagacctccggcgtgaaggctccggacgagaacgacgacgactcgccgctggacctgactgacagcatgctcaagctcctcaccaggccgaggcggcactcgaagaatagctctaggaaacggtgattttttgggcgaggatttgctgtagattgatcgcgcacacgcacaaaaggcatagagagagagagagagataggaaacgtcagctttggttacacgaatgcctcatggtctcgatgtgttgctttgtacattttttatttttatttttccacgctatgtcatcagaatcagaagttcctccatcctgctgattgctgtcaccgtagaacatggtttaaaaaattaaaataactgcctatagcgctgttatttctatagaaataaccttccgaagaatctaaatctacgatattac

SEQ ID NO: 10016 - DNA, 1204 bp, Zea Mays
accgtcaatccgctacgccacagcaacgaccaaccggagccgccgccgccgccgccgacggggacggggacagggaaaccaccaccaccaccaccggccatattaacagctgcgcgtgcacggtggagttctacttccgcccgcgattcgactcgactcgactgctcgttccgtctcgaccttcaggcgggtaagcaggttgaccgtccgcgaattcaccgtatcccgggatacgtatgggttccaaagcgtccttccgcgtcacgctcctcttgctgctcctcgccgccgcctggggacctgctgcacaggccgacgacgctggtattgctgagctcccggatcatattgctattaccttgaaggagcaggtttcttcgaccaagattcctgtccgtctcaagagtggcagcccgctgtgctcagcctgtgaaaacttcacgggcaaagctgtcagttatatcagtgagaaacagacgcaagataaggtcatgggattccttcatgacgcttgctctcagtcattctcgtttgaacagaagctgcgctatccctgcagtgtgatgaattgatggactcttacgcaaccctcctgtttgccaagatcacggagatcaaaccagaagcgttctgcaaacagtatggcctgtgcaggggcacggctcttttctctggtgtgacaagtgacagcacatgtgtgttctgccaccacctgcttgatgaagttatgtccaaactgaaagatccggacgcggagtttgagataattcagattcttatcaaggagtgcaataagattgaaggccacgtccagcagtgcaagcgactggtcctgcaatacattcccctcatcctggtgaacggcgagaagttcctcgagaagaacgatgtttgcgcgctcgtacaggcttgtccagccacccataagaagactttcagctcagtcttgaagggagccttgttgctgagtgacgcttgaaggttggagaagaacacgcaaagcgtttagcagtggttggaaatagtgtgtccaagtgccgtgtttgtacatataattgtcatatgaatgcatgaagacgtgtcttgtgccctgcattgttttcatcttgtatcataattcataaacacgttgtatttatggacatccacagggggtgaaggttaaaatatatttgtatcataattcatataagcacattgtctt

SEQ ID NO: 10017 - DNA, 1861 bp, Zea Mays
gaattccttccgttgcctggcgaaccgcgtgcgcgtcgtgcgtcggctccgcgtgctgctcaccaccaagttcccaccggggactttcccagtaaaggttgcaatccctgttgtgccaacagtgagggtggttatcactttcaccaagtttgtccccctcatcgagcctgaggagttcttcaccccaatgtcgagccccagcctcttagcgagctcagggtcgggaagcatcatggcgaagcctaacacccaaaagagctcctacctgaagtgggtctcgaagaactcaagaccagaggccgtgaacctgtcacaagtcgcggacaacggcgaccctttcttgtccatccaatatattctaagcattacatgatctgtaatggatgcgcttgttgtggtgcgctgagtgccagtgtagctcgggtgctgcacaagatggtcagtgacatcatgtgtggcttcatccttatgatgtacacgaaggttggactctttggccctattactagctccattgatgttactaaattcatagtaagtgcttttgtatcctttgtgttcaagtctctatgcctaggtagcaaaaggatctagtgaggacatctatttcatgaatgtcatgcttacagaatattacacttatatttccactattgactaatgaagttatttttagaaacaatggtcaagggaccccactctggctctgcagtatataacggaagctcaccacacaagatcgataacccttttagatcatactgtaccaagctgtcgctccacttcaatagaacacttgatcacatacaggaagtttagatcagaaaatgcaggctgccgctactcccgtcaggttctcagatgtgttcccatcaagggccggtcgtggagaagagcacggtggtggttagtgtccctgttgttgtcatggttgagactgctgagatcgactacaactcgagcttctcggtgttcacaatggaggcctacgacctactcgatggcgacgcgtgcaacgcgcagatatactcggtggcatcggcagtgagcaggagggtggagaaggtggagagggactacttgtcgtacgacgagccaagaacgtgttctcgggcgaggcatgcaacgaccttggtggcgagttctgcgatgcgtcgtaccatgtcgacgtctttagggagctagcgcacacctgaagcctgatcctaattcccatccatggtgttcacaatggaggcctacgacctactcgatggcgacgcgtgcaacgcgcagatatactcggtggcatcggcagtgagcaggagggtggagaaggtggagagggactacttgtcgtacgatgagccaagaacggtgttctcgggcgaggtatgcaacgaccttggtggcgagttctgcgatgtgtcgtaccatgccgacgtctttagggagctagcgcagacctgaagcctgatcctaattcccatccatgtttgtccagaaccaagttgatctcacagtcgggtagatgttcacacattgtatctacgtgtagccaagcaagaccaagggtgtatgtaatgtatataggcatgtcttgggttggctcagctgccaaggtatgtagtataaaccaagatgaaatggtactggtgttattccctgttttacgatgttagaagatggaacacaaagctatgcaagtactatgctatgcccgatctgttccctgcacttgcaagccaatggatgaatggagtgtgtgctgcttaagctgacctggatactagccaccatccaactccacaaatggtatggcgggcttgacctaccattaccgagcaatctctactattatgataatcagtttcaattgtcg

SEQ ID NO: 10018 - DNA, 10281 bp, Zea Mays
  misc_feature (1)..(1): n is a, c, g, or t
natttcaatatatcttatcataacatgttcacctagtaaatagataaaagctccttagtacaacaagaaagaacaatattgctattggttagaaggggcgggttttattggctgtgtgttggtcagggaatgggaatggcagtgggcgcgagagagacaggacggggaatgggaaaggaagggaatgggaacggcagctagcgcctgagaggacggggaatgagaatgaaaaagggagaacatagaatgggaatgggctgaaccaggaatggcagaaccagaaatgacaggctactcttgcagtcttaataagtagtagagataagaatgacaaatataaaaatggcttataagatgaaaaatacaaggatgcaaagaacacatgagatcaacatataagaggctaaaagggcttaaatgacgtcaattgatagtggaatctttgcatagcttaacattaaataaaaggacatctggacattgaacacccaagtatgtggctggaatttcttgaaagctctccttgagctattagtgttatgaccggcagcccagcagcccagcagccctagccctaataaattcagttagtttgttagatggataaatatcagttagtttatttagatggataagtattagttagtttgtttagatggataagcattagtttagaactcctgtatatagttggttagtttgttagggggctgctatcacaacctatatattgtaccctttggttaaggaagaaatcaagcatgcaatacttgcccgtgcttcccccaacccatctactgttcacccgcatacaattcatctgagggactgttcatacgcgacactattcatctacgatcactattcgataattcctagctccgccactgcttaggcatcatacatgaaataggaacaagtagaattattatatttaattacgctaaccaaaatttggactcgaggcctatggctctgataccatattgagatgcatgcaccaactaattcaaccaaaaagttttaaccgatggaaagggatggacaattcacttatatttctataatgaaaagaggcgcagtaagaacaagatttgtgaatgcttattataaatagaggtgattaacctagaattcaattgcgcattctctactttacagtgccaactttaaagatttctttgtttatttgtgtctgatatcataggaacatatttcgtctatatctgtaatgtatcatagctgggtgcaaatgtgagctgaaatgatcatgactcatgagtgttagactattagccgccgcccggtttccctagccgctaccactactgccagagccatggctagtggtcccccctctagctcctctccaccctcaccccttcctctccactgagccaccgtcgttgcccttgctgccccttcctccagccaccggcgcaacgacctctttagctgttgttgctggcacgactgccatagccggtgcctgcctatcgctgcctctgctcggcgcggggcctgggcaacccatgtcgcctctgtctttcctagtaggcccgtagacccccctcccgcggatctccctgtatcggccaccgccgctgtagccctagccaccgcctgggcgtagtgtgctagggctatggcctggccattgccggcctggctgcccctggcctagctacccttggtctaggcgtggctggccagggcctcgctactatcagcttggtcatcgttgcatggcttcgggcagcctggacgccgctccctccatctcgaacatctactttaggccctctctatccttcgtacctttgtcggatgctctgccacccatcgacgttgtggctgcccaatccagctttgtcatggccctcatgactgctaaggcagtagtggctgccgcctgggagcacgaacgcgtcgttgctctcgcctggaagcatgaacgcactgttgccgataccctcgccagtcatacgtccgctgtgcgaccttatcctcctcatcctgcaacactatgccctggaagaccatgtcctcattgacataacgtccctcactatcccctcctggcgacggatgcataatgggggggggggtcctcttctagatccattggacattcacttttgagctgcaggatgtcgttcgcgagtgtggcggcactgcccgcagaccttggttgccattgaggagcaattctttggcaattgtggggctcatgctcttcacctcaacgtcgcctttcagacctttgtctaggaggacctctccatcatcgagtattgtcgccagatgaaaggctggcaacctccctttgtgacctcggggagcctgtctccgatcgcacacatgtccttaacctcctccgtggcttcaatgagcgctacaattacctctagatttggatcactcgctcggtcccatttcccttgtttccacaaggtttgcaatgacttcatcctcgaggagatcaccaaggggcgcctcctcgcttcgacaccgctatcgctctctacagctccacccatgagtgccagtccttgcgcccgtcctcttctactcctaccttggggggcttgtcttcacgctcgtctgtcccctttggccgtgggctccacgcccctccctcctagcccaggcccggggcagggcgagttttaggtgggtctttgctatcagatgaagggtgactatgggggtgggggtggctagagggatgccccttcgccctttccctacaacccatggaccggctgcatctctatgtggcctggcttggcctgtccttgggtggaccttcattgcatctgcctccaccctagacggctaacctgacaataccccgctcaaggtatcctctcgaccctctcgccaccagcaccttagcccgctactacccctaccaccccacatcgttcctagaaccgatggttttagtgggtgggatttgcagtcacttactagctcgttcagcacgattattctaacttcttctatcattgactgggttgctgattccggtgcgtcctaccacatcgctctggatgctggtatactttcttcttctcacccaccgcttctgtctcatccttcatctatcataggaacattctcccggtcacctctgtaggtgatttggttcttctcggacctttctatcttcgcaatgttcttgtggcccctatatcattcaaaatattttatttgttcgtcagtttaccattgataactcttgctctattgagttttatccttttgtattgtccgtgaaggatctttctacccggagccttctcgcctactatgatagctctggcccctgtacaccttgcgactgcctgcgtccacttctccacctaccgcttccactacacatcgcttttgtcctcgccgcagtcgcacacactgactacttccactacctccagcacttggcatcgttgatctggtcatcctagccctgacgtgttgtccaaattgtgtagtagttcagttgtctcttgtactaggggcacctctgagcatctatgccacacatgtcagctaggtcatcatatttgacttcctttctctagctcctcttagcatgtgcatgattttgatctcatacactgatttgtggacctctcatgttatcagtgtttctggttataaatattatctagtggttattgacgattgctctcattattcgtggacttctcccttgcgttcgaagtccaacacatttgcgtctcttttgcacttcatcacttgggtttctacttagtttggccacactattaaggttgtccagtgtaacaatggccgtgagtttgataactcctctcgatcattcttctcccatggtgtctggctccagatgtcttacccctatacttctcttcaagcaaggttgagcacatgattcgcattattaacaacatcatgtgttccttgctctttgatgcatccgttcctgctcgctattaggccaagagcctccacaccgccacctattttcttaatcgccttactactaaggcagcttgcgcttcaacacccctctctgctctttttggcaccactccatcctatgatcatctttgcgtctttgggtgtgcatgcttcccaacctttttgctactgcttcccataagctttcccctcactccacccattgtgtcttcctcgattactcccctgatcacaaagggtaccggtgtcctgacctcaccactcatcatttcttgatctctaatcacgtcatcttcgccaggacaaatttccccttatcaacccctcccggcccacgatcgactctcttctcgagtaagactttcttcttgaacttgatctcgtggctccctttggtcagccaccctttatttttttcactgcaggttcatccctgttgccgccgcccgcgacacgtgttcccctggattccttccgggctatcctaccgcctaggtcggactgtgagcccctagatggcctctgctagactgccggtagcaccgttggccccgcctttgccctcaccttctctgacctcgcccacggcattacgaatctcccaggtgccctagctggccctagccccttctcgctacgccaaccctatgcatgtctatcagggacatgcacgggtgggtgaaccaccccgctcccgggcagagccgacagtgtatcatccccccttcttcattgtgaccctcgccgtgcccacctgatggtggcttgatagactgctagggttcttcgccctgtcaactgtcttgtcctctccacgatctccttcctatcagtctcccccgtgtcgtcttttgttcatagtgccctcatcgatcctcactaaagtcatgctatggaggaagagtgtcacacccggatttaaggaacaaagccgggtgcatctcatatatacaccagggaagacaacacatataataacagagtgcatagagataaatgtcataaatatcataaatgtacttgttacatagcggaagtcttacaaaataaatgataaaataaaacgagctaactattattccctggcgccacaaagctgcctgggagacaccacctagatcaagtcgaaagcctcagagttaggtggctcctcttcgaccacctgttcttctcctgtggggggtgtgagacagcaagagtgagctcacatatcttcatagctcaacaagtcgtggggaataatgtgcatgaactcaccaaaggtgggagttcatgtgaaatgtaaggctaatcaacaaaataaaggctgaagctgagcattgcttttataagttggtcaaaattttattagcagttactaagtgtaagtaaataccaaaccttagtcataataaataaaagtaacaataaaataatcccaatgcgatgcaaatgacaaattgagttttaattccatagattaatcatgtgagggtccgagctgctcatgactgtaagcacggctagtataccagttttacactctgcagaggttgcgcatctttacccacaagtcatgttacccatctgccaagagacgaccaatcccgtacacctctaccgaggaggcgaggcagggtaacactacgaggcctttacaaagttccactagcttcagaaaacccgctacagtttataggaagctccagtgcaggaatccctcgcctgaccgccatcgcagcaaaatcaacccagtgacctccctacactgaccactcccgtactgcccttgcccttttcgggtaaggaagtcatccactagctttcctagttaatcagccaaggacatcccatactacccttatggtagcactgttttcccggatggtcgctccatgttcccattaacataatgatcttaacatgaacagtaataataaataaagaataaaagtataatcatgaataatgtatctccatacccaaatccacataaagcaatagcaagtactacccaaaaatatttcagtagtaaaacaaggtataaagataaccaaaactggggtaacctattggatcccatcaaaattaacctatgcagatcattatgaataataagaacatggctgggtaaaaataagtgatcaagggcacaacttgccttcaatgagctcctgctcagcaacttctatctgctgaacctcaggatccacagtagcttgctcgtctactcgcatcaacacaatacatacatagtatagcaaaaattaacatcacaccaaacatgtaaatagaatacacagtaaaaatctacacattaaaataagaacctaggaacataaatcattaattttggagttatggattttaagttatgaatttccaaaggttttatgtgcttgaaatatgattaaatgagaaattaattttcttactgtttttctgtcaaaacagagacactagatgacaaacaataatattataaaattttagaaattggaatgaatcaatttggactaaaaatgatttttctatgcattttacaagtttctgcaattaatttaatactaaaattcattttctaattgattttatgaatattattctctgtctaggctgtgcctcaatatccaggaaagacatgagcttcattataagcttcccgagacacaatcaacagtgccactggaccacgagtttatttcagtgtttggcgggggctctttaacaaaatgtacccgcgaaggggtatggccagatactggccgttcgatctaacatgagcgctcagattagatttggaactccccgaaccggtaacaagtcgcagccgtccgatcatcaaggaacacaccagatttaaaataacctaactagactaagcgccgcgcgatccagatccaacggtccccaagcccgatctgttctcgcccgcacactagctgatctctggcccagatttatttggccgaagcgttacacaaccaactaatcttcgtcgtccaaaaccggatcaacggtcagcgcacgtcttctcaactctgtctctctcaccgacggcgaacaggacccgacggcggtgccattgctgtgggcaattatctagcacgcgaagacctaagaccctcatctgaacgactctacacgacgctaggaagatatagaatccgatcgaaggccttaccagagactgggattggccgaagacgctggccacggagaatggcgggtccgcggcagagtgtgtacgacggcgagaaattccttccctgcggtccaccaaccgcgccagccgtgggcaccacaagcaccagaacgccacaacgaaggccccgaccgcaaccgaggccaaagcgacgaccaagtcgtgtattcacggtggcggcggcaccctcgccgcgagtcagcgcacggcgaggaaattggaagggcacatgcggtgcgagttggggagttgtgagggtagaacgaaggggagagggagacgaacccggttgtgctcctttaaggacgcggacgtggccgaggtgcctcaacggattgcgcgagatctccgcgctccgccatgctcggcacatccgttgacgggaaggcgagatgacaggcgggtcccagggcgcagcgagtcaccagggtcgcgtcgcgcgcgcggaggagcgacagacaagcgggccctgagcgcagcgaatcgcccggttcgcctgggcgcgggttggcggcatatgacgcgcgggcccgacttgtcagtgcccggttgggcgcgcgcgtgaagggagtctagggcctcgcggagtcaggctggctgggccgccatccgaattcggcccatgcaaccgaatttgtttctattcctttttcttttttcctactttcaaatctagaatctaaattcaaatcttgtgtccaatttttcctcaacttatattgtgtaatcataagtaataattttggggatatttttagatatatatatatatatatatttatatcattttttcttattctcaaacccaaatttctctgattttatttaatgttcaaattttgaattcaaatctagacttgccttaatcataatttttgttttgatgcacaaacaagaaaaagtccagcatgatgcacatattatttatgtgtttttggttatttaattacttaaataagggtgtttacatgtgatatcaacatagaaaaattttatataggaaaaccattcctttttatttggtttacaatgtcgggtattacaaagagtactaggccctccttgccaatcatacctaggatttggtgccccattctccaggtcgcaacgtggtgagtgcctgagtggtgactgggaagtgggtctagacacatgcgcgaaagtccaatagttctctggataggtacaaggcctgctaggttctctagggctttactcaacgtcccggggttgacgacgatgagacgttcaatctagtggtgaagcatgctactgtttgtgctggtgtctcattggatctctcgtttttggcctattcatcagctagatgtcaagagtgccttcctccataggactcttacatagactgtctattgtagtaaatctgtcggctttgttgactctgctcatcctgacatggtctacaagctcaacaagttctctatggtatgaagcaccccccgcacgcttggtatagcaagtttgctacatatccgctctccctaagctttgttgtggctaagtcggacatctttgtgcatctcttggcatagcagtgccactatgtacctcctcctgtatgttgatgacattgtgctcactacctcttcttcggtcatgttgcaccgtatcatcatagcaagaagtcacaatgaaggatctgggtcctcttcatcatttcctggggatgtcgttgagcgtcgctcgaatctttagcaatgttagtacaccctagatgtcctagagcgcactggcatgctagattgcaagccatgtgcgacattggtggacacacatgccaaggtctttggtgatggtgcctctgtcaacgacccactgtctaatgcagtcttgtcggcactctgtctccggttgtacggtgtttcttaggccaagctcatatcttggtcctccaagcgttaggttgtggtctcctgcttcagtgctgaggctgagtaccgggctgtcgctagtgtggtgtctgagacgagctagttgcgccatctccttcaggagtttcatagccctcaccaggagcatgcttgtctattgcgacaacgtcagcaccgtctacctcttcgtcaacctcgcccaacaccagcatacaaagcatgttgagattcatcttcacttcatccatgagcatgttgctgtcggagacgtccacgttcatcacatcccgatgagttcgtagtttgccttatttgatctttccttcttgttgctctcgaaatttctgttcagtttcaatatctgtcatggctagagtttcgactgcggggatgttaaattatttcatttctgtcgaagtgctatgggcctagagcccccgcccatgtaatatataatattgagctcactttttactccttccaacaatagcccactttttactccttcgaacaatgatattttgcatattctcttatttgatttagtacctctgtcccttttgttgcagcacacgtcattgagccctgatggaaagcttgttattattgttggtgatgacacagatgctttacttattgatgctaattcaggaaagactattcattccatgaaaggtcacttggatttctcctttgcttcggcttggagcccagatggcctgacattcgccacaggtaaccaagacaaaacttgtcggatttgggatgccaggaatctcaccgagtctgtccatgtcttgagaggcaacgttggagcaataagatctattcgttttacatccgacgggcacttcttgtcgatggcagaagcagcagactttgtccacatctttgacatcaaaagtgactacaataagagacaggaattggatttctttggcgaggtatccggagcggcctcattgtggcgcttcccgacacatgggttctaggtggaagtgagataaataggagatgggggttgtaccaaacgccttttgttcttagatccatggtggagtggagatactccacggtgaatctaggtgaatgtcagatctaaattcactttttttattattgaagctctaccaaacaagctcttaggtatgatttggtggatttttagctagttggctctttcatctactatagcaagaaactgttttttatctctatccttaaaatgaagaatta

SEQ ID NO: 10019 - DNA, 2079 bp, Zea Mays
gggggtggtggctctttgcaccgcttttttcgaacgctactttagcttttactcttcttttctcttggcttccgctcctcgcccacgcctcctcctccagtcctccctttcgtcgtcgcttccctccccttcccgttcgaatcctctgaccaccgcagagcctcccccctgaggaaaccctagcgcagccgccgaccgccgccgacccgtagcatggcgtccccggcccggcccgtcgccgcgtccgtctccggcgccttcggcctctcgcccgaccccaagcgctgctccttcgaccaggcgctccggcacaaggagaacaggctgttgatgtcatttgttaatttccatgagcaagagaagatctctaaagaaatcgtaacacacgctatagaaagctgcatgaagaaacaagcagataacctgttgaattcactggacgttatcagcggtaggttgtcacagttggagttatactgctatagactggaaaggtccattggagaattacgaagtgacgtgatggattatcataacgaagcaaatctgaacttccggtgcgttgaaaagcaagtgaaagaggttcagaaatctgtgcaggctgttcaggaaaagcaggagcttgctgaaactcagaaagaaatgaccaaacttcagatagtacatgaggattctgcacaaaagagtgaaggtactgctccatcagttttcatgaatagggaaaatgaggttgcccttgtgccattgcaccaagtaaatgctgttcagtcacctcctgtgcaattccaaagttgcagtggccttattctacagcaactgatgccagtccaagaccagcagcgctcgaaccaaaccgctgtgtactgtatgcgaggccaaagccatctggagcacagacaggcccaaatgttcgaagctgctggtcaatctctgcagacacacactcggaaaactcagccaccgacagtagttgaggtatctcaggtaaccagtcaggcaccagagttctaccctcatccgcagcaccaatggcaacatcagaccggccagcaggttttctcacaggcaaggcaaccacaaccacatgtactacagcagcagtacagcaacatccagcaaggtccagcacagatggttcagctgcaaacgtcctctccacatgctcatagtacaccacaggtcacagtagtatatcctccatacgggcctcatcagtctgcctgtggtaatgctgaggcacgcagtgggggcatagttgtgccaccttcatactctacaatttcttcatcccaccggaagcatcatgaagctgctcctgtttatgtacaaagcaacacagtttctgttccactggcggagcagcatcagcagcttcattcactcggcaatggctcatttgtacctcagccaagcaaagttagtccatgcggtctagcgtcatatacggtacaagggaatgcacagacctatagccctgcttatggaagcccttccagcaatcctgctactattgttgctgtccttaatcaacaagcacatggcagttctcccatggtgcttcatcacttgggaccccagtcagtgctgaaccatccgatagacattgctgaaaaggttactcggatgggttactcgaaggatcaggttgagggtcttgcactccgtatggtggctgcaggccagcctgcagaccataaccccctgcatgataggttgagctctgttagccatggtgtagctcctcatgcatggtctggataggtaagaacgacaaatgcagccgtcacgcttacttattactcatgaggtgtttgtgtgatatatctcggtatgtgctttattatcgtcggaaatcttcaggtatttcctctggcgtctttttttatcagccaggattgcatatccaccagcttatttttaccagttggaggatcgagatgaaataagtctgtttagattagttaaagtgatcctggcatatgtcctgccttttaatggacacatgcttgtaattttctcgtggacttgcacacgcatgattggaatataaaacgatacgataatttgttggttgctact

SEQ ID NO: 10020 - DNA, 733 bp, Zea Mays
gaaaaagagaacttaaagctcaacttatgctgtgcgcaagaattggagaccatgtagaaataggggcaaatacatgcattgacagaggcagctggagagagacaacggtcggaaatcataccaagattgataatctggtccagataggccacaatgtggtcattgggaagtgctgcatgatatgtgggcaagtagggattgctggttctgcaacgttcgactcgcagctaatagcttggtgacaaaagatattcaggagcctggtgactacggtggattccccgctgtaccgataaatgaatggcgcaggcaaattgcaaatttgcggttgttctcgaagaaagctagcgtgaaaagatagcatccagcaaccccccctgcgcgattttttttccctgacggtagtatttgacagtgactgtagccctcattttttaatcgagcgacattgcttggcttgtttgctgccgcttttgtctctggtgctccaaaatttcggctacacaatggaattcgaccttttgaaagattttttggactcttggttgtttaacttggccataaggaaccctctgcattagtagcggattattttctagctgtctgctcttcatgagttcactttcagagtttgaggcagcagaggtcgttcagttcctgagtccatgtcaataccggcaaaaactataatgatgcaagtcacatataatctgatgcagaaacaccaaaaaaa

SEQ ID NO: 10021 - DNA, 1349 bp, Zea Mays
acagtttacacccacaaagtgaaaaacatccggtgcgaatgctgtttgaaaacctaggtttttctcgcggttaagccgttaagctcgtgcttgctcactgctgatccctcgactgtgtcttttcgctttggagctcgaggaagcttgccttgccatccgccacagcaggctcatccatcaggatctactaatttggtaaatgatggcagtcatcctgcctaggaccgtccgcagggcggcggaggcagcgttgtcactacactccgtaccgccgcgcgccgcctgtcactttgcgcggtctttgggcggcgtctcttctgcttgcagcatggagttcgtgtcgtggcaaaatggcgggggcatcctgcaccgggcggcctccgttgaccccactgctgtggtggaggctggagcggttgtgcactctggtgccgtcctcggcaaagaggtcgtcgttggttctggggctgtggttgggccttcagtttccataggtcaatcaactagggtcgggtacaatgttgtcttaagcaattgctcagtgggtgagttctgtattatccacaatggatcctccattggtcaagatggttttggcttttttgtggatgaggctggacaagttaagaagaaaccacagctggagagagacaacggtcggaaatcataccaagattgataatctggtccagataggccacaatgtggtcattgggaagtgctgcatgatatgtgggcaagtagggattgctggttctgcaacactgggggactatgttacattgggtggtagagtggcaattcgggaccatgtctcagtcgcatcgaaggtgctgtgttcacagctctggtttttttttttttgctttgccttctttgtgcaccttgtatcaaagctagtttgaattcggcgcaacatcgttttgccttgtctaatgtcatatcgtggttacattactctgagcagtgagcactcttgaatcctttgagctctgattcagttgtgcttacagtggtgcaaactattcttttctccatgctgagcagccgagcctaagaagtttatatgcaacttgtgtgtcttcacacctagtggtttcagcaaatagaatgtatagtcaaacaaaagatgttaactgtttataattatggcaagcacctgcatacctccaccccaactcagtggcggatgcacagggtatgctgggtatgcacccgcataccctgcaaaatcagtgaatatttacatattatataatagtattgttgtatgtagaaactaaaatggaaaaagaaagaaaaatatatctggactggacgagacgacgagtggacgctaaggcccatca

SEQ ID NO: 10022 - DNA, 1410 bp, Zea Mays
acagtttacacccacaaagtgaaaaacatccggtgcgaatgctgtttgaaaacctaggtttttctcgcggttaagccgttaagctcgtgcttgctcactgctgatccctcgactgtgtcttttcgctttggagctcgaggaagcttgccttgccatccgccacagcaggctcatccatcaggatctactaatttggtaaatgatggcagtcatcctgcctaggaccgtccgcagggcggcggaggcagcgttgtcactacactccgtaccgccgcgcgccgcctgtcactttgcgcggtctttgggcggcgtctcttctgcttgcagcatggagttcgtgtcgtggcaaaatggcgggggcatcctgcaccgggcggcctccgttgaccccactgctgtggtggaggctggagcggttgtgcactctggtgccgtcctcggcaaagaggtcgtcgttggttctggggctgtggttgggccttcagtttccataggtcaatcaactagggtcgggtacaatgttgtcttaagcaattgctcagtgggtgagttctgtattatccacaatggatcctccattggtcaagatggttttggcttttttgtggatgaggctggacaagttaagaagaaaccacagatgctgtgcgcaagaattggagaccatgtagaaataggggcaaatacatgcattgacagagctggagagagacaacggtcggaaatcataccaagattgataatctggtccagataggccacaatgtggtcattgggaagtgctgcatgatatgtgggcaagtagggattgctggttctgcaacactgggggactatgttacattgggtggtagagtggcaattcgggaccatgtctcagtcgcatcgaaggttcgactcgcagctaatagcttggtgacaaaagatattcaggagcctggtgactacggtggattccccgctgtaccgataaatgaatggcgcaggcaaattgcaaatttgcggttgttctcgaagaaagctagcgtgaaaagatagcatccagcaaccccccctgcgcgattttttttccctgacggtagtatttgacagtgactgtagccctcattttttaatcgagcgacattgcttggcttgtttgctgccgcttttgtctctggtgctccaaaatttcggctacacaatggaattcgaccttttgaaagattttttggactcttggttgtttaacttggccataaggaaccctctgcattagtagcggattattttctagctgtctgctcttcatgagttcactttcagagtttgaggcagcagaggtcgttcagttcctgagtccatgtcaataccggcaaaaactataatgatgcaagtcacatataatctgatgcagaaacaccaaaaaaa

SEQ ID NO: 10023 - DNA, 1877 bp, Zea Mays
ggaacaagcatacaagaaataacccataaggaaaaaaaccactcctagaaggtcgctctcacagcagccatcaagaatctggcagcggggcaacaagggttcatagtatgatcgagaagttagcccaattcactgatatcagatgttgtctcatcgttggtggtctttcaactaaggttcaagaagttgctctaagatcaatgcctgacatcgttgtagcaacccctgggcgtataatagaccatttacgcaactctctttctgttgggcttgaagatctagctgttgtgatccttgatgaggctgatcgcttgctagaattgggtttcagtgctgaaattcaagaactgattcgtatgtgtcctaaaaggaggcagactatgcttttctctgctacaatgacagaagaaattgatgaacttataaaactttcactaaacaaacctgtacgtcttgaagctgatccttctctgaagcggcctgcaacgttgactgaagaggttgttaggatacgacgagcacgtgagtcaaatcaagaagcggttcttcttgcgctctgtttgaagactttcaagcgaagtgttatcatttttagtggcacaaagcaatccgcacacaggttaaaaataatatttggtctctctggcatgaaagcagctgaacttcatggcaaccttacacaggcccagcggcttgaggctctggaacttttcaggaaacaagaagtagattttctgattgcaactgatgtcgctgctcgtcacgggcaggaagagaaggctatgccgtaacatttgtaaccgatgatgatagatccctcttgaaagcaattgcaaagaaggctggttcacaactgaaaagccgcattgttgcagagaaacctgtggctgagtgtgcacaactgattgagcaactagaagatcagatttccatcatcattcgagaagaaaaggtggaaagagaagcgagaaaagctgaaatggaaattgcaaagaaaatatgatagctcataaggatgagatatactcacggccaaagagaacctggtttgctactgaaagggaaaagaagcttttggtagcagctgctaaagaatctttgggtcaaggtaagagtacctctggaattattagtgctaagcaggctgaagacctccgtctgaaggagaaaaagagacgagagcatgagaaggacctaccaaggaagaaacgccgaagattagaggcccagcgagagatgctggaagatgaggatgaagatgacgaggaagcaaaggaaagtgatagagggaagaaactgaagaaaggccagtctctagtggatgctgcttaccgaaaggcaaagtcattgaaggcggctagcaaacggggtcctggtgcaagcaaaggaaagaaagagaagaatgcaagacaatattctgagaagactcctaacaggcatgaggagatgcgtgagctgttccagaatgatatgagtgaatggaaacagggacgctcctcaaagaaaaacaacaatttcgcgcacaaaaaatcaaaagcttttaatagcaaagcaagatacaagcgccgcaaatagaagactcggccatccccggatttatttacattctcgtctcagttttgactgactgaccctgaagaaatctctgggatccagatgtttccagttaccatgcgtttgcttgttgtaaacttcgtcatatcatgtattgaaacttaccgttttctgatgtctcattgatcttgggagagctatcctcagtttcgacatgtgccgttgctggtttcgtaggtcgtacttatctcaaaacttacttgccagacgttgttgtgtggaaacgtcgaccagcttgttatgttcctacgcctcgaatgcaa

SEQ ID NO: 10024 - DNA, 2541 bp, Zea Mays
ctcggatgcttgtccatgactcgaaaccctgactaaaccatcgtccctccattcttctccctcccggcgccggaaaaacgagtttattcacagaccgcgtatctccctcccactcttcgccatggaccccagcttccggttcgacccggacagctccgacgatgaggcgtcgggtgccccagcccggggtcgcctggcgcagtcgccgtgggagttctccttgtacgcggagtccgtggcggcggagcacgcgcggcgccgcaccacctctatcgacgagaagatcttgcacctgcgccagggatgcgggaagccggtcctctccgatggctcggagagcgacgtgagcggcagcggggaggatgacagcaacgagaaggagatagaggaggagagcggtgacgaggaggacgagcgggagatcgagggggttggcgacgaggaggagagcggagatcgggaggggggtgaggagggaggaagcgagctgggagaagagaaagatgcccatgaggaagaagatacggtcgagcagaatgaaacgagtggaccagttgatccttctaattttttcgcttcttcagagggggcaacttttcatgcaaattcgttccttgagcttaacttgtctcgtccgctagttcgagcttgtgaagcacttggctaccagaagccaactccgattcaggctgcttgtatacctctggcattaactggaagggacatctgtggtagtgctattacaggatctggaaagggttcatagtatgatcgagaagttagcccaattcactgatatcagatgttgtctcatcgttggtggtctttcaactaaggttcaagaagttgctctaagatcaatgcctgacatcgttgtagcaacccctgggcgtataatagaccatttacgcaactctctttctgttgggcttgaagatctagctgttgtgatccttgatgaggctgatcgcttgctagaattgggtttcagtgctgaaattcaagaactgattcgtatgtgtcctaaaaggaggcagactatgcttttctctgctacaatgacagaagaaattgatgaacttataaaactttcactaaacaaacctgtacgtcttgaagctgatccttctctgaagcggcctgcaacgttgactgaagaggttgttaggatacgacgagcacgtgagtcaaatcaagaagcggttcttcttgcgctctgtttgaagactttcaagcgaagtgttatcatttttagtggcacaaagcaatccgcacacaggttaaaaataatatttggtctctctggcatgaaagcagctgaacttcatggcaaccttacacaggcccagcggcttgaggctctggaacttttcaggaaacaagaagtagattttctgattgcaactgatgtcgctgctcgtcacgggcaggaagagaaggctatgccgtaacatttgtaaccgatgatgatagatccctcttgaaagcaattgcaaagaaggctggttcacaactgaaaagccgcattgttgcagagaaacctgtggctgagtgtgcacaactgattgagcaactagaagatcagatttccatcatcattcgagaagaaaaggtggaaagagaagcgagaaaagctgaaatggaaattgcaaaggcagaaaatatgatagctcataaggatgagatatactcacggccaaagagaacctggtttgctactgaaagggaaaagaagcttttggtagcagctgctaaagaatctttgggtcaaggtaagagtacctctggaattattagtgctaagcaggctgaagacctccgtctgaaggagaaaaagagacgagagcatgagaaggacctaccaaggaagaaacgccgaagattagaggcccagcgagagatgctggaagatgaggatgaagatgacgaggaagcaaaggaaagtgatagagggaagaaactgaagaaaggccagtctctagtggatgctgcttaccgaaaggcaaagtcattgaaggcggctagcaaacggggtcctggtgcaagcaaaggaaagaaagagaagaatgcaagacaatattctgagaagactcctaacaggcatgaggagatgcgtgagctgttccagaatgatatgagtgaatggaaacagggacgctcctcaaagaaaaacaacaatttcgcgcacaaaaaatcaaaagcttttaatagcaaagcaagatacaagcgccgcaaatagaagactcggccatccccggatttatttacattctcgtctcagttttgactgactgaccctgaagaaatctctgggatccagatgtttccagttaccatgcgtttgcttgttgtaaacttcgtcatatcatgtattgaaacttaccgttttctgatgtctcattgatcttgggagagctatcctcagtttcgacatgtgccgttgctggtttcgtaggtcgtacttatctcaaaacttacttgccagacgttgttgtgtggaaacgtcgaccagcttgttatgttcctacgcctcgaatgcaa

SEQ ID NO: 10025 - DNA, 2712 bp, Zea Mays
tcgaaaccctgactaaaccatcgtccctccattcttctccctcccggcgccggaaaaacgagtttattcacagaccgcgtatctccctcccactcttcgccatggaccccagcttccggttcgacccggacagctccgacgatgaggcgtcgggtgccccagcccggggtcgcctggcgcagtcgccgtgggagttctccttgtacgcggagtccgtggcggcggagcacgcgcggcgccgcaccacctctatcgacgagaagatcttgcacctgcgccagggatgcgggaagccggtcctctccgatggctcggagagcgacgtgagcggcagcggggaggatgacagcaacgagaaggagatagaggaggagagcggtgacgaggaggacgagcgggagatcgagggggttggcgacgaggaggagagcggagatcgggaggggggtgaggagggaggaagcgagctgggagaagagaaagatgcccatgaggaagaagatacggtcgagcagaatgaaacgagtggaccagttgatccttctaattttttcgcttcttcagagggggcaacttttcatgcaaattcgttccttgagcttaacttgtctcgtccgctagttcgagcttgtgaagcacttggctaccagaagccaactccgattcaggctgcttgtatacctctggcattaactggaagggacatctgtggtagtgctattacaggatctggaaagacagctgctttctctttgcctgtgctggaacgtctactttttcgtccaaaacgtgtacctgcaattagggtgcttattcttactccaactagagagctggctgctcaggttcatagtatgatcgagaagttagcccaattcactgatatcagatgttgtctcatcgttggtggtctttcaactaaggttcaagaagttgctctaagatcaatgcctgacatcgttgtagcaacccctgggcgtataatagaccatttacgcaactctctttctgttgggcttgaagatctagctgttgtgatccttgatgaggctgatcgcttgctagaattgggtttcagtgctgaaattcaagaactgattcgtatgtgtcctaaaaggaggcagactatgcttttctctgctacaatgacagaagaaattgatgaacttataaaactttcactaaacaaacctgtacgtcttgaagctgatccttctctgaagcggcctgcaacgttgactgaagaggttgttaggatacgacgagcacgtgagtcaaatcaagaagcggttcttcttgcgctctgtttgaagactttcaagcgaagtgttatcatttttagtggcacaaagcaatccgcacacaggttaaaaataatatttggtctctctggcatgaaagcagctgaacttcatggcaaccttacacaggcccagcggcttgaggctctggaacttttcaggaaacaagaagtagattttctgattgcaactgatgtcgctgctcgtgggattgatattgttggtgttcagactgtaataaattttgcatgcccaagagatgtgaaaacttatcttcatcgtgttggccgcacagcacgggcaggaagagaaggctatgccgtaacatttgtaaccgatgatgatagatccctcttgaaagcaattgcaaagaaggctggttcacaactgaaaagccgcattgttgcagagaaacctgtggctgagtgtgcacaactgattgagcaactagaagatcagatttccatcatcattcgagaagaaaaggtggaaagagaagcgagaaaagctgaaatggaaattgcaaagaaaatatgatagctcataaggatgagatatactcacggccaaagagaacctggtttgctactgaaagggaaaagaagcttttggtagcagctgctaaagaatctttgggtcaaggtaagagtacctctggaattattagtgctaagcaggctgaagacctccgtctgaaggagaaaaagagacgagagcatgagaaggacctaccaaggaagaaacgccgaagattagaggcccagcgagagatgctggaagatgaggatgaagatgacgaggaagcaaaggaaagtgatagagggaagaaactgaagaaaggccagtctctagtggatgctgcttaccgaaaggcaaagtcattgaaggcggctagcaaacggggtcctggtgcaagcaaaggaaagaaagagaagaatgcaagacaatattctgagaagactcctaacaggcatgaggagatgcgtgagctgttccagaatgatatgagtgaatggaaacagggacgctcctcaaagaaaaacaacaatttcgcgcacaaaaaatcaaaagcttttaatagcaaagcaagatacaagcgccgcaaatagaagactcggccatccccggatttatttacattctcgtctcagttttgactgactgaccctgaagaaatctctgggatccagatgtttccagttaccatgcgtttgcttgttgtaaacttcgtcatatcatgtattgaaacttaccgttttctgatgtctcattgatcttgggagagctatcctcagtttcgacatgtgccgttgctggtttcgtaggtcgtacttatctcaaaacttacttgccagacgttgttgtgtggaaacgtcgaccagcttgttatgttcctacgcctcgaatgcaa

SEQ ID NO: 10026 - DNA, 2713 bp, Zea Mays
ctcgaaaccctgactaaaccatcgtccctccattcttctccctcccggcgccggaaaaacgagtttattcacagaccgcgtatctccctcccactcttcgccatggaccccagcttccggttcgacccggacagctccgacgatgaggcgtcgggtgccccagcccggggtcgcctggcgcagtcgccgtgggagttctccttgtacgcggagtccgtggcggcggagcacgcgcggcgccgcaccacctctatcgacgagaagatcttgcacctgcgccagggatgcgggaagccggtcctctccgatggctcggagagcgacgtgagcggcagcggggaggatgacagcaacgagaaggagatagaggaggagagcggtgacgaggaggacgagcgggagatcgagggggttggcgacgaggaggagagcggagatcgggaggggggtgaggagggaggaagcgagctgggagaagagaaagatgcccatgaggaagaagatacggtcgagcagaatgaaacgagtggaccagttgatccttctaattttttcgcttcttcagagggggcaacttttcatgcaaattcgttccttgagcttaacttgtctcgtccgctagttcgagcttgtgaagcacttggctaccagaagccaactccgattcaggctgcttgtatacctctggcattaactggaagggacatctgtggtagtgctattacaggatctggaaagctgctttctctttgcctgtgctggaacgtctactttttcgtccaaaacgtgtacctgcaattagggtgcttattcttactccaactagagagctggctgctcaggttcatagtatgatcgagaagttagcccaattcactgatatcagatgttgtctcatcgttggtggtctttcaactaaggttcaagaagttgctctaagatcaatgcctgacatcgttgtagcaacccctgggcgtataatagaccatttacgcaactctctttctgttgggcttgaagatctagctgttgtgatccttgatgaggctgatcgcttgctagaattgggtttcagtgctgaaattcaagaactgattcgtatgtgtcctaaaaggaggcagactatgcttttctctgctacaatgacagaagaaattgatgaacttataaaactttcactaaacaaacctgtacgtcttgaagctgatccttctctgaagcggcctgcaacgttgactgaagaggttgttaggatacgacgagcacgtgagtcaaatcaagaagcggttcttcttgcgctctgtttgaagactttcaagcgaagtgttatcatttttagtggcacaaagcaatccgcacacaggttaaaaataatatttggtctctctggcatgaaagcagctgaacttcatggcaaccttacacaggcccagcggcttgaggctctggaacttttcaggaaacaagaagtagattttctgattgcaactgatgtcgctgctcgtgggattgatattgttggtgttcagactgtaataaattttgcatgcccaagagatgtgaaaacttatcttcatcgtgttggccgcacagcacgggcaggaagagaaggctatgccgtaacatttgtaaccgatgatgatagatccctcttgaaagcaattgcaaagaaggctggttcacaactgaaaagccgcattgttgcagagaaacctgtggctgagtgtgcacaactgattgagcaactagaagatcagatttccatcatcattcgagaagaaaaggtggaaagagaagcgagaaaagctgaaatggaaattgcaaaggcagaaaatatgatagctcataaggatgagatatactcacggccaaagagaacctggtttgctactgaaagggaaaagaagcttttggtagcagctgctaaagaatctttgggtcaaggtaagagtacctctggaattattagtgctaagcaggctgaagacctccgtctgaaggagaaaaagagacgagagcatgagaaggacctaccaaggaagaaacgccgaagattagaggcccagcgagagatgctggaagatgaggatgaagatgacgaggaagcaaaggaaagtgatagagggaagaaactgaagaaaggccagtctctagtggatgctgcttaccgaaaggcaaagtcattgaaggcggctagcaaacggggtcctggtgcaagcaaaggaaagaaagagaagaatgcaagacaatattctgagaagactcctaacaggcatgaggagatgcgtgagctgttccagaatgatatgagtgaatggaaacagggacgctcctcaaagaaaaacaacaatttcgcgcacaaaaaatcaaaagcttttaatagcaaagcaagatacaagcgccgcaaatagaagactcggccatccccggatttatttacattctcgtctcagttttgactgactgaccctgaagaaatctctgggatccagatgtttccagttaccatgcgtttgcttgttgtaaacttcgtcatatcatgtattgaaacttaccgttttctgatgtctcattgatcttgggagagctatcctcagtttcgacatgtgccgttgctggtttcgtaggtcgtacttatctcaaaacttacttgccagacgttgttgtgtggaaacgtcgaccagcttgttatgttcctacgcctcgaatgcaa

SEQ ID NO: 10027 - DNA, 4096 bp, Zea Mays
aagaaagataaaaaggaattatattaataataatcaagagacgactgctgtataaatagacaaagagatgagatgtgttacctagatctctatagccatcaatagatttgtaacgtgtccgaccccacttttaggtccgctcggtcgtcgtccatgaatgcagcacagttgcatcgtacagaaattaaacggcttttgttttgatttggttaaacttcgcatctaaacaccagtgtggaaagcttggtagtacactgtactgtactaccgtctccactgatcgagaaatcgaacgagtttcgtacaatgcagacgtgcagtgcagtggtcatggtaaggcccaagcccaaccatggtgggcttcggctctcgactcaacggtgcgcgagtgaggcccgtcagtacaaagtaatttctgtcattcaacttcctctaactttctcctctttacttctctgttctctcgaatgagtatagcctattagtacaaaatcatggtgcttagaccacattctctcgaatgaattctcctcgaacagtgacaacggccattcatgaattcgcaaagaaattcatgaatgaccattctgacttcagtttggactctctgcgctctcagagtcagagccccgtttttatcagaattcagaaacgaatagttaaaacttgaaggacagggagacactatttattctgtgcccaattttgcttctgtacatgttcaggagttctttttttcttgccacaatctcaaccacaggccagctttacactcaagacgtgtggcagcatgaaagatttgcacggtcataagttcacaacttcggagacgagcgcatcggcagtcattaggctctgccttgcctgaatgtgcagtttcagtttcagcagctgagagaaagagaaggatatggtgagagggcatctcaaggaacatgcattaaactgcccccatttacttgctgacaggccacagactgctagttcacaagtcagtaaacacatagttacatagtactagtaccacatggagacgcagttcagggccgcttccatctgtgtggatcagctagcaagcagatcacacatatacggcgccgacaggtcactggtataatacaaggcggctgatacggacacgcttgcttaatgcttagcttcttgttaggagatcgaattgggtcaggcgcttggaaactgtactacacgcgcaccatgcagacacagcagtagtacttgcgcggtttcctccgggcagaccaccaccaggcacaggccggcagcaggctcctcctcacctgcgcctggtcgtgttcgccggcgcccacaggtcggccccgttgctctgggtcagctgcagtgtctggtccaccggcaccaggcacagcccgcggctccggaggctgtagtgctcgggatcctggatcacatgccgaacaggatgcacgcgtgttatatatggtctcgcgctaggtttcgatgcacgagagaattcagtgcagacgagggaggacgccggcagagagctcacctcaggcgcggcgccggcagccggaggagcacgcatgtaaggggagctgaggacctggagctgctggtgcaggaacctgatgtaccccgaggcctcctgcagaacggaagccgtgtctgtctgcacagcaaaagcaaagcaacgcaacgagagaagcgaaacgtgtgatcatcgcagcgcttgcaattccagttgcgcggacgacgacaaaggacggaacggcagaggcagtagtgcagggtgtacagcgaaaattaaactttgggaaaataatacaataccttcccgaacggcgacactagctgctggagcgccgcgactctctcgccgatcctgtccttcttctccttgggcgatacgggcgcggttctcgggctgttgctattcctcggcctcggcttcttcgaggacatgggcatgcttcccaactcctctggcgggctcgcggcggcggcggcggcgacggcggctttggcactgaagtagccgtcggtgtggctccttttgctgtggttggccaccacctcggccatcatcatcttgtccaccctcgccggctcgatcggcttaccagctccgtccttgccccgcgcgtgtttcgctgctggaatccgggaggaaagcgtagcggtaagggcagaggcagaccgcagaagagaggagcctcagcctcctcctgcttggtagggtaaaagctgacttttactacagcctgtagcccgttggttcagacgtcggtttcatgggaaaatcgctgctgtcgtcgcgctccatgcatccaaaagcccggtcttgtgcgagctagctagtgtgacagcgttaaagtacttggtactatactaataacacgaatatttttttttaaaaaaaaaaagatcgacgcgacgagacgaggtcaaggatttcagtgactttagcaacctttttttttttcctgaacaggaggaacttacagtacttgtggaaaactaatggtttaaatcatcagtatgcacacgaaatgaaaaaggatctgtggcttcaccaccgtacctttggacgcgagtgcagccgtgcagggaaggtggcagccgcactaggagattctgcgcatcagaactgtcctgctagctaccgctggccccctctctcccctcactccagtgaaggccagcgaccttgtctgcagttatatatatatatatatatatatatatatatatatatatatatatatgatgtacactgctcatcttttaattggagactttgtttggtttcaaaatacagtgctgccatttggaccttatctgaaggtttctctttggtagcataaagaaaaatggttggctggcgctggaaaagacaagggagttccaagctgacagcttgcggtccagttcggagatcttgtcttcgtttccagctgttgtgtgcttaaaaaacaatcgcagcaagctagaggacatatcactggtcagagcaaataaactaaggtacgtggtaatccttatccaccagcgtcagcgttacatgcctgtaggacattaggagctgacgggtttcagagctatcgtaaagcataatcatgtctgagcatgaacgaaaagctaccgccgtttgcagcgcgaaattaatcgtacgggtctacatcatctcgctccttgattacaggggctgatatgatggcgccgtcacgtatttcggctcgtaaatgatcagttgtagctagcgacatgcggaagacgtacgtacgacaggcaggcgccagctgttggacgtcaggcaggctctagctagcgacggcggtgctgctgcaactgcactagcgttcttccatttgggcgtcattcattctgattgagagagagagagagcaggcaggcctattgtattgactgcgcactgtggcgctagcagcagggaaaccgttcatgattgactgacgaatttgtctagtagtagctgtagcactagctaggttgttttgcagttccgatcatcagacaagagacaccgtacgttattatatattttgccgatcacgcgtgccagcagcggaaaaaaatttggtgcagcactactgcaaacagtctggtttacagctcctcacaaaaaatgatgatagatcccacctgcagtagcaataacataactacaacgttatctggtggacctgcaggtggagtctatctgcctttttgtgaggggctgtaaacaatatgatttgcagcagagctgcaccaaatttttttccgcagtagcagcctttaaaccaaagtgggaggccgccttgaatacgctcgtcgatcctaccctcctcgcgacgtcgttagcagcacatccattgattatcgggaggcgagaataagttgcgttaattagcagtaatcgcacgtctaattattaaaaccggtcgccgccgacgtaggcccataccggtagccaccccctcccccgggggagccagctgtgcggaaaggacgacgcaagaacacgatcgagcatgcatgcataggcatagcagcaatataatacgccaataccagtccaaggaaaagaagaagaagaaaaaaagtgaaacgg

SEQ ID NO: 10028 - DNA, 1347 bp, Zea Mays
cccgcctccccggtctgtgtttgccccctgcccggttggcccctggctctcctcccgcccgcccggccgcccccaccccacccaatcctaccccgcggggggaattctcagttctcgcggcgacgactgggagaccgccgccgccgccatcctactccaggtgccctgagaactcgatcgggctcttcgctggcgacgaacacccaccagctatcaggtgtacaaccatgtacttcaccgtgcggcgtggttagctgctgccttcaagaatgcagagacccaatgcgccgtcggcttgcgccaccatcaccttcgcggaggctctaaggagggagatggagtaccgcaagtgggtggagaggacccacccacatctgctcgtcggaatctgcggagcccctgaaatgcagagagatttcagtgcaggaccagtacctgatgcgatcaagagaaaactagctgccgagaccagtgtgcctccacaacaatcaagtttcagctgtgtaactggacagaagcagccccaaaactggtaccccacaaagaaaaaggtgaaagttccacatcttccatcgcagattctgcagtgtcccagaccaaacgtggtgccatccttctggtgcaaaatctgcaaggtcgactgtgtcaccgagttcaatttcagcgctcacgttggaggcaaaaagcacaaggccaaaaagctagagattctaggtaagaggaacgctgggggacctgctagccgatgcgcaggcaacaggagcgctggacagaatggactagcagtttctgggagcagaagcagcgaacagaatgtggctggcagcgttgctgctggaccgaactgtgacatgtcgtctgagagcagaactaatggaacagaaggaagtgggtgcactgtccggctatgagcagcttgggtttcactcgagtctggtatttcaataaaagttcgccttgcacattttcttctcaagggcacagttaacatatttatgtgtcagatggctaggccgctagggagatttcatctgatgggttggactgaacaacactagtcagataataagttgaaacgtatgcactatgcagtgtcctattcccatgtgagagcagtacattgtttggacatatatctgacagcagatgcatcctgtgtcctttcgcttccttctcgaaaatgtacagtagctaaccttgttcgggtaggaggtggaagttgaggacgctgttctgagtatgtactgggtagttataatgtatgacatcatggcttgtttgttgtttccatttcttactggtgattgaatcattgaagacggtgagggtaactgtagtgtgtgccaa

SEQ ID NO: 10029 - DNA, 1600 bp, Zea Mays
gtcggaccgccactggggcagttacaggagcggaaggaaaaagtcttacatgcctctactgtattggctcaaggtgttggtggcgatttcattgcgcctgatagcttgctgcaggaggttgtcaatcttgtggaggcacctgtgcccatccttggtcgatatgatgattccttcttagaacttcctaaagatgtactgattacggttatgcagaaacatcagaagtattttgctgtaatctccaagtccactggcgatctgctaccttattttattgctgttgccaatggtgcaattagcaaggaagttgttcgcaaagggaatgaagctgttctcagggcaaggtatgaggatgccaaattcttttataagatggatacacaaaagaaattttctgaattccgaggccagcttagtggcattctttttcatgaaaaacttgggacaatgctcgataaaatgacacgtgtcgagaataccgttgctgaattggcccttattcttggaataaatgagagaacggtcccaattatcaaagatgcggctgcattggctatgtcagatcttgccacttctattgtcacagaatttacttcacttgctggaattatggcacgccattatgctttgagagacagcatccctgaagagattgcagaagcactatttgagataacactccctcggtcttcgggtgatgtgtttccaagaacagatgctgattggatagcctagttggattgtttggagctggatgccagccaagttctaccaatgatccatttggacttcgaagggtctcttatggattggtccaaatattagttgagaacaaaaagagctttgacctcagacgagctctcaccttattggcaggggtgcaacccatagcaatagagagtgatgttatagatgaggcagtacagttcgtcacaaggagactggaacagcttctggtggatgagggaattaactgcgagatagtccgatcagtgcttatggagcgtgcaaactgcccttatctagcagcacaaacagcgaccgaaatggaagcattttcgagaacagaaacatttcaaaaaatcgttgaagcgtattcaaggccaacaaggatcatccgtggaaaagaaattgagtctgctttggaggttgacccacacgtatttgagaaagatgaagagaaagttttgtggagcgcctacttggaggttgctgataagatccatcctggtgttgatattaagacctttgtggatgcttctcttatcctgatacaacccctagaagatttcttcaatagtgtcttcgtgatggcggaagacgagagagttcgcaacaaccggctaacgttgctgaggaagattgagagtttgcccaaggggattgcggacctgtcagttttacctgggttttaagctgcctattccagccagggggtgtgagcaatagccgtagcggagagatgattttgattttacaagtatttctgattaaaggaaaaaaaaacgtcgtcgcagtagggcacggcaatcccagtaaacgctgtacttgtaattctgattaatacagtcaacaaacggaatcatatctcaaatcttgt

SEQ ID NO: 10030 - DNA, 2129 bp, Zea Mays
gacgattttcatctcacatttactttcctgaccagcctttatattgttgttgaaaatcttagtatgaagcaaacagaggtagaggtggaactacgtggcccaccagttgcgaaggcatttgacgaagaaggaaaccccactaaggccgctgagggattttgtcgaaagaataatgtctctgtcgatcacctatatagaagaatagatggtaaaacagaatatatctacgctagagtcagagagtctgctcgttttgctgatgaggtcctaactgaagatttacctactattgtttctggtatttcatttcccaagtcgatgcgctggaactccaatattgtttttagtcgtccaatacgctggatcctggcacttcatggcgattttgttgtgccattttattttgctggcatctcaagtgggaatcagtcatgtggccttcgtaactcttctttggctaattttaaggtggaaactgcagaatcatatttaggtactgtggaaaaagctgggatcttgattaatatgcaggagcggaaggaaaaagtcttacatgcctctactgtattggctcaaggtgttggtggcgatttcattgcgcctgatagcttgctgcaggaggttgtcaatcttgtggaggcacctgtgcccatccttggtcgatatgatgattccttcttagaacttcctaaagatgtactgattacggttatgcagaaacatcagaagtattttgctgtaatctccaagtccactggcgatctgctaccttattttattgctgttgccaatggtgcaattagcaaggaagttgttcgcaaagggaatgaagctgttctcagggcaaggtatgaggatgccaaattcttttataagatggatacacaaaagaaattttctgaattccgaggccagcttagtggcattctttttcatgaaaaacttgggacaatgctcgataaaatgacacgtgtcgagaataccgttgctgaattggcccttattcttggaataaatgagagaacggtcccaattatcaaagatgcggctgcattggctatgtcagatcttgccacttctattgtcacagaatttacttcacttgctggaattatggcacgccattatgctttgagagacagcatccctgaagagattgcagaagcactatttgagataacactccctcggtcttcgggtgatgtgtttccaagaacagatgctggtatagttcttgcggttgctgatagattggatagcctagttggattgtttggagctggatgccagccaagttctaccaatgatccatttggacttcgaagggtctcttatggattggtccaaatattagttgagaacaaaaagagctttgacctcagacgagctctcaccttattggcaggggtgcaacccatagcaatagagagtgatgttatagatgaggcagtacagttcgtcacaaggagactggaacagcttctggtggatgagggaattaactgcgagatagtccgatcagtgcttatggagcgtgcaaactgcccttatctagcagcacaaacagcgaccgaaatggaagcattttcgagaacagaaacatttcaaaaaatcgttgaagcgtattcaaggccaacaaggatcatccgtggaaaagaaattgagtctgctttggaggttgacccacacgtatttgagaaagatgaagagaaagttttgtggagcgcctacttggaggttgctgataagatccatcctggtgttgatattaagacctttgtggatgcttctcttatcctgatacaacccctagaagatttcttcaatagtgtcttcgtgatggcggaagacgagagagttcgcaacaaccggctaacgttgctgaggaagattgagagtttgcccaaggggattgcggacctgtcagttttacctgggttttaagctgcctattccagccagggggtgtgagcaatagccgtagcggagagatgattttgattttacaagtatttctgattaaaggaaaaaaaaacgtcgtcgcagtagggcacggcaatcccagtaaacgctgtacttgtaattctgattaatacagtcaacaaacggaatcatatctcaaatcttgt

SEQ ID NO: 10031 - DNA, 3258 bp, Zea Mays
gcgacgcctccacctcctccaccgtgtccgctgccaaccaacggggctcttccgcttcctccgtcctcaccttccagcaggccatccagcgcctccaggagtactgggcctccgtaggatgcgccgtcatgcagtgtagcaacaccgaggttggagcgggcacaatgaatcctctcacatttcttagggtcttaggtcctgagccatggaatgtcgcttacgtggagccaagtataagaccagacgacagtcgctatggggacaatcccaataggcttcagcgccatactcagtttcaggtaattctgaagcctgatcctggaaattcgcaagatctctttctgcacagcctttcagcaataggtattaacatccatgaacatgacatccgcttcgttgaagacaactgggagagtccggttcttggtgcttggggactgggctgggaggtttggatggatggcatggaaatcacacagttcacatattttcagcagtcaggaagccttccattgcagccggtttctgttgaaataacatatggacttgaacgtatcctcatgtcactccaggaagttgatcacttcaagaatatactatacaccgaaggaatcacatatggagagctgttccttgagaacgagaaggagatgagtgcatattatttagaacatgcggatgtcagtcacattcaaaagcactttgacaattttgaagaagaggctcgatctttattatcactggggctgccaattccagcgtatgatcaggttctgaaggcctctcatgctttcaatatattagattctagaggttttgttggtgtaactgagcgtgcaagatattttggtcgcatgcgaagccttgctcgtcaatgtgctcagctttgggtggaaactcgagaaaaccttggacatcctttgggtgcttatgaagaggataaccttatctatcctcatgtctccaaaaaaactcatagagaggaagtgctggtacaaccacgtgcatttgttcttgaaataggaacagaagagttgccaccccgtgacgtcgtagaagcaactgaacagcttgagaaatctctagttaatacattggagaaacgtagattgacccatgggaaagtgcacacttacgggacaccaaggagattggcgattgttgttgaaaatcttagtatgaagcaaacagaggtagaggtggaactacgtggcccaccagttgcgaaggcatttgacgaagaaggaaaccccactaaggccgctgagggattttgtcgaaagaataatgtctctgtcgatcacctatatagaagaatagatggtaaaacagaatatatctacgctagagtcagagagtctgctcgttttgctgatgaggtcctaactgaagatttacctactattgtttctggtatttcatttcccaagtcgatgcgctggaactccaatattgtttttagtcgtccaatacgctggatcctggcacttcatggcgattttgttgtgccattttattttgctggcatctcaaggtttgcattggcagtgggaatcagtcatgtggccttcgtaactcttctttggctaattttaaggtggaaactgcagaatcatatttaggtactgtggaaaaagctgggatcttgattaatatgcaggagcggaaggaaaaagtcttacatgcctctactgtattggctcaaggtgttggtggcgatttcattgcgcctgatagcttgctgcaggaggttgtcaatcttgtggaggcacctgtgcccatccttggtcgatatgatgattccttcttagaacttcctaaagatgtactgattacggttatgcagaaacatcagaagtattttgctgtaatctccaagtccactggcgatctgctaccttattttattgctgttgccaatggtgcaattagcaaggaagttgttcgcaaagggaatgaagctgttctcagggcaaggtatgaggatgccaaattcttttataagatggatacacaaaagaaattttctgaattccgaggccagcttagtggcattctttttcatgaaaaacttgggacaatgctcgataaaatgacacgtgtcgagaataccgttgctgaattggcccttattcttggaataaatgagagaacggtcccaattatcaaagatgcggctgcattggctatgtcagatcttgccacttctattgtcacagaatttacttcacttgctggaattatggcacgccattatgctttgagagacagcatccctgaagagattgcagaagcactatttgagataacactccctcggtcttcgggtgatgtgtttccaagaacagatgctggtatagttcttgcggttgctgatagattggatagcctagttggattgtttggagctggatgccagccaagttctaccaatgatccatttggacttcgaagggtctcttatggattggtccaaatattagttgagaacaaaaagagctttgacctcagacgagctctcaccttattggcaggggtgcaacccatagcaatagagagtgatgttatagatgaggcagtacagttcgtcacaaggagactggaacagcttctggtggatgagggaattaactgcgagatagtccgatcagtgcttatggagcgtgcaaactgcccttatctagcagcacaaacagcgaccgaaatggaagcattttcgagaacagaaacatttcaaaaaatcgttgaagcgtattcaaggccaacaaggatcatccgtggaaaagaaattgagtctgctttggaggttgacccacacgtatttgagaaagatgaagagaaagttttgtggagcgcctacttggaggttgctgataagatccatcctggtgttgatattaagacctttgtggatgcttctcttatcctgatacaacccctagaagatttcttcaatagtgtcttcgtgatggcggaagacgagagagttcgcaacaaccggctaacgttgctgaggaagattgagagtttgcccaaggggattgcggacctgtcagttttacctgggttttaagctgcctattccagccagggggtgtgagcaatagccgtagcggagagatgattttgattttacaagtatttctgattaaaggaaaaaaaaacgtcgtcgcagtagggcacggcaatcccagtaaacgctgtacttgtaattctgattaatacagtcaacaaacggaatcatatctcaaatcttgt

SEQ ID NO: 10032 - DNA, 3270 bp, Zea Mays
gcgacgcctccacctcctccaccgtgtccgctgccaaccaacggggctcttccgcttcctccgtcctcaccttccagcaggccatccagcgcctccaggagtactgggcctccgtaggatgcgccgtcatgcagtgtagcaacaccgaggttggagcgggcacaatgaatcctctcacatttcttagggtcttaggtcctgagccatggaatgtcgcttacgtggagccaagtataagaccagacgacagtcgctatggggacaatcccaataggcttcagcgccatactcagtttcaggtaattctgaagcctgatcctggaaattcgcaagatctctttctgcacagcctttcagcaataggtattaacatccatgaacatgacatccgcttcgttgaagacaactgggagagtccggttcttggtgcttggggactgggctgggaggtttggatggatggcatggaaatcacacagttcacatattttcagcagtcaggaagccttccattgcagccggtttctgttgaaataacatatggacttgaacgtatcctcatgtcactccagatgctgtgacaggaagttgatcacttcaagaatatactatacaccgaaggaatcacatatggagagctgttccttgagaacgagaaggagatgagtgcatattatttagaacatgcggatgtcagtcacattcaaaagcactttgacaattttgaagaagaggctcgatctttattatcactggggctgccaattccagcgtatgatcaggttctgaaggcctctcatgctttcaatatattagattctagaggttttgttggtgtaactgagcgtgcaagatattttggtcgcatgcgaagccttgctcgtcaatgtgctcagctttgggtggaaactcgagaaaaccttggacatcctttgggtgcttatgaagaggataaccttatctatcctcatgtctccaaaaaaactcatagagaggaagtgctggtacaaccacgtgcatttgttcttgaaataggaacagaagagttgccaccccgtgacgtcgtagaagcaactgaacagcttgagaaatctctagttaatacattggagaaacgtagattgacccatgggaaagtgcacacttacgggacaccaaggagattggcgattgttgttgaaaatcttagtatgaagcaaacagaggtagaggtggaactacgtggcccaccagttgcgaaggcatttgacgaagaaggaaaccccactaaggccgctgagggattttgtcgaaagaataatgtctctgtcgatcacctatatagaagaatagatggtaaaacagaatatatctacgctagagtcagagagtctgctcgttttgctgatgaggtcctaactgaagatttacctactattgtttctggtatttcatttcccaagtcgatgcgctggaactccaatattgtttttagtcgtccaatacgctggatcctggcacttcatggcgattttgttgtgccattttattttgctggcatctcaaggtttgcattggcagtgggaatcagtcatgtggccttcgtaactcttctttggctaattttaaggtggaaactgcagaatcatatttaggtactgtggaaaaagctgggatcttgattaatatgcaggagcggaaggaaaaagtcttacatgcctctactgtattggctcaaggtgttggtggcgatttcattgcgcctgatagcttgctgcaggaggttgtcaatcttgtggaggcacctgtgcccatccttggtcgatatgatgattccttcttagaacttcctaaagatgtactgattacggttatgcagaaacatcagaagtattttgctgtaatctccaagtccactggcgatctgctaccttattttattgctgttgccaatggtgcaattagcaaggaagttgttcgcaaagggaatgaagctgttctcagggcaaggtatgaggatgccaaattcttttataagatggatacacaaaagaaattttctgaattccgaggccagcttagtggcattctttttcatgaaaaacttgggacaatgctcgataaaatgacacgtgtcgagaataccgttgctgaattggcccttattcttggaataaatgagagaacggtcccaattatcaaagatgcggctgcattggctatgtcagatcttgccacttctattgtcacagaatttacttcacttgctggaattatggcacgccattatgctttgagagacagcatccctgaagagattgcagaagcactatttgagataacactccctcggtcttcgggtgatgtgtttccaagaacagatgctggtatagttcttgcggttgctgatagattggatagcctagttggattgtttggagctggatgccagccaagttctaccaatgatccatttggacttcgaagggtctcttatggattggtccaaatattagttgagaacaaaaagagctttgacctcagacgagctctcaccttattggcaggggtgcaacccatagcaatagagagtgatgttatagatgaggcagtacagttcgtcacaaggagactggaacagcttctggtggatgagggaattaactgcgagatagtccgatcagtgcttatggagcgtgcaaactgcccttatctagcagcacaaacagcgaccgaaatggaagcattttcgagaacagaaacatttcaaaaaatcgttgaagcgtattcaaggccaacaaggatcatccgtggaaaagaaattgagtctgctttggaggttgacccacacgtatttgagaaagatgaagagaaagttttgtggagcgcctacttggaggttgctgataagatccatcctggtgttgatattaagacctttgtggatgcttctcttatcctgatacaacccctagaagatttcttcaatagtgtcttcgtgatggcggaagacgagagagttcgcaacaaccggctaacgttgctgaggaagattgagagtttgcccaaggggattgcggacctgtcagttttacctgggttttaagctgcctattccagccagggggtgtgagcaatagccgtagcggagagatgattttgattttacaagtatttctgattaaaggaaaaaaaaacgtcgtcgcagtagggcacggcaatcccagtaaacgctgtacttgtaattctgattaatacagtcaacaaacggaatcatatctcaaatcttgt

SEQ ID NO: 10033 - DNA, 3340 bp, Zea Mays
gcgacgcctccacctcctccaccgtgtccgctgccaaccaacggggctcttccgcttcctccgtcctcaccttccagcaggccatccagcgcctccaggagtactgggcctccgtaggatgcgccgtcatgcagtgtagcaacaccgaggttggagcgggcacaatgaatcctctcacatttcttagggtcttaggtcctgagccatggaatgtcgcttacgtggagccaagtataagaccagacgacagtcgctatggggacaatcccaataggcttcagcgccatactcagtttcaggtaattctgaagcctgatcctggaaattcgcaagatctctttctgcacagcctttcagcaataggtattaacatccatgaacatgacatccgcttcgttgaagacaactgggagagtccggttcttggtgcttggggactgggctgggaggtttggatggatggcatggaaatcacacagttcacatattttcagcagtcaggaagccttccattgcagccggtttctgttgaaataacatatggacttgaacgtatcctcatgtcactccaggtagttgatcacttcaagaatatactatacaccgaaggaatcacatatggagagctgttccttgagaacgagaaggagatgagtgcatattatttagaacatgcggatgtcagtcacattcaaaagcactttgacaattttgaagaagaggctcgatctttattatcactggggctgccaattccagcgtatgatcaggttctgaaggcctctcatgctttcaatatattagattctagaggttttgttggtgtaactgagcgtgcaagatattttggtcgcatgcgaagccttgctcgtcaatgtgctcagctttgggtggaaactcgagaaaaccttggacatcctttgggtgcttatgaagaggataaccttatctatcctcatgtctccaaaaaaactcatagagagtgctggtacaaccacgtgcatttgttcttgaaataggaacagaagagttgccaccccgtgacgtcgtagaagcaactgaacagcttgagaaatctctagttaatacattggagaaacgtagattgacccatgggaaagtgcacacttacgggacaccaaggagattggcgattgttgttgaaaatcttagtatgaagcaaacagaggtagaggtggaactacgtggcccaccagttgcgaaggcatttgacgaagaaggaaaccccactaaggccgctgagggattttgtcgaaagaataatgtctctgtcgatcacctatatagaagaatagatggtaaaacagaatatatctacgctagagtcagagagtctgctcgttttgctgatgaggtcctaactgaagatttacctactattgtttctggtatttcatttcccaagtcgatgcgctggaactccaatattgtttttagtcgtccaatacgctggatcctggcacttcatggcgattttgttgtgccattttattttgctggcatctcaaggtttgcattggcagtgggaatcagtcatgtggccttcgtaactcttctttggctaattttaaggtggaaactgcagaatcatatttaggtactgtggaaaaagctgggatcttgattaatatgcaggagcggaaggaaaaagtcttacatgcctctactgtattggctcaaggtgttggtggcgatttcattgcgcctgatagcttgctgcaggaggttgtcaatcttgtggaggcacctgtgcccatccttggtcgatatgatgattccttcttagaacttcctaaagatgtactgattacggttatgcagaaacatcagaagtattttgctgtaatctccaagtccactggcgatctgctaccttattttattgctgttgccaatggtgcaattagcaaggaagttgttcgcaaagggaatgaagctgttctcagggcaaggtatgaggatgccaaattcttttataagatggatacacaaaagaaattttctgaattccgaggccagcttagtggcattctttttcatgaaaaacttgggacaatgctcgataaaatgacacgtgtcgagaataccgttgctgaattggcccttattcttggaataaatgagagaacggtcccaattatcaaagatgcggctgcattggctatgtcagatcttgccacttctattgtcacagaatttacttcacttgctggaattatggcacgccattatgctttgagagacagcatccctgaagagattgcagaagcactatttgagataacactccctcggtcttcgggtgatgtgtttccaagaacagatgctggtatagttcttgcggttgctgatagattggatagcctagttggattgtttggagctggatgccagccaagttctaccaatgatccatttggacttcgaagggtctcttatggattggtccaaatattagttgagaacaaaaagagctttgacctcagacgagctctcaccttattggcaggggtgcaacccatagcaatagagagtgatgttatagatgaggcagtacagttcgtcacaaggagactggaacagcttctggtggatgagggaattaactgcgagatagtccgatcagtgcttatggagcgtgcaaactgcccttatctagcagcacaaacagcgaccgaagtaagatgttatgtgccccacacacctatccgtccccaaagattctacaaaatacaaatagtttttgtttgtgcggacacttgcagatggaagcattttcgagaacagaaacatttcaaaaaatcgttgaagcgtattcaaggccaacaaggatcatccgtggaaaagaaattgagtctgctttggaggttgacccacacgtatttgagaaagatgaagagaaagttttgtggagcgcctacttggaggttgctgataagatccatcctggtgttgatattaagacctttgtggatgcttctcttatcctgatacaacccctagaagatttcttcaatagtgtcttcgtgatggcggaagacgagagagttcgcaacaaccggctaacgttgctgaggaagattgagagtttgcccaaggggattgcggacctgtcagttttacctgggttttaagctgcctattccagccagggggtgtgagcaatagccgtagcggagagatgattttgattttacaagtatttctgattaaaggaaaaaaaaacgtcgtcgcagtagggcacggcaatcccagtaaacgctgtacttgtaattctgattaatacagtcaacaaacggaatcatatctcaaatcttgt

SEQ ID NO: 10034 - DNA, 878 bp, Zea Mays
  misc_feature (877)..(878): n is a, c, g, or t
cccggctgttggagtgggttacatattatctttccgatcgcttccctcgttatttacgttgcggctaccaaagtagcccttaataaaccccaccgccccgccacctcgcccaccatccagaaactcgaatcgtagacacgaacgactacttgagagaggagaggcggcgggagagagaagagtcgacgacgacggtaaccggccgccatggagattggtatggcaagtggactggaaactctatgcggtcaagcctatggagcaaaacagtatgataaactggggatgcacacctacagagctatagtcacactcattgctggcaaactcctgatcctcataggtcaggaccccttgatctcaagggaagctgggagatacatagtctggttgattccaggtctctatgcatatgccatcagccagcctctcacaaaatttctacagtctcagagcctgataattcctatgctttggtcctccattgcaactctgctcttgcacattcctctttgttggttactagtgttcaagaccagtatggggtacattggagcttctttggcaataagcttgtcgtattggttaaacgtgatgatgcttgccgcttacatcagatactcggattcttgtaaggagacccgctcacctccaaccgttgaggccttcaaaggagtcagtgtgtttctacgcctggctctgccgtctgcactgatgttgtggaattttaccaaatccagagctgcaaacttcagttctttcaatctgtttgacgactatcacattaatgtatactataccttatgggcttggagcggctgcaagcactagggtagcaaatgagttgggtggtggtaaccctgaaggagctcgatcnn

SEQ ID NO: 10035 - DNA, 3108 bp, Zea Mays
cacgaccactcctgtagtctagatgaaaagggagggcctgccgcctgcgcggctgcgcccggcacgcgcaaagcgaaaaagcgccggcgagcaaaggagagcgagggaatcgggttggcgtcgggtgggcagcctggcatcccattcctgccttcctccccgaagagccggacggacttcgttttctcccccctcacccacactgccactgactgcatgctctccgattccgctcccgcggtcccgaccccgcctcctccttcgtcgggctcgatgcggcggcgcctcgcgccggtgcttcttctcgccgccgcgctgctgctggcggcgcgcccgtggccagcggtgatcgcagcagattgtcctttggatttgagttggcccaactacggactgatagcttccgtgtgctcggaccaaaatggacactcaaagtgttgccgctacatcaatgctgttcttgcggtctcgtctgccatgtatgcaaacacaacaggcactcttggggttccggctcaattttctgattcctgcattgccaatatctctgatacattggtgtcaaaggggatactgcctactgccgcttcgttttgtggtcttgggatcaaaattcaagtgtcctatcagtgtgatgggatgaccaccatccttgagatgttgcagtctccgaatttcattgatatcacaagaagctgtgcaactacactttcagatgatatcacctgcaagagtgaacatatctggaccagctccaactggacttgttgcgccagatatttctcctagtccacttacggtgcaagttcctgtagtgccacccaagcatcatcgcagttacaagcttgttctgttcccagctattggagttttagtcactggtgtagcaattctactaatgatagtactgattttcctaatccgtagaaagaataaagaactcaaaaagatggaaggaaataaccctctggatgcatggagtttttcctgtgtcaagaaaggccaagaaggcaattccaccatttttggcagatttagttacaaagaaatgaagaatgcaacaaggaacttcagcacagtgttaggaggaggtgaaaatggtacagtattcagaggacaactaaatgatggatctgtggttgctatcagacgcgttgagagttcaccaaaacaaagtcacaatgaattttgtaaagaaatggaatttcttgggcggttgcatcatcgacatcttgttggactaaaagggttttgttcaacaagatttgagagatttcaggtgtatgaatacatggaaaatggaagccttcaagatcacctacattcgccaagtaaacatctgctaccatggaaaaatagggtccaaattgccatcgatgttgccaatgctctggagtaccttcatttttattgtgatcctccactataccatggagatgttaagcctagcaatgtcttcttggacaagaattaccttgcaaagcttgctggttgcggtcttgcacaccactctagtagtggcaatacaactcccagttgcacaccagtaaatgtcaaggcccaagcaactcctggctacgtagaccccgagtacatggtgacccaggagttgaccccgaagagcgacgtgtacagctacggcgtgctgttgctggagctggtgacggggaagccggtgatccaggacaacaagagtctggtggagtggtcccgcgagctgatcggcacggactaccggctccacgagctggtcgacccgtctgtggcggacgcgttcgacctggacgagttgcaggtggtggcggacgtgattcactggtgcacgcaccgggacggcgcagcgcggccgtccatgaagcaggtgctccgcatcctgtatgagcggctggacccgctgtccgggcggttcgcgcgcgccgtggagggcgaggaggggtactactactgccacggtggcgggcgggtgaaggggaagcaggcgggcgacggcgtgatccagttcagcggcgacgcggcgcggtcttggctgccgtcgtcgagcagcacgtccaggtcgcactgcagccgcagcgtgctgctggagtgcaactcgcccgagccgcagtcgtccccggcccacggcaacggagcgttcctggcttgatagcaccggtccgtcacccgtgttgcgtccgtttcatggtctgcactgcaccgcaggtctggcttgatggctctgccagctgccattttttgagaggaccttgtgataatggtagggatcgatccgtgcaccgttcatggtggttcgtgatgactgacgagtgacgactgacggatcctgctacgggatcgggagcccgtgcatggctgcatgagagtcatgtggagccagaggcagagagtgatgggagcacaactgtgctctgtgcaagaggtacactgacactgactgctgtttttcggttcgcttccctaggtgttggtggttgtttttcattgatctatgcattgatgtgcttcgggaacatggctacgcattcgaagtcgtgacagggatttcactgatactcctacttccattgttccgtactatactctgttctggcttcatcgtgggcagctgggctctggacttgtgggagagccggagaggcttgctcaagtttcctctgcgagaattttggctactgctccagttctacttgtacgtttcacttctgctttgctgatgcttgcatgatgtcacctgcttgaacgtccttgcctccttggggggtccattctcagtatctgtcaagtgagtccttggaactctgttatagactcttttgtgggccggcaatatgccaggcgccagaataattagacccagctatttgttagatggtggctgagtgttagagaagttttaggaggcttatcctccctggagcttatctccttaataatctcctaagttgttctctggagcttatctcttaataatctcctaagttgttaggccccggagctataagggtgcctcagattgtaatagggttttttatcaaaagaagtcgcacctgcgtgggcggttgcttgatcacaatggcgacccacacgcgccctggtgatcgtgttcctcag

SEQ ID NO: 10036 - DNA, 3231 bp, Zea Mays
gcgtatccctctatcccactgcgcgcccgtgagcccaacccaaccatgagtccacgaccacgaccactcctgtagtctagatgaaaagggagggcctgccgcctgcgcggctgcgcccggcacgcgcaaagcgaaaaagcgccggcgagcaaaggagagcgagggaatcgggttggcgtcgggtgggcagcctggcatcccattcctgccttcctccccgaagagccggacggacttcgttttctcccccctcacccacactgccactgactgcatgctctccgattccgctcccgcggtcccgaccccgcctcctccttcgtcgggctcgatgcggcggcgcctcgcgccggtgcttcttctcgccgccgcgctgctgctggcggcgcgcccgtggccagcggtgatcgcagcagattgtcctttggatttgagttggcccaactacggactgatagcttccgtgtgctcggaccaaaatggacactcaaagtgttgccgctacatcaatgctgttcttgcggtctcgtctgccatgtatgcaaacacaacaggcactcttggggttccggctcaattttctgattcctgcattgccaatatctctgatacattggtgtcaaaggggatactgcctactgccgcttcgttttgtggtcttgggatcaaaattcaagtgtcctatcagtgtgatgggatgaccaccatccttgagatgttgcagtctccgaatttcattgatatcacaagaagctgtgcaactacactttcagatgatatcacctgcaagaggtgcttaaactctggtctgtcgtacctccgccatcttgtcggggaacaagataatgtcaccttgaatacctgccgtgatgctgcttttgttgcactttgaacatatctggaccagctccaactggacttgttgcgccagatatttctcctagtccacttacggtgcaagttcctgtagtgccacccaagcatcatcgcagttacaagcttgttctgttcccagctattggagttttagtcactggtgtagcaattctactaatgatagtactgattttcctaatccgtagaaagaataaagaactcaaaaagatggaaggaaataaccctctggatgcatggagtttttcctgtgtcaagaaaggccaagaaggcaattccaccatttttggcagatttagttacaaagaaatgaagaatgcaacaaggaacttcagcacagtgttaggaggaggtgaaaatggtacagtattcagaggacaactaaatgatggatctgtggttgctatcagacgcgttgagagttcaccaaaacaaagtcacaatgaattttgtaaagaaatggaatttcttgggcggttgcatcatcgacatcttgttggactaaaagggttttgttcaacaagatttgagagatttcaggtgtatgaatacatggaaaatggaagccttcaagatcacctacattcgccaagtaaacatctgctaccatggaaaaatagggtccaaattgccatcgatgttgccaatgctctggagtaccttcatttttattgtgatcctccactataccatggagatgttaagcctagcaatgtcttcttggacaagaattaccttgcaaagtagtggcaatacaactcccagttgcacaccagtaaatgtcaaggcccaagcaactcctggctacgtagaccccgagtacatggtgacccaggagttgaccccgaagagcgacgtgtacagctacggcgtgctgttgctggagctggtgacggggaagccggtgatccaggacaacaagagtctggtggagtggtcccgcgagctgatcggcacggactaccggctccacgagctggtcgacccgtctgtggcggacgcgttcgacctggacgagttgcaggtggtggcggacgtgattcactggtgcacgcaccgggacggcgcagcgcggccgtccatgaagcaggtgctccgcatcctgtatgagcggctggacccgctgtccgggcggttcgcgcgcgccgtggagggcgaggaggggtactactactgccacggtggcgggcgggtgaaggggaagcaggcgggcgacggcgtgatccagttcagcggcgacgcggcgcggtcttggctgccgtcgtcgagcagcacgtccaggtcgcactgcagccgcagcgtgctgctggagtgcaactcgcccgagccgcagtcgtccccggcccacggcaacggagcgttcctggcttgatagcaccggtccgtcacccgtgttgcgtccgtttcatggtctgcactgcaccgcaggtctggcttgatggctctgccagctgccattttttgagaggaccttgtgataatggtagggatcgatccgtgcaccgttcatggtggttcgtgatgactgacgagtgacgactgacggatcctgctacgggatcgggagcccgtgcatggctgcatgagagtcatgtggagccagaggcagagagtgatgggagcacaactgtgctctgtgcaagaggtacactgacactgactgctgtttttcggttcgcttccctaggtgttggtggttgtttttcattgatctatgcattgatgtgcttcgggaacatggctacgcattcgaagtcgtgacagggatttcactgatactcctacttccattgttccgtactatactctgttctggcttcatcgtgggcagctgggctctggacttgtgggagagccggagaggcttgctcaagtttcctctgcgagaattttggctactgctccagttctacttgtacgtttcacttctgctttgctgatgcttgcatgatgtcacctgcttgaacgtccttgcctccttggggggtccattctcagtatctgtcaagtgagtccttggaactctgttatagactcttttgtgggccggcaatatgccaggcgccagaataattagacccagctatttgttagatggtggctgagtgttagagaagttttaggaggcttatcctccctggagcttatctccttaataatctcctaagttgttctctggagcttatctcttaataatctcctaagttgttaggccccggagctataagggtgcctcagattgtaatagggttttttatcaaaagaagtcgcacctgcgtgggcggttgcttgatcacaatggcgacccacacgcgccctggtgatcgtgttcctcag

SEQ ID NO: 10037 - DNA, 2786 bp, Zea Mays
ccgacgccgacggcgcgagggagcagacctaaacctccgaaactcctctccgccgccgcacctgcagcaatcatgtcgcagaagaaatcccgcagccggggcgggggaggcggcgccgccgcctccggcgacggccacgaggatctcgcccgcccgccacccctccaggcggtcctcctcgctgacagcttcacgctgaaattccgccccatcaccctcgagcgccccaaggtgctgctaccgctggtgcacatgccgatgatcgagtacacgctcacatggctggagtctgccggggtggaggaggccttcgtcttctgctgcgcgcactcgcaccaggtcaaggagtacttggagaaggccgggtggtccggtaagtccgggcccgggagcatggccgtcacggccgtcgagtcccacgatgcgattagcgctggcgacgcgctccgcgtcatctacgaccgcggcgtgatacacggagattttgttctcatcagtggtgatacagtcagtaacatgagcttgaaggacgctctccaggaacatatggatcggaagaaaaaggacccacttgctgttatgactatggttataaagcattcaaaaccttctatcttgacgcaccaaacccgtcttggtaatgatgaaattgttatggcgatagatcctgagacaaaggagttactttattatgaagacagggcagataactcacacttgcatgttacaattgataaggatatactgaccaataatcctactctccagctgcataatgatatggaggactgctacattgatatctgctctccagaagtcctaagtctttttacagataacttcgattatcagcatcttcgccgtcattttgtgaagggcttactagttgatgatgtaagacaattcactactgtttgaccacagtaagaaaaaggacatatgctgtttgcctgttctgcaacaaagagctatgataccgtgagcaaagatgtaattcaaaggtggacatatcctatggtgcctgatgtagtatccagtcgtgattcctcggagagtagacttcataggcagggaatatacaaggcatcagatgtaacattgtcaccttctgcacaaatcggtgcaaattctgttgttggtagtgtgactagtattgcaggtcactgcaaagttttaaattcagttattggacaaggctgcaagattgggaaaaatgttctgattaacggctcatttatatgggacaatgtcataattgaagatggatgcaaagttagtaactctttagtctgtgatggtgtccatctaagagctggtgctgttgttgaacctggttgtgtactgtcatttaaggttgaagttggaaagaatgttgttgttcctgcccactcaaaagtttcattacttcctcagccttcaaatgaagatagcgatgaagaacttgagtatgctgacactaactctggaattgcagatagtccaccattttccagtatgaggagtaatggtgatcaagcaactgttccttcagaagaagatgagttgggaacatccgagactggcacctgtggtgttgtcggttacatatggacaagtgttgatagtgggatcatggaagaatggagacaatcaattgcccctattcctaaagaaaagcttgaagagctgcagcatgctgtgcctgatgatgataggtcagaagatgaatccaacaatccaactctaccagataaagatgattcttcagacagtctggttgaggatgatgatcatatttctaagtttgagaaagaggtggaagagacattccaacgagctctgggtggcggcgttaatcgagataatttgatactagagattaatggcctaaggttagcctacagccttcaacatgcagattgtgctggagctgtgttctattctgtcatgaagagtgcattactggctgcacaatctagtaatgatactcttttgaagacaactgctgatgcacttggcaagtggaaggatcttttgcgcaattacaccaagacagttgatgaagagatggagatacttttaaagtttgaggaaatgtgtcaagagaccacaaaagatttttctccgctgtttccaaagatcttgccatacctctatgatacggaggtagtaagtgaagatgcaattttgagatgggcggaagagaaagaacatgctgatgagtctgataaagtttttgttaaacagtcagaggcttttattcagtggctcaaggaagcggaagaggaggatgacgaagaagaggaataaccctggagttgagctggcactcgaattctttcatgcattgtgagcgcaggatctgatttgagtgggtctctcgcaaaaatcgaaggacgatgaaaaaaccagaagggccctgggggccaaaagaagaggaaaaagccggcaggagtagcagtggaaggttgcacttgcactgctgggctaagcaatctcgctgtgcgttcgcacatcttctgcagcatgtgctgtttcgagtttataagctgcatactgtgactagtgtgcattgtttaatgttggtgatggttttactatgaccatgagaagagaaagcatgcagttttcctaatactgtttgacctttgtaatcttctggtcgtaaagagttaccgcggaatcacactggacaattcgtcgataagaggaatcgcattttggacttgggatgtgttctgtgcggataagaggaatccatctttagttctggttctgacctcacagccacgctggtcgatcgagat

SEQ ID NO: 10038 - DNA, 2793 bp, Zea Mays
gtccagccggagtccagactcgccgagccacgccgacgccgacgccgacggcgcgagggagcagacctaaacctccgaaactcctctccgccgccgcacctgcagcaatcatgtcgcagaagaaatcccgcagccggggcgggggaggcggcgccgccgcctccggcgacggccacgaggatctcgcccgcccgccacccctccaggcggtcctcctcgctgacagcttcacgctgaaattccgccccatcaccctcgagcgccccaaggtgctgctaccgctggtgcacatgccgatgatcgagtacacgctcacatggctggagtctgccggggtggaggaggccttcgtcttctgctgcgcgcactcgcaccaggtcaaggagtacttggagaaggccgggtggtccggtaagtccgggcccgggagcatggccgtcacggccgtcgagtcccacgatgcgattagcgctggcgacgcgctccgcgtcatctacgaccgcggcgtgatacacggagattttgttctcatcagtggtgatacagtcagtaacatgagcttgaaggacgctctccaggaacatatggatcggaagaaaaaggacccacttgctgttatgactatggttataaagcattcaaaaccttctatcttgacgcaccaaacccgtcttggtaatgatgaaattgttatggcgatagatcctgagacaaaggagttactttattatgaagacagggcagataactcacacttgcatgttacaattgataaggatatactgaccaataatcctactctccagctgcataatgatatggagaagtcctaagtctttttacagataacttcgattatcagcatcttcgccgtcattttgtgaagggcttactagttgatgatattatggggtacaaaatctatactcatgaattacgctctggatatgctgcaaggattgataattttaggagctatgataccgtgagcaaagatgtaattcaaaggtggacatatcctatggtgcctgatgtagtatccagtcgtgattcctcggagagtagacttcataggcagggaatatacaaggcatcagatgtaacattgtcaccttctgcacaaatcggtgcaaattctgttgttggtagtgtgactagtattgcaggtcactgcaaagttttaaattcagttattggacaaggctgcaagattgggaaaaatgttctgattaacggctcatttatatgggacaatgtcataattgaagatggatgcaaagttagtaactctttagtctgtgatggtgtccatctaagagctggtgctgttgttgaacctggttgtgtactgtcatttaaggttgaagttggaaagaatgttgttgttcctgcccactcaaaagtttcattacttcctcagccttcaaatgaagatagcgatgaagaacttgagtatgctgacactaactctggaattgcagatagtccaccattttccagtatgaggagtaatggtgatcaagcaactgttccttcagaagaagatgagttgggaacatccgagactggcacctgtggtgttgtcggttacatatggacaagtgttgatagtgggatcatggaagaatggagacaatcaattgcccctattcctaaagaaaagcttgaagagctgcagcatgctgtgcctgatgatgataggtcagaagatgaatccaacaatccaactctaccagataaagatgattcttcagacagtctggttgaggatgatgatcatatttctaagtttgagaaagaggtggaagagacattccaacgagctctgggtggcggcgttaatcgagataatttgatactagagattaatggcctaaggttagcctacagccttcaacatgcagattgtgctggagctgtgttctattctgtcatgaagagtgcattactggctgcacaatctagtaatgatactcttttgaagacaactgctgatgcacttggcaagtggaaggatcttttgcgcaattacaccaagacagttgatgaagagatggagatacttttaaagtttgaggaaatgtgtcaagagaccacaaaagatttttctccgctgtttccaaagatcttgccatacctctatgatacggaggtagtaagtgaagatgcaattttgagatgggcggaagagaaagaacatgctgatgagtctgataaagtttttgttaaacagtcagaggcttttattcagtggctcaaggaagcggaagaggaggatgacgaagaagaggaataaccctggagttgagctggcactcgaattctttcatgcattgtgagcgcaggatctgatttgagtgggtctctcgcaaaaatcgaaggacgatgaaaaaaccagaagggccctgggggccaaaagaagaggaaaaagccggcaggagtagcagtggaaggttgcacttgcactgctgggctaagcaatctcgctgtgcgttcgcacatcttctgcagcatgtgctgtttcgagtttataagctgcatactgtgactagtgtgcattgtttaatgttggtgatggttttactatgaccatgagaagagaaagcatgcagttttcctaatactgtttgacctttgtaatcttctggtcgtaaagagttaccgcggaatcacactggacaattcgtcgataagaggaatcgcattttggacttgggatgtgttctgtgcggataagaggaatccatctttagttctggttctgacctcacagccacgctggtcgatcgagat

SEQ ID NO: 10039 - DNA, 2801 bp, Zea Mays
ccgacgccgacggcgcgagggagcagacctaaacctccgaaactcctctccgccgccgcacctgcagcaatcatgtcgcagaagaaatcccgcagccggggcgggggaggcggcgccgccgcctccggcgacggccacgaggatctcgcccgcccgccacccctccaggcggtcctcctcgctgacagcttcacgctgaaattccgccccatcaccctcgagcgccccaaggtgctgctaccgctggtgcacatgccgatgatcgagtacacgctcacatggctggagtctgccggggtggaggaggccttcgtcttctgctgcgcgcactcgcaccaggtcaaggagtacttggagaaggccgggtggtccggtaagtccgggcccgggagcatggccgtcacggccgtcgagtcccacgatgcgattagcgctggcgacgcgctccgcgtcatctacgaccgcggcgtgatacacggagattttgttctcatcagtggtgatacagtcagtaacatgagcttgaaggacgctctccaggaacatatggatcggaagaaaaaggacccacttgctgttatgactatggttataaagcattcaaaaccttctatcttgacgcaccaaacccgtcttggtaatgatgaaattgttatggcgatagatcctgagacaaaggagttactttattatgaagacagggcagataactcacacttgcatgttacaattgataaggatatactgaccaataatcctactctccagctgcataatgatatggaggactgctacattgatatctgctctccagaagtcctaagtctttttacagataacttcgattatcagcatcttcgccgtcattttgtgaagggcttactagttgatgatgtaagacaattcactactgtttgaccacagtaagaaaaaggacatatgctgtttgcctgttctgcaacaaagattgataattttaggagctatgataccgtgagcaaagatgtaattcaaaggtggacatatcctatggtgcctgatgtagtatccagtcgtgattcctcggagagtagacttcataggcagggaatatacaaggcatcagatgtaacattgtcaccttctgcacaaatcggtgcaaattctgttgttggtagtgtgactagtattgcaggtcactgcaaagttttaaattcagttattggacaaggctgcaagattgggaaaaatgttctgattaacggctcatttatatgggacaatgtcataattgaagatggatgcaaagttagtaactctttagtctgtgatggtgtccatctaagagctggtgctgttgttgaacctggttgtgtactgtcatttaaggttgaagttggaaagaatgttgttgttcctgcccactcaaaagtttcattacttcctcagccttcaaatgaagatagcgatgaagaacttgagtatgctgacactaactctggaattgcagatagtccaccattttccagtatgaggagtaatggtgatcaagcaactgttccttcagaagaagatgagttgggaacatccgagactggcacctgtggtgttgtcggttacatatggacaagtgttgatagtgggatcatggaagaatggagacaatcaattgcccctattcctaaagaaaagcttgaagagctgcagcatgctgtgcctgatgatgataggtcagaagatgaatccaacaatccaactctaccagataaagatgattcttcagacagtctggttgaggatgatgatcatatttctaagtttgagaaagaggtggaagagacattccaacgagctctgggtggcggcgttaatcgagataatttgatactagagattaatggcctaaggttagcctacagccttcaacatgcagattgtgctggagctgtgttctattctgtcatgaagagtgcattactggctgcacaatctagtaatgatactcttttgaagacaactgctgatgcacttggcaagtggaaggatcttttgcgcaattacaccaagacagttgatgaagagatggagatacttttaaagtttgaggaaatgtgtcaagagaccacaaaagatttttctccgctgtttccaaagatcttgccatacctctatgatacggaggtagtaagtgaagatgcaattttgagatgggcggaagagaaagaacatgctgatgagtctgataaagtttttgttaaacagtcagaggcttttattcagtggctcaaggaagcggaagaggaggatgacgaagaagaggaataaccctggagttgagctggcactcgaattctttcatgcattgtgagcgcaggatctgatttgagtgggtctctcgcaaaaatcgaaggacgatgaaaaaaccagaagggccctgggggccaaaagaagaggaaaaagccggcaggagtagcagtggaaggttgcacttgcactgctgggctaagcaatctcgctgtgcgttcgcacatcttctgcagcatgtgctgtttcgagtttataagctgcatactgtgactagtgtgcattgtttaatgttggtgatggttttactatgaccatgagaagagaaagcatgcagttttcctaatactgtttgacctttgtaatcttctggtcgtaaagagttaccgcggaatcacactggacaattcgtcgataagaggaatcgcattttggacttgggatgtgttctgtgcggataagaggaatccatctttagttctggttctgacctcacagccacgctggtcgatcgagat

SEQ ID NO: 10040 - DNA, 1892 bp, Zea Mays
ggggcagagctggcaagtggcaaggctgcgcagagggactttttgtgtaaaatgcggtgggaaggtgcgctgcacctgcaagcagaggtgtgctctactgacagagtttgaactcaagaggaggcgaggcagaaccgcaatcgcgaccgcgacccgcaggtgacatacatacggtgcgagcgccggaagccggaagcaccggtgacgaagccttccgtgtcatcactcatcaggatctcagggttttgtttcgtttcgcgggcgttgggaatccatccatggcgaggaagatgctcatcgacggggaggtggcggccgtcgcggatggtgggcactatgactacgatctcttcgtcatcggggcgggcagcggcggcgttcgcggctctcgcaccgccgcctccttcggagctaaggttgcgatttgtgagctcccattccaccccatcagctcagagtggctaggaggacatggtgggacttgcgtgatacgtggttgcgtacctaaaaagatactcgtgtatggtgcatcattccgtggagaatttgaggattcgaagaattttgggtgggagattaacggagatattaacttcaattggaaaacgctattggaaaataagactaaagaaattgttagattaaatggtgtgtatcagaggatccttaccagtgccggtgtgacaatgattgaaggggcaggcagtctagttgatgctcatactgttgaagttagccagcctgatggttcaaagcaaaggtatacagcgaagcacattttgatcgcgactggtagccgtgctcaacgtgtcaacatacctggaaaggatctggctattacttctgatgaggccttgagcttggaggagcttccaaagcgcgctgtaatcctgggtggcggatatattgctgttgaatttgcttctatctggagggggatgggtgctgaagtagatttgttttatcgaagagatcttcctctaagaggttttgatgatgagatgagagctattgttgcaagcaaccttgagggaaggggaatcaagttgcatccagggacaaatctctctgagggcgcacaccaaactcccagagactgaacttgcaagctgcaggcgttgagattgaccgggttggagccatcaaggttgacgaatattctcgtacttctgctcctagtgtatgggctgtgggtgatgtaacaaaccggattaatttaacacctgttgcattgatggaggcaacttgctttgctaaaactgtgtttggtggccagcaagttaagcctgatcacagagatgttccttgtgctgttttctccattccaccactatctgtagtgggcctcagcgaagaacaggccttggaggaagctaatggtgatattcttgttttcatctcatcattcaacccaatgaagaacagcatatccaagcgccaggagaagactatcatgaaactggtagttgatgctgaaactgacaaagtacttggtgcatccatgtgtggaccagacgcacctgaaattatccagggcatcgctattgcggttaaatgtggagccaccaaagcagacttcgacagcactgtcggaatccacccttccgctgctgaagagttcgtgaccatgcgcaccgtgacgaggcgcttgagcccgacatccaagccaaagacgaacttgtaagcaagaaattggtattctggggaaatgttacaccggacaaatactctggtttcatcacgttggtaatttttacgtcattggaactggaaccatgtatattgaaggaataagttgtttttttcatggcaacacaccgaaaataatgagaccgtggactttcttgatacaaataatgagctcaagcagagaacgtttatggttggttctc

SEQ ID NO: 10041 - DNA, 2472 bp, Zea Mays
ctcaattcacttcatctgaaaacgtcgatgtaattgcatgaacctgctgctggttgcctggaattctggaaaagggtcgcttgcttgaattgttgaaaattggtactaccaatcagcaaaccgactgatttacacccagacatcttttctccacagcttttactttttactgctgattattccttgccttcccctttgttcaaagtgaaaatgccaaatcagttctttcttttgccctgcctccctccctctctctctgcttcagagttcagattctcgccaattggtcaccaacagccacagatatgatgaacttgagcttaaaaattagcctacacctgcctgagtggctgttttgcttcaatcagggatgcacagctttaactttcccggctccactttttcagccttttcatacgaacgtacaccgatcttttccctgtttcccttttgcatgtcaacaagtattgcctgaattaacaccacctctttttctacttacgcataccagctttctaacccatcagtgagaaccaaccattacccggcaaaagccaggatcatcttttcttgtagcaggcttgcaattggtgtttcttcacctgacctcctcacacctgtatagctttcgtcgtcttcggctaagtttagaagtgaaaacgatgaattggaacttgtacctgggatgaggttctgaatcagtcatcaaattggtgcttctctgcgccagtacaaaacacagaggacgcaggatctgtgcagtagttttttgctttgacaagaaccctcaaatcttcaagccccatcttttcaagttgttgcatacgtacctttctgaaaacctttccttgctgaattaataatgagatctgtatgtttcttgcattttttgttttcatgtatcctttccgcgcaacagtatttgttctgtttttttttgtgggtgtgggggctctttatgcttagggatgttgaacgtgaacctcttctatttaatttccagcagaaactggcctaccacatctaccttgcttgctcctggtctgctaggtgctggccatgtacaaccgcattcatgtgcagggagggcaatgtaacatgcctgagacgtaggaatttgctatttgagagacagtttcacttgctcgcggagtttgacgaggccaagcgcagctgtagaaagaggctcgatgggcacaaccggcgtcgcaggaagccgcagccagataccatgagctctgggagctttatgacgagtcaacaagggacgaggttctcgtcgttcccggttccaaggccggagccgagctggcccggagtcatcaaatccgaggacagcggctcatactacgcgcaccagcgccacccggtcctaagcagcaggccgcacttcgccggcgggggctccacgccgccggcctactcgtccaaggaaggccggcgcttcccgttcctccaggacggctgcgaccagcagcaggtcggcggcttcagcgcgggcgcgggggcgcagcagctcgaggtctcttccacgtccacggtgtgccagcccctcctcaaggccgccgccgccgccgccccaccgccgccgccagagagcagcagcagcaacaagatgttctccgacgggctcgcccccgccgtgctcgactcggattgtgctctctctcttctgtcatcccccgccaactcctccagcgtcgacgtgggccggatggtcgtccaccagcccgcggagcacatccccatggcgcagcccctcgtccccggcggcctccagcagcagcagcagcaccacccgttcggcggctcccccgcctggttcgcctgctcccaggccggctccagcgccgtctccgccggcggtttcgcctgccccccgggcgtggagagcgagcagctcaacaccgtgctggtgccgagctccgacggtggcggccacgacatgaacatgaactaccacggcatattccacgtcggcggcgacggctcctccgacgggacgtccccttcgctcccgttctcgtggcagtagctagctttccaattcaagcgtccagcagtctatcgtttcagctgtactagtggtcgttttatttatttattcgctgctccctcgctccgttttaacttgtcctgtcgtttgctcgtttcttcgttttgcatgcctgatgcatatgcggcctggaaaaaaaactcgcataaaattactgagaccgtccgtgtgtctggttctggaagcgtacctgtctccatcaaccgaatcgagacaagtttgctgcacgggcaacactgcaacaggcttgtcatttgcactaggactatagccagatcattgttgtttccttgatctttgccattcacgcatacattcgtaaccatccatctttgtcgttggtgtgccagggaggcagggagactagcgaggtcagggatctttgccattcacgcatacatttaaggatgtactgt

SEQ ID NO: 10042 - DNA, 3118 bp, Zea Mays
ggactaaaaggctatgttgatgttaatgttgatgattatcagttcacaaggacgtagctaatatattaaaaggaaaccaattattacaaagggttgtttatgataagaaaaaacatcccaacaaccaagatacatcagactctataagaaggatgatgatggtgacaatgcttttcacatagctgctgacgcagcaaaaatgatacgcgaaaacttgacttggattgctcaaatgctactacagccgtcacctgctgttgatgtgagaaaccaccgaggttggacactacgagactttcttgagaggcttccacgagaatggatttatgaagaattgatggaaatgcttgaagataaaggagttcatctctcaccaaccatatatgaggttgcggattgggtaaaatttagaagaactgttacatcaccagcttttggctggcaaggtgcaggacctagaagcattggttttgtccagtctgttgtagacaatgaccaccttgcggtgtcattttgtactggagaagcccatgttttgacaagtgaagttatcaaagttattccattaaataggggccaacatgtgcaactcaagcctgatgtttctgaaccaagatttggatggcgtggtcaatcgcgggatagcattgggacagttctctgtgttgatgatgatggaatcttgagggttggttttccaggagcttctaggggatggagagctgatcctgcagaaattgaaagggttgaagaatataaggttggtaactgggttcggattcgtccttcactaacggttgctgtgcatggcatggagtccattactcctggaagtgttgggattgtatactccatcagaccagatagcagtcttttattgggactttgctatttgtccaatccatggctgtgtgaaccggaggaggttgaacatgttgacccattcaagattggggaccaagtatgtgtaaagaggtctgttgcagagcccagatatgcatggggcggtgagactcatcacagtgttgggaaaataattgacatcgagagtgatggcctgctcatcattgatattcctaatcgggctgcaccatggcaggcagatccatcggacatggaaaagattgagaacttcaaggttggcgattggattagagtcaaagtgacagttccctcacccaaatatggatgggaggatgtgactcgaaatagtattgggataattcatagtctacaagatgatggagatgtgggtgttgctttctgctttagaagcaagctttttctttgctcagttgcagatatcgagaaggcacaaccatttgaagtaggggaaaaagttcatgtgtcaccttccatatctgagccacgcctcggctggttaaatgaaactgcagctactattggagccatatcaaggattgacatggatgggactttaaatatcaaggtttctggccgaaaaagcttatggaaggttgctcctggtgacgctgagaggctttcagcttttgaggttggagattgggtccgcccaaaaccaagtattgggagcagacctacttatgactggaatagtgttgggagaataaacattgcagtagtccatagcattcaggactctggttacttggagttagctggctgtttcaggcatgggaagtggctaacccataacacagacattgagaaagtgcagacagtaaaaattggtcagcatgttcggttccgtgctggaatttcagagcctagatggggatggagagatgcgaaccctgattctagaggcatcatcgctggtgtacatgctgatggagaagtaagggtcgccttctttggtgtgccgggattgtggagaggcgatcctgcagatcttgaaattgagaatatcttcgaggttggagagtgggttaggctgaggaacgatgtggagcagtggagatcactcaagcctggtagcattggtgtggtgcatggggtgggatatcaaggtgatgcttgggatggaaccattcatgtcgctttttgtggtgagcaggaaaggtggattgggccttctagccagcttgaaggagttagcaagtttgttgttgggcagcgtgttcgaatcagaggctgtatccgccagccaagatttggttggtccaatcatagtcattcaagcatagggacaatctcatctattgacgcagatgggaaactgaggattcatacaccagctggtgccagggcttggttgacagacccagcagaggtggaaaaagtggaggacgaggaggaagtctgtattggggactgggtgaaggttaaggactcagttggaaccccagtgtatcaatggggtgatgtgaaccacagcagtataggggtggtccaccgggctgatgatggagagctctggattgctttctgcttctgtgagaggctgtggttatgcaaagcatgggaggtggaaaaggtgaggcccttcagacaaggtgacaaagtacggatacgatctggtcttgtatcccccagatggggctgggggatggagacctacgcgagcaaaggcgaggttgtgggtgtggatgcaaacggaaagctgaggataaagtttcggtggagggatagactttggattggggacccggctgatgtcgttcttgatgatgcccatttattgacggaggcttctaatggcttttgacctttttgttcataggcttgtggtattcttttgaccccatatctcatttcttgcacccatccattttgcagcatttcaaatttagcaaaatctcaacctgcagtggagttgcaagttgcacatagttatcatcgcataggcatgcatggcagggtgtatttcttgttgataaccggggaatgagaagacagcgatagtgaaatactcctagagttgataaccaccacctaggtttttttccctttggtctacatgtataattatgccgcctgataccttttgggtttcagtgtaccatatataccagtgtacaggttcggacctgaacattaatttgattgatagtggtctactggtcttgtatgtgctgactcgttgtgcaccgagtggctggcaatgccgcgtgtaccaggagttactgcaagctgc

SEQ ID NO: 10043 - DNA, 5514 bp, Zea Mays
gtcacccgcgctgccaaaacacgcgctcgtcgcaatttgcaagcgcaggaaccaggagaaaggtcggcggagcgagcaggaagggcaacgcagcgctgcgtgttgcttgtcgtccttccttccccagcctcccaccgcatcaccaccaaccctctacctctcactttctgaaattcccacgttgctctcccgtcttccctcctcccctccccaaacccccaccccaacgcccagatctaccctccccatttacagctttctctccggccctgcgccccagggcaccgcgccgcccgaaaccgtcggcgccggcgcgatgcgcgtgccatgctgctcgttatgcaacgtcagatatgacgaggaggagcggacgccgctgctcctccactgcggccatggattctgccgcgcgtgcctctcccgcatgctagcggcagcccccggagccacgctgccgtgcccgcgatgtcgccatccgaccgccgtaggcaactcagtctctgcgctgcggaagaacttccccattctatcgctcctctccgcatccccctcatccccgtctttcctccactccgactcggggtcatcctccgacggctccgaagatgaggatgacttcttcgcacggcccactcgccgccccgcgcccgcgcccgccgccgcgtcgcccggatgcagctccttcgacctcgcctcgcacccggacctcaagctcgcccgtcgcatcgggagcggcccgcctgggcccgccgggcaggacgtgtgggtcggcacgctgtctcgtggcggcggcggggtcaagcggtgcaagcaccaggtggcagtgaagagggtgccccaaaccgcgggggatgggctcgaggttgttcaagaggaggtggagcggctgaggcgtgcctccacatggtgtcggaacgtgtgcaccttccatggtgctgtgagggtcggcggccacctctgtttcgtgatggatcattatgtcgggtctgtgcaggcggagatgcggcagaatggtggacgcctcacgctggagcagattctcaggtatggggctgatattgctcgtggagtagcagaactccatgcagcggcaattctgaagaataggagagttcctgatgactccggtgctggcattgatgctatgctgcttagtcccaattatacagctcctgaggcatggggaccactgaagaagtcactgaatatgttttgggatagtgcaaacggtatatcaccagagtcggatgcatggagttttggttgcacgctcgtggaaatgtgtactggtgctgttccatgggctggactgactgcagaggagatctgtaagtctgttgcaaaagagaagaagccaccacctcaatattcaagagtagtaggtgtaggacttcctggggagctgtggaagatgattggtgaatgtttgcagttccgagcttcaagaagaccatccttccaggacatgctgaaaattttccttcgacaccttctggacataccacggagcccacctgctagtcctgagaatgatttcgcaaatgaaaacttgcccaatggcatggaacctccaacaacctccatcctagagatggttcgttataatccaaatgccttgcatcatcttgtatgcgaaggagatgctgctggtgttagggatctacttgcgaaggttgcatcagagagaaatggtggtttcatccgttctctcttagaagcacaaaatacagatggactcactgccctacatttagcatgtcgccgaggctcggcagagcttgtggaagctattgtggcttaccaagagaatgtagatatattagataaggatgaagacccacctatagtatttgctttggctgctggctctccacgatgtgttcgtgcacttgtaggcaggtctgctagtatcaattctaggcttagagaaggcctgggtcctactcttgcccatgtctgtgctcatcatggtcaaccagagtgcatgcaagagctgctgatggctggagctgatcccaacgcagtagatggtgaaggtgaatctgtcctgcatattgccgtggccaggagatatactgattgtgctattgctatacttgaaaatggaggctgcagatcgatgggaatatcaaattctcaacataaaacgccattgcatttatgtgttgagacatggaacacgactgtggtaagaagatgggttgatgttgcatctctagaggatatagcagaagcaattgatgtacccagccctgttggtacagctttatgcatggcagcagctcttaaaaaggagcacgagaaagagggtcgagagttagtaagaatattgcttgctgctggtgctgatcctacagcacaagatgatccacactgtagaactgcattacatactgcagcaatgatcaatgacgtggagcttgttaaggagtcgatgttaatataagaaatgctcaaaatacaaccccactccatgttgcacttaatagaggtgcaaactcgtgtgttggcttgcttttagcatctggtgcaaattgcaacatacaggatgatgatggtgacaatgcttttcacatagctgctgacgcagcaaaaatgatacgcgaaaacttgacttggattgctcaaatgctactacagccgtcacctgctgttgatgtgagaaaccaccgaggttggacactacgagactttcttgagaggcttccacgagaatggatttatgaagaattgatggaaatgcttgaagataaaggagttcatctctcaccaaccatatatgaggttgcggattgggtaaaatttagaagaactgttacatcaccagcttttggctggcaaggtgcaggacctagaagcattggttttgtccagtctgttgtagacaatgaccaccttgcggtgtcattttgtactggagaagcccatgttttgacaagtgaagttatcaaagttattccattaaataggggccaacatgtgcaactcaagcctgatgtttctgaaccaagatttggatggcgtggtcaatcgcgggatagcattgggacagttctctgtgttgatgatgatggaatcttgagggttggttttccaggagcttctaggggatggagagctgatcctgcagaaattgaaagggttgaagaatataaggttggtaactgggttcggattcgtccttcactaacggttgctgtgcatggcatggagtccattactcctggaagtgttgggattgtatactccatcagaccagatagcagtcttttattgggactttgctatttgtccaatccatggctgtgtgaaccggaggaggttgaacatgttgacccattcaagattggggaccaagtatgtgtaaagaggtctgttgcagagcccagatatgcatggggcggtgagactcatcacagtgttgggaaaataattgacatcgagagtgatggcctgctcatcattgatattcctaatcgggctgcaccatggcaggcagatccatcggacatggaaaagattgagaacttcaaggttggcgattggattagagtcaaagtgacagttccctcacccaaatatggatgggaggatgtgactcgaaatagtattgggataattcatagtctacaagatgatggagatgtgggtgttgctttctgctttagaagcaagctttttctttgctcagttgcagatatcgagaaggcacaaccatttgaagtaggggaaaaagttcatgtgtcaccttccatatctgagccacgcctcggctggttaaatgaaactgcagctactattggagccatatcaaggattgacatggatgggactttaaatatcaaggtttctggccgaaaaagcttatggaaggttgctcctggtgacgctgagaggctttcagcttttgaggttggagattgggtccgcccaaaaccaagtattgggagcagacctacttatgactggaatagtgttgggagaataaacattgcagtagtccatagcattcaggactctggttacttggagttagctggctgtttcaggcatgggaagtggctaacccataacacagacattgagaaagtgcagacagtaaaaattggtcagcatgttcggttccgtgctggaatttcagagcctagatggggatggagagatgcgaaccctgattctagaggcatcatcgctggtgtacatgctgatggagaagtaagggtcgccttctttggtgtgccgggattgtggagaggcgatcctgcagatcttgaaattgagaatatcttcgaggttggagagtgggttaggctgaggaacgatgtggagcagtggagatcactcaagcctggtagcattggtgtggtgcatggggtgggatatcaaggtgatgcttgggatggaaccattcatgtcgctttttgtggtgagcaggaaaggtggattgggccttctagccagcttgaaggagttagcaagtttgttgttgggcagcgtgttcgaatcagaggctgtatccgccagccaagatttggttggtccaatcatagtcattcaagcatagggacaatctcatctattgacgcagatgggaaactgaggattcatacaccagctggtgccagggcttggttgacagacccagcagaggtggaaaaagtggaggacgaggaggaagtctgtattggggactgggtgaaggttaaggactcagttggaaccccagtgtatcaatggggtgatgtgaaccacagcagtataggggtggtccaccgggctgatgatggagagctctggattgctttctgcttctgtgagaggctgtggttatgcaaagcatgggaggtggaaaaggtgaggcccttcagacaaggtgacaaagtacggatacgatctggtcttgtatcccccagatggggctgggggatggagacctacgcgagcaaaggcgaggttgtgggtgtggatgcaaacggaaagctgaggataaagtttcggtggagggatagactttggattggggacccggctgatgtcgttcttgatgatgcccatttattgacggaggcttctaatggcttttgacctttttgttcataggcttgtggtattcttttgaccccatatctcatttcttgcacccatccattttgcagcatttcaaatttagcaaaatctcaacctgcagtggagttgcaagttgcacatagttatcatcgcataggcatgcatggcagggtgtatttcttgttgataaccggggaatgagaagacagcgatagtgaaatactcctagagttgataaccaccacctaggtttttttccctttggtctacatgtataattatgccgcctgataccttttgggtttcagtgtaccatatataccagtgtacaggttcggacctgaacattaatttgattgatagtggtctactggtcttgtatgtgctgactcgttgtgcaccgagtggctggcaatgccgcgtgtaccaggagttactgcaagctgc

SEQ ID NO: 10044 - DNA, 2034 bp, Zea Mays
gtttgcttctatttcttccctccacctcgtcccctctgcggccgcacgcgcctcctctcatggagtcatccgccgtgaggggcgacacccctcgccggccgtcggcgtttgccggggcctcgccgcctcctcccccgcccccgccgccgaggggttggctcgcgggtctcgtctccggcgccggccggatcctcgccgccgtgctcgggcccgagccctcctcttccggctccggctccattgcctcatctgcagcgtcggacggggactcgccgtcggcctcgtactcgccggcatggttcccgcctcctggcccgcacggcgagggttgcaatgacgccaccgggtaaaaaggagactgctctaaaagactacacggggtccctagcaattatctctgagattgaaccaaaggatgccataatgcaattgcttatgcaggaaacctattcaaggtccgagtgcagcaagtttataaagataattcaagagcgggttttagattcagattcaggtgatatagatgctggtgggtttgctctcactagtgctcggaaggctagcagactagccgtagatgggtactcttcatttagtccacatgaatcctcacctgcaacttctagtcttcaaatgcatggctgtgataatagtgctgctgtgggcacaattccaaaattaactcataccaaccaaagccctttcatcaacaatgctaagaacataaacccagttctcaaacgaaattactctgttagagaggatccatatggggagattcgaagagtgagaccaaagatcaatggaaattcatgggacatttcaaaattcaagcaagttgatattattcgaaatcatccagctgcaaattcacgtgaagagctcactgccaggaatccaaatgcttccagagatggaaagaaactattaaaggatattatgggagccagcaatttaacataccctaactttatttcaaaagctgaaaccgctgatgaaacatcagatgtccccgataaaccttcagctgtaaccccacaacaacatgattccagcttcccgcaagctggtaagaaacaaaaaggttttgctgctacaacacttaatcagtgttctaatgagaaaggctttgctttgaaggtggagcctttgaatgcatttattcctttcgagcagcagatgatggacctatctcacaggaagcaagagaatgctgcctgtgacgattcatgctctctctcaaaactaatgttgaaggaggatattgaggctgcacccagcctgccgacgggcattcaagtacagaatggctccaagaaccgcaggaggaggcagcccaacgtacagaagaccacggcgactccaacaaggtcgcctgcaaggggtcagcgtcgaaagaacaacgatgccatggtcaaatcggagatgggcttgattgagcagagtaaacttgtgctgacggaacaagagccagagctgggagacgttccggtgaagagacccgttgggaggcccaggaaggcgaggtaggtaacctccgacattttccaatttttttttttatatatatataggaacagaacagggcatggtgacctttcatggtctacttgtaaactaggaacggacctagctcagatgacccgggcacccctgcttcgtaggcttgagctccgtttggcttggattccggcgccttttccagtttcctgtgacttctgtacagtgcaagccatcttaacgccgccaaggttaacttatcgaaacatttggagaacctggaagcaaacggcgaagtttttccgtgtgcgttaatgtttcagagaagggagtccgagggaaaaaaaggttgccactacgcagctcatgtactgtttttttttgtaggatgtattgacatcattgtaccaaatcagctccatataatcctgtttgatagatataataccattgtatcaaatctcgagttttgataggcaaagattactagtaatcttgaagagcccgcggtcgtcagagacggcggtaattttg

SEQ ID NO: 10045 - DNA, 2053 bp, Zea Mays
cgagtccagttcaccgtccctccctgtccttgccatggccatccccaccgcccccgccctcctcttcccctccgttctccctaactcattcccccgccggacaccctggcgacacctcgtccggcggcaaccgcgtcacctccgcgcgggccgcccgcgcctgcaggcgccggcgccggctcctcccccggtggcggaggtcgcggcggagcgggacgacacgcctccgctcaggctgctcgagccgccgcaggaggacgaccccttcccgcccgagatggagcccgcggaccctgatttctaccggataggatatgcgcggatgatgcgcgcctatgggatcgagttcctcgaaggccccgacgggatgggcgtctacgcttcccgggacgtggagccacttcgcagagctagagtgagacacttcattcaacaattctcctcttgtccaagtccaaccactagctaccgatcaatttgaggtgattatggagattccgttggagctgatgctgactataactcaaaagaaaccttggatgtttttccctgacattattccactaggccatcctatatttgatgttatcgagtcaacagatccagagacagattgggatctaagattagcatgtcttcttctatatgcatttgatatagaagacaacttttggcagttatattctgattttttgccaagtgttgatgaatgcactagtttgctgctggcaccaaaggaagatctaatggaactagaagatgaagatcttgcttcacaaatgttaaaacaccaggaacgagcaattgacttttggcaaaagcattgggacaaaccaattcctctaaagctgaaacgccttgcacgtgaccatgagagatttctctgggcactgagtatagtacagtctcgttctgtcaacttgaagttgagaatgggagccttcatccaagatgcaaatgtgctagctccttatgctgatatgttgaaccactcacccaatgctaattgcttcctgcattggcgttttaaagaccgtatgcttgaagttatgattaaggctggacaagctatcaagaaaggagacgagatgacgatagattatatgagtggcgtcaacagcaaatttatggaaagatatgggttctcatcaccaacgaatccttgggagctcataaatttctcgagtcctgcaacaattcacatggattccttcttatcggtcttcaatatcgctggcttgcatgatgagctgtaccacaattctgcattgacctcagtagtagaaaccgactttgtggacggagcagtcgtagcagcagccagagcattgccgacatggtcagatggtgatgttcctgcaattcctagtgtggagagaaaatctgctcaggcactgcaagaggagtgccgccaaatgttggattcattcccaactaccatcgaacaagaccagcagatcctagattccgatgcgcatatcagcaaaacccgagaaattgcgatcaagtatcgtctgcaccggaagatgctcctacagaaaatcatggacgcactggacatatatcaggatagaattctgttctagctgtagaggcggcgctacctgtgctcatttagagcacagaacgagtgcccagttctactgctagtaaacctggggccattgtagaaaggggattttgtagggcagcctttcagttcatagcgtctgtaggttaacagcagaggatcccagaaggaaatcaacattaggataggctggttgccaggaaatatagctgctgtaagttcaagtcagcaagctgccatgtaacttgtttgcacagggcggcaatctgtcatagccacctgcatatctctcaggctcagcttcacaacaacttgcactgctgaaagaaatggcctgtgggctgtgtcctgtcacctgtgtgtgtgaaatactatccatatgattggttggccgcatcgctttgtcctgaaccactgtatgcattgattttagctgagcgcatgtttggatgcctgcacgtcgaaggcgtgggctgcacgagc

SEQ ID NO: 10046 - DNA, 1192 bp, Zea Mays
atgattaaaaataccgtggccacgctgatggtgcgcctccaccacctgcccctgccccgcgccgcgcccgctcccacctaccgttgcggccgccacctcgccctcgcgccccctctccctcggctgcgggcatcggccgccgtcatgtcaacggcggcggaacagacgatcgccgaccagaagcgcacgctgcgcgccgaggtgcgcagggcgctgaaggccctctctgccgaccagcgcgccagcgaagatctggctattcaaactacaatactggattcctcttggttcaaagcaagcaaacggttgtgcgcttatataagctgtcagcagttgcgagaagttgatacatcaaaaatactagcagagtgtctaccgtcgaatcctggacaagaggaactggcaaaggatctttatgttcctcgagtggaggataagaaccgtaacatgaggatgctcaaaatcaccaccatggatgatttagttaagaattcaatgaacattctggaaccatcgcctgtggatgctactgggaacaatcgtgaagatgtattgtcatcattgtctcctgttgatctttttttattgccgggacaagcttttgatagaactggtcgaagactggggcgtggtggagggtatgattacatagtactatgacacattcttgctgaagtaccaagaacttgcaaaagagaaagggtggaaccagcctctcttagttgctctttcgtactcggtgcaaattatggacgagggcatcatcccagtcaattcaactgatgttcctattgatgctctggtctcatcgtccggtgttattccaataagtgctgcggcgttgcagaggatgcaatgaagttgattggcctctgtagccatgctttcacaacaagcaccttcttctgatccctggttgcactagcaaatacaccagcagatcaaggaaactgtctcttttttccccctcgtggctcctctcttgtatcatcttttacgttttaacagggtgaactggacgtctacatcttattccagccacttcagatttatttttgttgaggcatctgtagacaaatcttatttaggctttgttcggttaatcctgttaccccggttaatcctgttacccatggattagacgagattagaaaaaattaagaagaagtttaacttatttgagatttaaacc

SEQ ID NO: 10047 - DNA, 1233 bp, Zea Mays
cggaggacgcgcgcccgcgccgccagggaccgggagagagggcggagccgcgccgctatgtaagggcggactgacgggtggagcaggagggccgcgtgcccacgccaaagcggaagggagaggagggtcgccgccgccgataggaaagctgctgccgccgccgccgccaccaccaaagatttaaacttgtcagcgtcatcaggtgatgaacacaccttcggcaaccgctaagacgcgttcaaggaccatagttgcatagtatttttcaaatgtcgacttgtatttgcctgttgctagccttaatgtaactgtgcaatgcgtagtgaaattttatacgtcaaaatctgatggacaaagaaaatgatagattgatttgcaatgttaccggggtgtaattttggtctagcttacgagtcagtcgagctgacttaagttgtctaacgaaccgaattgagcaagtattctaactcttattgtaacgagtcgattcgagccatctttttgtagtacggagccaccccacccccctagttacgtagtacccagcggtgcatgtgtgtatatgttggccccacgacgaccacaacgcagctctttctctcattgtttctttaatcctgcaggcttgttcatcctatgggaacagctagcgttaatctgtcgagcattggaaactggatcagagacaactctgacttgttttattgctatttgttcacattcgaaaagcttgcgaggtggtctttcaagaagaagaagaaaaaacttgtgaggtactgtagtaagtagcaactaggactctaggagtattattccatctcgttgttctgcagctagcagacttttgtagcgcacgacatgatccttctgtagtcagaaagcaaaatacaacggattctgtacttacaatctgcactagatagttgtactgaatttggagcgggaactgaatggaagatcgcatcgagcacgatcgctctgaacagcggccaaactatgctcatcttcctgtcacttcagcttatcctgtcgtgctactgctgctactggctttttttctttctttcttttctttcaacacatctcgcgaggctacatatgaaaaacggcggctttctcctcacttatctgcaagggaagtggaactaaaaaaactatgcaagccgccggatggaaaagaggtttggcatggcgtgcagtgcagatgaggagcagggaatggacatgttccaa

SEQ ID NO: 10048 - DNA, 2252 bp, Zea Mays
cttccttccttctcaccgacgaatcctccatcccgcgcagcatctcctccctccctccctccgctccgtccgcgtcgccaaaccctagtagtacgttgtacaggacaatggggccacagccaccgcttcaccttcccgccgccaacggcgacagcatcgtcgaccgcgacgtttggctcgcctgcgccgtcccgctctcccgcctccccgccgtcggtgccgaggtctactacttcccgcacggccacgccgagcagtgccccgcgcatctcccggcgccgctcccggcgccgcacctcttcccttgcaccgtcgccggcgtcagccttggcgcggacgacgagaccaacgaggtgttcgccaaaatctccctcagcccaggcccccaccgcgggcccgccgccgcttgtcgtaccgaccccaccagcgactgcccgccgcaggagctcagttacttcaccaaggagctcacgcagagcgacgccaacaacggcggcggattctccgtcccgcgctactgcgccgaccacatcttccccacgctcgacttcgacgccaacccgcccgtgcagaagcttttcatgcgcgacaccaggggcaacccgtggcagttccgccacatctaccgcggcacgccacgccgccacctgcttaccaccggctggagcaggttcgtcaacgccaagctgctcgtcgcgggggacatcgtcgtcttcatgcgccgccacaacggcgacctcatcgtcggcctgcgccgcacgcccaggtacccgctcgtcttccccagggtcgggtccggagccggggtcgacccggaccagcccccgccccgcaacgcgcgcgcgcgggtaccgccccaggacgtcattgaggccgcacgcctcgccgcggagggcaggtccttcgcggtcacctacttcccgagacaggccgccggggagttcatcgtcccgcgcgacgaggtggagggcgtgctcgccacccgctgggagccaggcgcgcaggtgcgtatgcaggtcatggaggccgaggacacgcggcgcaccgtgtgggccgacggccacgtcaagtcgctccaccaaaacatctggcgagcgctcgagatcgactgggatgattcctctccattatcaccaaatctgagcagatttgtgaatgcttggcaagtcgagcttgttacacaccctcctcttccaaatggagcgaggatctgcaacccaattgcgtctctttgccatggagatgtctcttatccactgatcggatcggaaatccaggggccaccaattcctgctagcatgcagggagccaggcacaccggcccttgtgctgcgccctctgaatcttctgcagtgctcacgaatcgggtactgttccccctgctcaacccggacctccagatgccaccgtttacaagccccagtgattcctctgagattctggatcctgaatctgcttctcctcccaacaaatcagtaaggttgcctccagcagagcttccagtccaagtgaagagcatacagctctttggcgccacaatcatggtccatgttgtgcgaagtgttgcctgtggtggttgttgtgaagaactgaatggagctcctagtggtgatgctacggctgatggcagtgtcggaaaagatgtctaaaccatgcacctgtacttgaaggtatgctttgagggatcgaccaaattaagatttgcttgcttcaatgatatgactagatttcaatgttgatggctgctatatgttgctttcaagttttattgtttggtgaatctagccaaagttcaaattcaaagaagaaacatatatatggaagaataggaaatcgaaaaaaggagcacaatctatcgaccctgctccacgtttcaccactgcctgtcactgatgtatgcatgcaatgcttttgtttgcagatgccttttaagtctgggagtgtgggtttctactaccaaagtacaagtgttggtgcatgcagagtttatctgtagctacatttagtaggctgtggggggagtattaccgttgcaagttgcaacccatggctgtagtttagttaacagaacacttcatattgttggttggttgattcaattctgggagtttggtcgtatcactttcttctgctctgctgttgcaattgcattgcgcgcaactatatgtgggtttaatttggtaatgatatgggtcaatgacccttcccccgctaattaattgtttgttgggtgtggatcagctcatgtggaa

SEQ ID NO: 10049 - DNA, 1109 bp, Zea Mays
agaaacgcgatcgtaaggtagcggcggcggcggcggcgtggcgacagcaggagtatgattggcccagttcaatcgcgcgggcgcggccaatctgcgatggacgtcgacgaagccggcggcgaggagaggcgaccgtcagagaaggagctcttccgcgccgctgagtccggcgacgccgccgcgttcgcctccctcgcccccgccgacctctccctgcgcaacgaggacggccgctccctcctccacgtcgccgccgctgccgggcatccccaggtggtgctcgcgcttgcccagtgcggtggtgacgccgcggctagcgtgctgaatgcgcaggacgaggaggggtgggcgccgatccactccgccgcgagctccggcaactctcaaatcgtcgacatcctgcttgagcgaggtgctgatgttaacctggttactgatggtggtcgaactgctcttcattatgctgcgagtaaagggaggcttaacatagctgaaaaactaatagcccatggtgctaatgtcaacaagaaagacaagtttggctgcacacctttgcatagagctgcaagcactggaaacgcggagctgtgtgaattcctcattgaggaaggtgctgaagttgatgctgttgacaagacaggacaaacacctcttacgcatgctgttatatgtgagaacaaaggggctgctcttctgctaattagacatggtgctgatgttgatgtcgaggacaaggaaggctacactgcccttggccgagcatcgaacagcttcagacctgtactcatcgatgcagccagggcaatgctcgaaggatgatctggtgctctgctcaaagacgatggaaagtgtgatacgagaaactgtgctgagtcgaggtgttaaagcttgttctggtgtgtaaacaaaggggctctctacagaatcagatttgaccctgctagaattttgcccttgttgggtttatttaaccattgtgactaacatctcataagctaagctttggttctcccttctctctttcttttatgtctgttcatgatggcgtatcaggctatcagctaacagatcggtgactgtcacacccggctttaaggaacaaagccagg

SEQ ID NO: 10050 - DNA, 1600 bp, Zea Mays
gccacaactcgaagtacgagtaactccggagtccggatggctgcagcgatggacgtcgacgaagccggcggcgaggagaggcgaccgtcagagaaggagctcttccgcgccgctgagtccggcgacgccgccgcgttcgcctccctcgcccccgccgacctctccctgcgcaacgaggacggccgctccctcctccacgtcgccgccgctgccgggcatccccaggtggtgctcgcgcttgcccagtgcggtggtgacgccgcggctagcgtgctgaatgcgcaggacgaggaggggtgggcgccgatccactccgccgcgagctccggcaactctcaaatcgtcgacatcctgcttgagcgaggtgctgatgttaacctggttactgatggtggtcgaactgctcttcattatgctgcgagtaaagggaggcttaacatagctgaaaaactaatagcccatggtgctaatgtcaacaagaaagacaaggtttgtatactttcaacaatctaaaacaatatgcaaatggacttcattggtggtaaaactcaaatccagaaaagaggtttaatgccccagctcattgacagtcagatatctatgagtttttgatgacattgaaacttggctagtgtttagtgtgagatgtatatgaatctgtaaacatggaagctttttctgccctgaagcaatgcaatgacaaggctgagatctgttgaattcttaaaatcatgaagctaatgtttgtcaatatctattttttcttgtgaaacatttagtctagcatagttcttttgtcctctatatcagtttggacaagaaaaaataaccaggtaaattttatgtggtcagatacagttgatatttgtgagactcagagatgtggtagatgccccctccccctagaaataagtttattgctgttatgcatatcgcatatgcctctgcattgtacaccatcgcacaaattgcagtaggcaaccaaactgattcgctaaactcatggatcttaaactgcttcttttcagtttggctgcacacctttgcatagagctgcaagcactggaaacgcggagctgtgtgaattcctcattgaggaaggtgctgaagttgatgctgttgacaagacaggacaaacacctcttacgcatgctgttatatgtgagaacaaaggggctgctcttctgctaattagacatggtgctgatgttgatgtcgaggacaaggaaggctacactgcccttggccgagcatcgaacagcttcagacctgtactcatcgatgcagccagggcaatgctcgaaggatgatctggtgctctgctcaaagacgatggaaagtgtgatacgagaaactgtgctgagtcgaggtgttaaagcttgttctggtgtgtaaacaaaggggctctctacagaatcagatttgaccctgctagaattttgcccttgttgggtttatttaaccattgtgactaacatctcataagctaagctttggttctcccttctctctttcttttatgtctgttcatgatggcgtatcaggctatcagctaacagatcggtgactgtcacacccggctttaaggaacaaagccagg

SEQ ID NO: 10051 - DNA, 2508 bp, Zea Mays
accaagccaaccccgcttctattccgcgtggacatatcgacaagacagccagcggcgagaagtcgacgccggcagtctggtgcaacacagcgatccagtaggtaggtcaaaccgaggcggcgacgaagtacgaacagagggcaggacgcagtcagcgcggcgcgcccaggccccgaggccgagcgatctggtgacggcacggcagcatggccgaggcgacgggccacggcggccgcgtcgtcgacctctcgggggccgagatccgcggggacctcgaggatcgcaacccgcccatcttcctccctcgccagcccgccgcgtccccgctcctcgccctcgacatcggagggactctgatcaagctggtgtacacggcgagccgcggcggaggggccgacgggacggacctgcgcttcgccaagttcgagaggcgacgcctacaggagtgcttcaacttcatccgggcggaggggctcctcgccagcaatgctggcggagaaggcgtgaccctgaaggctacaggtggtggagcatataaatttgctgacgatttcctggagaaactaggtgtttgtcttgacaagcttgatgaaatggatagtgtcgtttctggagcaaactttttgttgcagagtattcctggcgcagccttcacacacatgaatggactgaggaatccagtagatgtttccccaaataatttgtttccttaccttcttgtcaatattggctcaggagttagtatactgaaggttactggaaacagaaagtttgaaagggtaactgggacgcacattggtggtggtaccatgtttggtttagcaaaacttttaacaggctgtaagagctatgatgaattcttgcaattaagccagaaaggggacaactttgttcttgatttaattgtcaaggatatatgtggagagcttgtctgccagaagcaagggctttcaacatcaactcttgcttctagctttgggaaagttattacttctaagaagaagctgacagactacaagcctgaagaccttgcatccacattgttgagcgcctttacctataacattgcacaaattgctttccttgttgcatcacttttgggcctccgaagggttttcttcggtggatcatatatacgtggtcacaaaagcacgatggaaaatatttcttatgcaattgatttctggtcacagagccaaatgcaagcagtatttttgcgacatgaagggtatttgggagcacttggtgccctgatgagttatggggatccaagtggtgaaaatcttaccctcgaggagaaggagcctcatcacgaatcagcaccagttgatgggacatcagcggatgaagagagtgatagcaacatatttccttaccttcttgtaaatattggatcaggtgtcagcatgatagaggtaattggtaagggaaagtttgaaagaattataggatcccatctaggcggcggtactatccttggtcttgctaggcttttgactggttgttcaagttacgaagaattcctggagttgagccagaggggcaataatctgtctgtcgatttgactgtgggggacatatatggggaagaaggttatccgaagttctttttcctctgtgtcagattggccttccagcatccactactgcggctagctttggaaaagtgaactcaagcaaactttctgagtataaagtagaggatcttgctgcagccttactgaattctttcacatacaacattggacagatagcctactttgtggctaatctttcaggcctgaagagaattttcttccgaggtgcttatgtctgtggtcatgagaagactatggacaagatttctcgttccctaaaatattggtccaaaggtgaagttcagacgacatttctatgccatgaagggttcttgggaacactaggtgcattttggagttatgagaacatggggatcgacagtttggcggcacatgaagtcatcagggaagtcttgcttggtgcaccatacacagggcaattcccatctttacctgtcactcaacaacaggagaatggagaacatggtactctcgaaggggaagtagaaagcttacgacatgacaatgccttgctgaaggctgaggttgagcgattacaaaaggagaatgcgttgctaagagctaagttggtaagatcaggcgagacttcaacattgtgatttgtaacacaataaaaagggcgagccgcagcttgttgtaaattttatctgtttagaaaatggctcaaaatgtaactcatataggaaaactgaattctggaaaagaaatgccaattagcattgttcatctagtgagccttgttgtataattatttatatattctttatacaagagcctatgtatttgctccgttcatgtaatcttgttcctgtaaatgttgtataaatagttaccaaaatccagtaagtatccggctttgtaattttgtcgaaatagtagtgtatgtttccaagttccctttggaaaaaaa

SEQ ID NO: 10052 - DNA, 2555 bp, Zea Mays
accaagccaaccccgcttctattccgcgtggacatatcgacaagacagccagcggcgagaagtcgacgccggcagtctggtgcaacacagcgatccagtaggtaggtcaaaccgaggcggcgacgaagtacgaacagagggcaggacgcagtcagcgcggcgcgcccaggccccgaggccgagcgatctggtgacggcacggcagcatggccgaggcgacgggccacggcggccgcgtcgtcgacctctcgggggccgagatccgcggggacctcgaggatcgcaacccgcccatcttcctccctcgccagcccgccgcgtccccgctcctcgccctcgacatcggagggactctgatcaagctggtgtacacggcgagccgcggcggaggggccgacgggacggacctgcgcttcgccaagttcgagaggcgacgcctacaggagtgcttcaacttcatccgggcggaggggctcctcgccagcaatgctggcggagaaggcgtgaccctgaaggctacaggtggtggagcatataaatttgctgacgatttcctggagaaactaggtgtttgtcttgacaagcttgatgaaatggatagtgtcgtttctggagcaaactttttgttgcagagtattcctggcgcagccttcacacacatgaatggactgaggaatccagtagatgtttccccaaataatttgtttccttaccttcttgtcaatattggctcaggagttagtatactgaaggttactggaaacagaaagtttgaaagggtaactgggacgcacattggtggtggtaccatgtttggtttagcaaaacttttaacaggctgtaagagctatgatgaattcttgcaattaagccagaaaggggacaactttgttcttgatttaattgtcaaggatatatgtggagagcttgtctgccagaagcaagggctttcaacatcaactcttgcttctagctttgggaaagttattacttctaagaagaagctgacagactacaagcctgaagaccttgcatccacattgttgagcgcctttacctataacattgcacaaatggttcggtagaaagattcacatatgaactagttttgtgaatgggccccaacaagataggagcactattgctttccttgttgcatcacttttgggcctccgaagggttttcttcggtggatcatatatacgtggtcacaaaagcacgatggaaaatatttcttatgcaattgatttctggtcacagagccaaatgcaagcagtatttttgcgacatgaagggtatttgggagcacttggtgccctgatgagttatggggatccaagtggtgaaaatcttaccctcgaggagaaggagcctcatcacgaatcagcaccagttgatgggacatcagcggatgaagagagtgatagcaacatatttccttaccttcttgtaaatattggatcaggtgtcagcatgatagaggtaattggtaagggaaagtttgaaagaattataggatcccatctaggcggcggtactatccttggtcttgctaggcttttgactggttgttcaagttacgaagaattcctggagttgagccagaggggcaataatctgtctgtcgatttgactgtgggggacatatatggggaagaaggttatccgaagattggccttccagcatccactactgcggctagctttggaaaagtgaactcaagcaaactttctgagtataaagtagaggatcttgctgcagccttactgaattctttcacatacaacattggacagatagcctactttgtggctaatctttcaggcctgaagagaattttcttccgaggtgcttatgtctgtggtcatgagaagactatggacaagatttctcgttccctaaaatattggtccaaaggtgaagttcagacgacatttctatgccatgaagggttcttgggaacactaggtgcattttggagttatgagaacatggggatcgacagtttggcggcacatgaagtcatcagggaagtcttgcttggtgcaccatacacagggcaattcccatctttacctgtcactcaacaacaggagaatggagaacatggtactctcgaaggggaagtagaaagcttacgacatgacaatgccttgctgaaggctgaggttgagcgattacaaaaggagaatgcgttgctaagagctaagttggtaagatcaggcgagacttcaacattgtgatttgtaacacaataaaaagggcgagccgcagcttgttgtaaattttatctgtttagaaaatggctcaaaatgtaactcatataggaaaactgaattctggaaaagaaatgccaattagcattgttcatctagtgagccttgttgtataattatttatatattctttatacaagagcctatgtatttgctccgttcatgtaatcttgttcctgtaaatgttgtataaatagttaccaaaatccagtaagtatccggctttgtaattttgtcgaaatagtagtgtatgtttccaagttccctttggaaaaaaa

SEQ ID NO: 10053 - DNA, 2658 bp, Zea Mays
cggcgaccggcgggaggccaaaacaaggccggcaggccccgtcgccagcggatcctacggtcccatcccaatcgtaaatcgcgcgccgtcccgatcatcctgactcttctgtctctgcctcgtgcgctgtccgtgcccggtttttattgcgcttctattctggtctccaagccggtgacggtgaaccgatcaccacacaccaagccaaccccgcttctattccgcgtggacatatcgacaagacagccagcggcgagaagtcgacgccggcagtctggtgcaacacagcgatccagtaggtaggtcaaaccgaggcggcgacgaagtacgaacagagggcaggacgcagtcagcgcggcgcgcccaggccccgaggccgagcgatctggtgacggcacggcagcatggccgaggcgacgggccacggcggccgcgtcgtcgacctctcgggggccgagatccgcggggacctcgaggatcgcaacccgcccatcttcctccctcgccagcccgccgcgtccccgctcctcgccctcgacatcggagggactctgatcaagctggtgtacacggcgagccgcggcggaggggccgacgggacggacctgcgcttcgccaagttcgagaggcgacgcctacaggagtgcttcaacttcatccgggcggaggggctcctcgccagcaatgctggcggagaaggcgtgaccctgaaggctacaggtggtggagcatataaatttgctgacgatttcctggagaaactaggtgtttgtcttgacaagcttgatgaaatggatagtgtcgtttctggagcaaactttttgttgcagagtattcctggcgcagccttcacacacatgaatggactgaggaatccagtagatgtttccccaaataatttgtttccttaccttcttgtcaatattggctcaggagttagtatactgaaggttactggaaacagaaagtttgaaagggtaactgggacgcacattggtggtggtaccatgtttggtttagcaaaacttttaacaggctgtaagagctatgatgaattcttgcaattaagccagaaaggggacaactttgttcttgatttaattgtcaaggatatatgtggagagcttgtctgccagaagcaagggctttcaacatcaactcttgcttctagctttgggaaagttattacttctaagaagaagctgacagactacaagcctgaagaccttgcatccacattgttgagcgcctttacctataacattgcacaaattgctttccttgttgcatcacttttgggcctccgaagggttttcttcggtggatcatatatacgtggtcacaaaagcacgatggaaaatatttcttatgcaattgatttctggtcacagagccaaatgcaagcagtatttttgcgacatgaagggtatttgggagcacttggtgccctgatgagttatggggatccaagtggtgaaaatcttaccctcgaggagaaggagcctcatcacgaatcagcaccagttgatgggacatcagcggatgaagagagtgatagcaacatatttccttaccttcttgtaaatattggatcaggtgtcagcatgatagaggtaattggtaagggaaagtttgaaagaattataggatcccatctaggcggcggtactatccttggtcttgctaggcttttgactggttgttcaagttacgaagaattcctggagttgagccagaggggcaataatctgtctgtcgatttgactgtgggggacatatatggggaagaaggttatccgaagattggccttccagcatccactactgcggctagctttggaaaagtgaactcaagcaaactttctgagtataaagtagaggatcttgctgcagccttactgaattctttcacatacaacattggacaggcctgaagagaattttcttccgaggtgcttatgtctgtggtcatgagaagactatggacaagatttctcgttccctaaaatattggtccaaaggtgaagttcagacgacatttctatgccatgaagggttcttgggaacactaggtgcattttggagttatgagaacatggggatcgacagtttggcggcacatgaagtcatcagggaagtcttgcttggtgcaccatacacagggcaattcccatctttacctgtcactcaacaacaggagaatggagaacatggtactctcgaaggggaagtagaaagcttacgacatgacaatgccttgctgaaggctgaggttgagcgattacaaaaggagaatgcgttgctaagagctaagttggtaagatcaggcgagacttcaacattgtgatttgtaacacaataaaaagggcgagccgcagcttgttgtaaattttatctgtttagaaaatggctcaaaatgtaactcatataggaaaactgaattctggaaaagaaatgccaattagcattgttcatctagtgagccttgttgtataattatttatatattctttatacaagagcctatgtatttgctccgttcatgtaatcttgttcctgtaaatgttgtataaatagttaccaaaatccagtaagtatccggctttgtaattttgtcgaaatagtagtgtatgtttccaagttccctttggaaaaaaa

SEQ ID NO: 10054 - DNA, 2904 bp, Zea Mays
ccgcaggccctcgggctctctttacccatctccagtcctccaaccccaatcctctcctttccatccacgccgctgcgcttccgatgcaaccctaaccacctcatcgccggcacgatcttccccgcccccactccccggctattgcctctgattggcggctctccgggattcacgttggtccggggtacggctcctgcgattttcacgcaatggagcaagatcagagcgtggttgtcggcagcgcggactctggtgctgcggcttttggttttgcgactggcaacccccctagcttggctgtgaccggcggaagcgccgtggcccccgacggtggagctcaggcagctgatgcctctgcgtaccaggccgagcacacggcgttgaatgggactgtcggcgatatgggtaattacccatctacaggagctgcagagaacggcgaagccgtccccaacgagacgggcgagccggttcctgagctatcgtacgaagaagccgtgctttcagcagaagaggctaggttatggagtgttgttaccgcgaattccttagattttaatgcctggaccgcacttattgaggaaacagagaaaaatgctgagaacaatattttgaagatacggaaagtgtatgattcgtttcttgcggaattccctctttgctttgggtattggaagaaatatgctgaccatgaagcgagacttgatggtgtgagtaaagttatagaggtgtatgaacgagcagttctcgcagttacttattcagtggacatttggtataactattgtcagtttgcaatttcaacatatgatgattcagatatcatacgaagactgtttgaacgtggcttggcatatgttggaacagattatcattccaatattttgtgggatgagtatattaagtatgaagagtcactggaggcttggagtcatctagctgatatatatacaagagtattggagcatcccatccagcagcttgatcggtattttaattgcctcaaggaattggcttcgaagcacagtttatcagaaatacttactgcagaagaagcctcgttgtatgttgtcacatctgagaccactgctcaagcgcctgatggtgaggcacatcctgatgatgttgataagcttggtcaaccagaaatttcgtcttcaacagacgcagaaagccttgcaaagtatgtctccatgagggaagagatgtacaggaaggctaaagagtatgaatctaagatcattggttttgagctagctattagaaggccatattttcatgtcaagcctcttgacaatccagagcttgaaaattggcataactaccttgactacatcgagaaggaagaagacattaataaggttataaaattgtatgaaaggtgtgtgattgcatgtgctagttattcagaattctggatccgctatgtgcaatgtatggaggataaaaggagtctagacctagcaaacaatgccctggctcgtgctactcatgtgtttgtcaagaagcagccggagatccatctgtttagtgcgcgctttaaggagcttaatggcgatatttttggagcacgtgcagaatatcagcatctgtattcagatttatgccctggctttctagaggccattgtgaagcattctaatatggaacaccgactgggagataaagaattgtcctgttcagtttatgaaaaggtcatcgctgctgagaagggaaaggaacagagccagctcttaccaacattgcttattcagtactcccgtttcttatttttggctgtcatccatctagagtcgatttttccatgcgaaaagcgtattgaatttttagactcacttgtggagaagtttgttacacctgaatcatctcagggagagttggcaagtctagttgacaaagaagaaatatcttccatatttttagagtttttggatctctttggtgatgcaaagtcaatcaggaaggcttcaactcggcatacaactcttttttcatgtaagagaagcattctgccatcaaagaaacggaaggctgatgatgctgttgtgtcagacagggacaagtttgctaaaactgggtctgttcagtcagccacaggaactgatccaaatgcttccaatcctcctgtttggcctgcgacttctgaaacatctggacatcaatggggagcttcttatgctcagcaggctgcatatcctgcatatggaacttatgactacagccatcaaatgccacagcctgctcctcaaacagctgcctatggcgcttatcctccaacatactctgttcaggcctatacacaacaaagctacacacaacctgcagcaattccggcagcaccagtgccagcagtggtaccagcacctacaccggcgtcagcttaccctcagcaacctgcggcagctcctcaaccttattatggaacaacctactactgacaagtagagtaatcttcgatggcgatctgacgagcctgttaatcagcaggtttgtcgatacgaggtcaaaggcatcacaaaaccctctgtactgccattgtttagccccccttcagacagatgccgtcgacgagatgatcacttgagaacaaatttgagattggtatagtctgcatttttgtcgttagcatgtgtcgctagggattgctattgtttttcttgtaatagcataatctttactgtagaagaggcagcgggtgctaaccaatcctatgaacatataattaacattattcactgtttcatgccacctttcggagtgctttttttttcaaccactgatgatagcgggattcctgtcaagcacgctcactggtgaagtcctcggaacaaaattgtcaagatctgcgactacacagttcactgatttctactgtcactgtaggtcaaactatcttgatttgac

SEQ ID NO: 10055 - DNA, 3363 bp, Zea Mays
ggcttgccagccgcaggccctcgggctctctttacccatctccagtcctccaaccccaatcctctcctttccatccacgccgctgcgcttccgatgcaaccctaaccacctcatcgccggcacgatcttccccgcccccactccccggctattgcctctgattggcggctctccgggattcacgttggtccggggtacggctcctgcgattttcacgcaatggagcaagatcagagcgtggttgtcggcagcgcggactctggtgctgcggcttttggttttgcgactggcaacccccctagcttggctgtgaccggcggaagcgccgtggcccccgacggtggagctcaggcagctgatgcctctgcgtaccaggccgagcacacggcgttgaatgggactgtcggcgatatgggtaattacccatctacaggagctgcagagaacggcgaagccgtccccaacgagacgggcgagccggttcctgagctatcgtacgaagaaggtaatattgggcttgcaggctcgcctaatctggtaccctaccttctgtttgctcttaacgtcccgctttcttatgcagccgtgctttcagcagaagaggctaggttatggagtgttgttaccgcgaattccttagattttaatgcctggaccgcacttattgaggaaacagagaaaaatgctgagaacaatattttgaagatacggaaagtgtatgattcgtttcttgcggaattccctctttgctttgggtattggaagaaatatgctgaccatgaagcgagacttgatggtactgtttgaacgtggcttggcatatgttggaacagattatcattccaatattttgtgggatgagtatattaagtatgaagagtcactggaggcttggagtcatctagctgatatatatacaagagtattggagcatcccatccagcagcttgatcggtattttaattgcctcaaggaattggcttcgaagcacagtttatcagaaatacttactgcagaagaagcctcgttgtatgttgtcacatctgagaccactgctcaagcgcctgatggtgaggcacatcctgatgatgttgataagcttggtcaaccagaaatttcgtcttcaacagacgcagaaagccttgcaaagtatgtctccatgagggaagagatgtacaggaaggctaaagagtatgaatctaagatcattggttttgagctagctattagaaggccatattttcatgtcaagcctcttgacaatccagagcttgaaaattggcataactaccttgactacatcgagaaggaagaagacattaataaggtatgcttttacacttctagaaaccccttgtccttatttactagtttttattatcgaacgcttggaatcctataacttacaatccagtcttattggttccactatatcctttaacggctagtatttggacgaagcttcctttgtaatgggatattgaactgaggatagagcgtggacataatgtttggtttcgatgaggctaagtatttgcttaatgctcaccttcttaaccatctatctatcgagcaggatggtccctcctttcttatggaggggcctccgtaatcagctaatggagtaatctgtgtgaacttctctttttttgtcaataccatatccttactatcattatttaccctctttattttgtctcgtacacaagatttctgatgttatgttaaactgttttcaggttataaaattgtatgaaaggtgtgtgattgcatgtgctagttattcagaattctggatccgctatgtgcaatgtatggaggataaaaggagtctagacctagcaaacaatgccctggctcgtgctactcatgtgtttgtcaagaagcagccggagatccatctgtttagtgcgcgctttaaggagcttaatggcgatatttttggagcacgtgcagaatatcagcatctgtattcagatttatgccctggctttctagaggccattgtgaagcattctaatatggaacaccgactgggagataaagaattgtcctgttcagtttatgaaaaggtcatcgctgctgagaagggaaaggaacagagccagctcttaccaacattgcttattcagtactcccgtttcttatttttggccatcagagacttggagaaggcaagggagatattaactgtgctgcatgagcagttaaatttaacaaaaccagtgcttgaggctgtcatccatctagagtcgatttttccatgcgaaaagcgtattgaatttttagactcacttgtggagaagtttgttacacctgaatcatctcagggagagttggcaagtctagttgacaaagaagaaatatcttccatatttttagagtttttggatctctttggtgatgcaaagtcaatcaggaaggcttcaactcggcatacaactcttttttcatgtaagagaagcattctgccatcaaagaaacggaaggctgatgatgctgttgtgtcagacagggacaagtttgctaaaactgggtctgttcagtcagccacaggaactgatccaaatgcttccaatcctcctgtttggcctgcgacttctgaaacatctggacatcaatggggagcttcttatgctcagcaggctgcatatcctgcatatggaacttatgactacagccatcaaatgccacagcctgctcctcaaacagctgcctatggcgcttatcctccaacatactctgttcaggcctatacacaacaaagctacacacaacctgcagcaattccggcagcaccagtgccagcagtggtaccagcacctacaccggcgtcagcttaccctcagcaacctgcggcagctcctcaaccttattatggaacaacctactactgacaagtagagtaatcttcgatggcgatctgacgagcctgttaatcagcaggtttgtcgatacgaggtcaaaggcatcacaaaaccctctgtactgccattgtttagccccccttcagacagatgccgtcgacgagatgatcacttgagaacaaatttgagattggtatagtctgcatttttgtcgttagcatgtgtcgctagggattgctattgtttttcttgtaatagcataatctttactgtagaagaggcagcgggtgctaaccaatcctatgaacatataattaacattattcactgtttcatgccacctttcggagtgctttttttttcaaccactgatgatagcgggattcctgtcaagcacgctcactggtgaagtcctcggaacaaaattgtcaagatctgcgactacacagttcactgatttctactgtcactgtaggtcaaactatcttgatttgac

SEQ ID NO: 10056 - DNA, 1874 bp, Zea Mays
ccgctcacgagcactgaaaaactgccaaaaccgagcgaaccacacaccccttgtcaacgctgtggcggcacggcaggcgatccaaggaaagcgatgacggcgtacgaccccaaagacgacgtcgaccgcctcttcgcctgcttcaaatgcggcgtctcccctcccaagtcggccttcagggagaggccgctcccgcaggccaagaagtcgcggggctcgcccgtgtcggagactgccggtagcggtggccggagctcctccgatgtttccaccacgccggatgccgcagcggacaaggtacaacgatatggattccaaaattcgccatcattatgaggttatccaggaggcttcgccttgccacatttactttgatcttgagtttgatacaagattgaacaagaagagagacacagatgaaatggtggatatattgattgctgttgtattcagtgctttgcgtgataaatattctattgaaggacatgaagagtggatcacagagctagactcatccactgaagaaaagttttcacgccatctaatcattcgtatacccaagattgcatttaaagacaactcccatgttggtgcgtttgtctgtgaggtctgttcacaaattgcagctcagcgtacaaccaatcatgaccttgataaactttatattacaaaagaaatcagctcaggtcctgttgatcggctctttatggatactgcagtttactctcgtaatcgttgtttccgtttagttttctcatcaaagtctgggaagaaatcatttcttgtgccgaccaaacgtttcaaatgccaggaactgaatgataaagatgtctttatggagtcacttatttgtagactggatgataactgtgaaaaactgttgatatgcaaactagacttggaatgcaagaaaacattgcattttgactctgaaatcagcatgtctcaaattcaaggaaggagctacaggcaccgcattgctacatatcaaaatgatttttctcatgcatatacttgtggaaaatctccttttccacctttggatggttttatagaatccatcgcttcttttggaaatgtttcagggaaaattcgatcttggttctggttttcacaggagagtttgataatctacaacatgttacgaagcagatactgtgagaatattggaagagagcataagggcaatcatgtgttttacattgttgatttccagagagcagcatactaccaaaagtgtcatgaccctgattgtcgaggttaccgttctcccctgcgtcctgtaccttgggatgtgattcctgagctagtggagtcagaccagatagaataccagggccatgccatggaaaccaacattgaaaacagcagcatgagcggtaaatcaatcacgggggctggtgctgaggatcctgaatggtgggaacaagtggtggaatttgcggacagcatcgagaacatggatcattctttggctaccttggaagtgaaatctgacgccagcatcgagaacatggatcatgctcccagcttgtgtgcctcggaagaaaacggttgttttgaagctgaccctgagtgggtgatgcacgcggaaagagccatggagcagtacgaggaacaaagcggaggatcgcagtcacacgcaacttcccaagtctttgatctcgaggatgtttaacagtagatgctgttctaaacaatttgaacagtgacttgtaaatatacgttttatgatatattttaatctaaaaatatgtagataaataataaaaatggatattatgaatgaagcagtgagaacataatctgtatacgtgttcatgttttaacatcgtgttaacataaacaatataaaacaagaagttttaggaagt

SEQ ID NO: 10057 - DNA, 591 bp, Zea Mays
  misc_feature (591)..(591): n is a, c, g, or t
caccaccaccacagacacacacgaggttgaacggttgaacccaggtgctcacaggaacaagtgagaagcggtgatgcaagtgctactgagtattttgagcttggagcagtcatgctacggagaaaattttatccagctgctatcaaatatctgcagcaagcaattgacaaatgggacagagacgagcaagatcttgcgcaggtctacaatgccctgggggtcagctacaagcgagagaacaaacttgacaaggcgattcagcagtttcagaaggccgtggagctccagccaggctatgtgacagcttggaacaacctgggtgacgcatatgagcagcagaaggacctgaaatcggctctcaaggccttcgaggaggtcctcctctttgatcccaacaacaaggttgcaaggccacgcgtcgatgacctcaggccgcgcgtgagcatgtacaagggtgtgcctgtaaaatccgaaaagcgatagctattcttttttggtggtaaatcatgcatctgtctagtccccagaatagcggttgtttatttttgaacggtagcatttgtaaacatgatgagatgtgtagtagcatgn

SEQ ID NO: 10058 - DNA, 1141 bp, Zea Mays
  misc_feature (1141)..(1141): n is a, c, g, or t
tcttttactagttgagctaaataatctcggtatccgcacggcggcaagccaagcctatctcctatctccagcagctcctccagacctccacctctctatggcgcgcctgctcctcttcccatcccaagcgtgcgtcgatcctggccgccacctcctcctccacccgccggtctccaggccccgtgctgtccggtctgggcctcctcccgccgcgccacgccgcaccggggtcgtctctcttcccggccgttgcccaccgcccctttgctggaaccaccatccatttcttccttatcatcaaagagaggatgggtcgtttttgcttcagaaaacgtacaaggatgaaaggagaagtgggaatttgcttctgcgattcagtgcactcccatattgcactatggcttggttgagcactgctcaattagcacaatctagtgttggggaaaagctaaatatggtttatgaggtcggggagctgtttgagctgggaattcagctgtcttatctgctcatacttattggactgcttggagctggtacattttttgttatccgtcaggttcttgttcgtagggagcttgatctttctgccaaagagttgcaagaacaagtgagaagcggtgatgcaagtgctactgagtattttgagcttggagcagtcatgctacggagaaaattttatccagctgctatcaaatatctgcagcaagcaattgacaaatgggacagagacgagcaagatcttgcgcaggtctacaatgccctgggggtcagctacaagcgagagaacaaacttgacaaggcgattcagcagtttcagaaggccgtggagctccagccaggctatgtgacagcttggaacaacctgggtgacgcatatgagcagcagaaggacctgaaatcggctctcaaggccttcgaggaggtcctcctctttgatcccaacaacaaggttgcaaggccacgcgtcgatgacctcaggccgcgcgtgagcatgtacaagggtgtgcctgtaaaatccgaaaagcgatagctattcttttttggtggtaaatcatgcatctgtctagtccccagaatagcggttgtttatttttgaacggtagcatttgtaaacatgatgagatgtgtagtagcatgn

SEQ ID NO: 10059 - DNA, 1053 bp, Zea Mays
cggcgccattgccgtctctaccgaaaatccagacaaagcacgagctacgcacgcccccgctgcctcctttctgccgtcccaacgccgccggagtctgtcgccaccgtcgctgctctcccgccttcaccgcgcccaactctcgtccttgcctcccctgcgcgcttcagccgcttcactccccatcgttttcgcctggccaggatctactgggaccatggatcaagaaaaaaaactagaagtatctaataccagccatacttacaagcatcattgtagcgttggagttgacgtccacgagatctttgttaagaggagcagattgcgggttgttctgtcatacattggcattattttccttcttgtgaatgcctgccaaccattgctgacaaaggagagcctatctcttgggtctgtttggaatattacctttgctgttctggtcgccaaatgtttgcaatacaaacctgtgaagagagaatcagtagtgataatgccagcttttggaattcagctagaaatacatttttggagccaatgataaatgagtgcgtgacaccggtgacctgttactggagcttggcgctgcttctgcgtgatgaagaggaacttctgctcgttttccagagatctcgtcctcctgtcaaaatgttggttccaatatggaaagctctctgcacgttgacaaactctcaacacccaagcccttctcaaattcctaaccatgacccttgaggaacatgagttagctggggcgttgtgtagatgtacgtatcatcagaagaggcacctgcagttgagccagattcagataggaactgttgatgccaccataggacgtaaccagtgctaggggcattgattgttagggagtgatttcggctggaagtgtatacggataaacactagcaatttgtgacactgaatactctcctttacttgcatgcttcattttgttggatatctgaatgaggtgctgaatataagcaaatttaagtgaaactttggtatgtacgtaaagatgcaaacttttgttaaacaatatcttgtctcgtg

SEQ ID NO: 10060 - DNA, 982 bp, Zea Mays
cttactttttccatcaaagttaatggctggtatccagtaggggctacttctatgatgctgagcaaaaggtccgcgaagaaagtgaaaggctgcgacagaaggaacgtgagcaaattgcagagaagcgtaagcgtgatatgacgcttcgcgctcgtgtagctgctaaggcggaagaaaagaggttggagctgttgtacattcagtggactgagcaccataaaaggctgtccaatttcttaaggacaaaagctgaaccacctatttactacatgccaactaaaccaattattgacgatccagccattgttgaacagaacaaggaaaaggtattcgaagaatggaaatctatgcgcagggatgagctgactcggttccaaaagcaagttgaggagcaatatctctcaaatgtggagaggcagctggagaggatccagaatgcccggaacgctcgaaaggcgaacgggcatgctaacatgcaagaaatggacaaggagctggacacacacagggcggagcatggtccgaagactcggcgagttcctgaggagggcggtaatgatgacgacgaagacgcagaggacatggctgcggaagacgaggtgatggatgaagttctgggcatcaacgatgggatcaacgaggacccatccaagccgtccgaagaagctactactgaaggtggtgagcctgcacccgaggaagcacaataggattctttgttcacacaagctaggcacatagccgtacgtaccattccgtatgcttagttgccgtattgttgggaactgtttgtgcgtgtatttctgttagacgttccccgctggtttaggctgtgttttatattgctgttttgtctttttgaatgttgagaccatacaactgtcgatcattatctcataattgttgtaaaaatactataattgataccttgatttggacgtcggtggcgttaaacgtttcgggttctgttcttcactacccg

SEQ ID NO: 10061 - DNA, 1021 bp, Zea Mays
ctcgattctacattctagatgagaaatttcaacaagaagataaaaaactatctaactccgaggcttttctgcgtagatcagagactcagcgaaaggctgagcaaaaggtccgcgaagaaagtgaaaggctgcgacagaaggaacgtgagcaaattgcagagaagcgtaagcgtgatatgacgcttcgcgctcgtgtagctgctaaggcggaagaaaagaggttggagctgttgtacattcagtggactgagcaccataaaaggctgtccaatttcttaaggacaaaagctgaaccacctatttactacatgccaactaaaccaattattgacgatccagccattgttgaacagaacaaggaaaaggtattcgaagaatggaaatctatgcgcagggatgagctgactcggttccaaaagcaagttgaggagcaatatctctcaaatgtggagaggcagctggagaggatccagaatgcccggaacgctcgaaaggcgaacgggcatgctaacatgcaagaaatggacaaggagctggacacacacagggcggagcatggtccgaagactcggcgagttcctgaggagggcggtaatgatgacgacgaagacgcagaggacatggctgcggaagacgaggtgatggatgaagttctgggcatcaacgatgggatcaacgaggacccatccaagccgtccgaagaagctactactgaaggtggtgagcctgcacccgaggaagcacaataggattctttgttcacacaagctaggcacatagccgtacgtaccattccgtatgcttagttgccgtattgttgggaactgtttgtgcgtgtatttctgttagacgttccccgctggtttaggctgtgttttatattgctgttttgtctttttgaatgttgagaccatacaactgtcgatcattatctcataattgttgtaaaaatactataattgataccttgatttggacgtcggtggcgttaaacgtttcgggttctgttcttcactacccg

SEQ ID NO: 10062 - DNA, 1041 bp, Zea Mays
catgagttgattcctcaattttggtggaatggctccattcctcaaatttcaacaagaagataaaaaactatctaactccgaggcttttctgcgtagatcagagactcagcgaaaggctgagcaaaaggtccgcgaagaaagtgaaaggctgcgacagaaggaacgtgagcaaattgcagagaagcgtaagcgtgatatgacgcttcgcgctcgtgtagctgctaaggcggaagaaaagaggttggagctgttgtacattcagtggactgagcaccataaaaggctgtccaatttcttaaggacaaaagctgaaccacctatttactacatgccaactaaaccaattattgacgatccagccattgttgaacagaacaaggaaaaggtattcgaagaatggaaatctatgcgcagggatgagctgactcggttccaaaagcaagttgaggagcaatatctctcaaatgtggagaggcagctggagaggatccagaatgcccggaacgctcgaaaggcgaacgggcatgctaacatgcaagaaatggacaaggagctggacacacacagggcggagcatggtccgaagactcggcgagttcctgaggagggcggtaatgatgacgacgaagacgcagaggacatggctgcggaagacgaggtgatggatgaagttctgggcatcaacgatgggatcaacgaggacccatccaagccgtccgaagaagctactactgaaggtggtgagcctgcacccgaggaagcacaataggattctttgttcacacaagctaggcacatagccgtacgtaccattccgtatgcttagttgccgtattgttgggaactgtttgtgcgtgtatttctgttagacgttccccgctggtttaggctgtgttttatattgctgttttgtctttttgaatgttgagaccatacaactgtcgatcattatctcataattgttgtaaaaatactataattgataccttgatttggacgtcggtggcgttaaacgtttcgggttctgttcttcactacccg

SEQ ID NO: 10063 - DNA, 1214 bp, Zea Mays
ttggtttgaggaaccactcgattctacattctagatgagaaatttcaacaagaagataaaaaactatctaactccgaggcttttctgcgtagatcagagactcagcgaaaggctgagcaaaaggtccgcgaagaaagtgaaaggctgcgacagaaggaacgtgagcaaattgcagagaagcgtaagcgtgatatgacgcttcgcgctcgtgtagctgctaaggcggaagaaaagaggttggagctgttgtacattcagtggactgagcaccataaaaggctgtccaatttcttaaggttatttttatttctggtccaaaagtgtccatattgacaattaaattgagggaagatacattctaattatgcagacttgatgtttgataaccattagtgtatctatttacattgtatactgatgaacaatatttgttccatgtttgactctatcttattacccccttatgttggcaggacaaaagctgaaccacctatttactacatgccaactaaaccaattattgacgatccagccattgttgaacagaacaaggaaaaggtattcgaagaatggaaatctatgcgcagggatgagctgactcggttccaaaagcaagttgaggagcaatatctctcaaatgtggagaggcagctggagaggatccagaatgcccggaacgctcgaaaggcgaacgggcatgctaacatgcaagaaatggacaaggagctggacacacacagggcggagcatggtccgaagactcggcgagttcctgaggagggcggtaatgatgacgacgaagacgcagaggacatggctgcggaagacgaggtgatggatgaagttctgggcatcaacgatgggatcaacgaggacccatccaagccgtccgaagaagctactactgaaggtggtgagcctgcacccgaggaagcacaataggattctttgttcacacaagctaggcacatagccgtacgtaccattccgtatgcttagttgccgtattgttgggaactgtttgtgcgtgtatttctgttagacgttccccgctggtttaggctgtgttttatattgctgttttgtctttttgaatgttgagaccatacaactgtcgatcattatctcataattgttgtaaaaatactataattgataccttgatttggacgtcggtggcgttaaacgtttcgggttctgttcttcactacccg

SEQ ID NO: 10064 - DNA, 2155 bp, Zea Mays
taaaccttcaaccttcacccgcgcccacgaaacagattcgagtggtggaggggtgatggacggacgcacgggagacgtagccgacgaccactaccatcgctacgtgggagatctggagatcctgcagtcgctgggagtcaacgcctacagattctccatctcatgggcgagggttctaccaagaggccgggttggtggcgtcaatgcaggcggggtagctttctacaaccgcctgatcgatgcgctcctgcagaaaggtacggcaggcagtccttgtccacatctctcatgcgctagggtagttgacgggccttaatctctctctctccctctctctcttcttgctccgagtgaccgagtccgaccaaagcaagctcaccagtgagacagtacgtgaccacaacacacgtctggtttctctctttctttctgctgatggtcaggaatacagccattcgtcactctgaaccatttcgacatgccgcgcgagctggaggtccggtacggtggctggctggacgctgggatccgggaggagtacgagcactacgcggacgtctgcttcggggcgttcggcgaccgggtgcggctctggacgaccttcaacgagcccaacctgctggtcaagttccagtacatgctgggcgcgtacccgcccagccgctgctccccgccgttcggcagctgcgggagcggcgactcgcgccgggagccgtacgccgcggcgcacaacatcatcatgtcccacgccgccgccgtccgcgcctacagggagaagtaccaggcgacgcagggcggctccgtcgggatcgtggccgccatgaaatggtacgagccgctgacgaactccacggacgacatcctggccgcgcggcgcgcgcaggctttcgagacggactggtttctggagccgatattcttgggcgattaccccggagcgatgcgggagatcctgggatcggacctgccgaccttcaccgcggaggagaaggcgctgctgctgcggtacaaggcggacttcatcgggctgaaccactacacggcgatctacgccagggactgcctgcgctccccgtgcaacctcgggtcgtacgaagggaacgccttcgtctcggcgaccggggaaagggacgacggggtcaagatcgggggagatactgcgctggcaggtttcttcgacgtcccagaggccatagagctggctatccagtacgtgaacgggaggtacaagggcacgcctgtgtatattactgagaacggttactcgcagtggagtgatgccagcagggaggagctgatcgacgatgtgaggaggaagaactacctgcagggctacatcacgtatctatccaaagcagtcaggaacggagcaaacgtgcggggctacttcgtgtggacgctgctggacaacttcgagtgggcgttcggttacaggttgaagtacgggctgtaccacgtcgacttcgacacccaggagaggacgccccggatgtctgcgaggtggtaccagggcttcctcacggcccgcaccagccagcgcgacgaagcagcgcaggcacggagagcagactcgtgatgaaccactcccatttccaccgatatatatcatcgaacgcattgctagacagccgagggtctcataactcgtgctcatttccgtcctcgccatatattggaataactgtggctgtggtgtcctaatgtctgtatatgcatatatatcatatatgttgacctcaaaagaggtttagatcacacactatagcacacctgaggtcgatacatagtattgaacacagcgagaaatctagagacctgtgatagaatagtttaaattgcatgcaacaaccagttcaattcaaaagtttaagctcatagaaagatatggacaatttacctatattatattccaacactactcctcacgtcgagcctcttttgagtctcagacgtggaataaaaacgaacaacaatattatattccaacactcccatggctgatcaattgaatgttgggtactttaatctgtcttgatctttcattattgtgttgaccaaatcactctttcacaaatctccactgaagctttgcaacaaaatcctcattcaaagttataaattatagacaatagcataaatcaaagttataaattac

SEQ ID NO: 10065 - DNA, 864 bp, Zea Mays
ggatgcatatgttttcttatgcgtgtctattaatgtggtccaccgtagtttctgtgcccttagcacctcaacttgtctcatgcaagcactcacagccttgatgacactgtccgaatttttgacatcgataacttcgatgattcatgtactcttaagcatgataacaggacaggcagatggctgtccacattcaaggcaatctggagctggaatgacagcaatctatttgttgggagcatgaaaagagcaatagatgttatctcagttgatcgcagacagaagagcatctcagcttcgtacatggcatttcttgagagtgaacacatgacagccatcccatgccgctttacgctgcacccgtgcaaagttggccatctggctggtgcaagctctagtggtaaggtgtttctctggaccagagcttgaagcaggctgatcatcgactgactgggatgtcctcggcctgttgctggccctgtcctgcccaagttcctgaccacggagatcctcatctcgcggttctgtactaatgatcgttagcattatcctgcttttaatgtataagggctagtttgagaactctattttttcaagggatttctgtttttttaatagaaaatgaactaatttctattggaaaaataaaaaaaatcccttaaaaaaatgaggtggctaaactagccctaatagtttgcactgcataaccatttggtatcgtgatgcatgtggttgttcggtccagtagaattagaaattagttttctaaaccaatgttagatcaggattgttatgaaaaatgtttgataaggttgttaatttgctatgtttgaggttatatattaggttgtttggataacacgagca

SEQ ID NO: 10066 - DNA, 1751 bp, Zea Mays
atccactacattcttctcttcctccacacgaccccacccaaccaagccgcctcgaacagtttccagaatactacatcccaccaacatggcgtcgccgccgccgggtgccgggcttactgagtatgagcgccgccgcgaggagaacatccgccgcaacgagactatcctcgccgcgctccgtcgcaaggccgccgagctctctgcctccttcatccccacggcttcctctcccaagcgccccaagaagcagcatcccctcgcgagaacgaccagccccgtcgtcctccgccgctccttgcgcacccgcggcatccccgccggcgaatcctccgcttgtgacggcgctaacacctcgctaaatacgccgccgtccccgacgaagccccgcagcacacggttctcatcctccctcgcctcggccctgcgagacgccaccgccgcagagccgtcgccatcggtcaaaagctggatcggtgcgcctgacgggttcgacccctgtagggagctggtgctacggcccgtggacgtgaggaaggtggtgccgggccggatattgtccttgcgaatcctgccgctgtccgaccggactgtggtggttgccgggaacgtgcacgggcatattgggttctgggatgtggatcgtctcgtggaggatgaggatggtgatggtgtagacggggtattcgagtattttcctcacagggggtctgtagggggcattgtgatgcaccccgctatgttgcataaggatgggcaaggtaccaactacatggagtttacatgatcatagaatcaactcgatagattttcgtccagagaacccatatatatttgccacaagctcgacagatcgaacagtttgcatatgggacataagaaggatgaaaaagaagggttctgagagcttaaaagttttggaatacaacaaatccattcagtcagcttatttctcacccagtggaaatatgcttgcaacaaccagccttgatgacactgtccgaatttttgacatcgataacttcgatgattcatgtactcttaagcatgataacaggacaggcagatggctgtccacattcaaggcaatctggagctggaatgacagcaatctatttgttgggagcatgaaaagagcaatagatgttatctcagttgatcgcagacagaagagcatctcagcttcgtacatggcatttcttgagagtgaacacatgacagccatcccatgccgctttacgctgcacccgtgcaaagttggccatctggctggtgcaagctctagtggtaaggtgtttctctggaccagagcttgaagcaggctgatcatcgactgactgggatgtcctcggcctgttgctggccctgtcctgcccaagttcctgaccacggagatcctcatctcgcggttctgtactaatgatcgttagcattatcctgcttttaatgtataagggctagtttgagaactctattttttcaagggatttctgtttttttaatagaaaatgaactaatttctattggaaaaataaaaaaaatcccttaaaaaaatgaggtggctaaactagccctaatagtttgcactgcataaccatttggtatcgtgatgcatgtggttgttcggtccagtagaattagaaattagttttctaaaccaatgttagatcaggattgttatgaaaaatgtttgataaggttgttaatttgctatgtttgaggttatatattaggttgtttggataacacgagca

SEQ ID NO: 10067 - DNA, 1583 bp, Zea Mays
atggccgaactcgcccatgatggctttcccctgtcgatgctgttctctagccgccatggcagtgcctccctgcagcagtccggtgaccgggccctccccttcccacgtcatgttggtgccatgtcttctccctcaccggccaacctcgccagccaccaggaaggtgtctccctctcggcagctcccatggccaccatcagccctagctgcggttgccctggttccagcagctcgacgccagcccctctcaatcttccatcgttgccgctcagcttgtcccagatatattatcatttagctcaaatccgaatggctgacattctgtctccatcgatatttaatagtaaagcaaggttgtcacgtgattcaagagtattaatgatatacaaaagtttgctttatggcaagtcagctgggaacatgctccatcttattatcgaagcctgtatctcgagaaagttgatcgatacatctgcttatttatggcctggttatgttgtaccatctgggactttaaaagatacagctttgccccaagaatccccttggttaaactttatgaaagggtctcgacattcaggaccccttattgatgctctggtcgcatctcctgcttcaagttcaagctctgcaagatgaggtctgttcagtttggccaaaaaggcatcccctacctgaacacctacgacggctgcaccatcctctaccccgacccgctcatcaaggccaacgacaccatcaagatcgatctagagaccaacaagatcatggacttcttcaagtttgacgtcagcaacgtggtcatggtgaccggcgggaggaacaccgggcgtgtaggagtgatcaagaactgggagaagcacaagggcagcttcgagcagctggctggccccgacgcagcgcagcacgcaagagctagcggcgccggcgcggccggtgaaactgaaatccagacgcaccgctcacgcagctttgccaggcaaggcccagcagcgcagccagcagaaccaccagaggaccttcagggcgaagaagagcctgtcgtcgcccgggaacaaggcaggaacggtacgcaactgaggaggcacattgacgccactctcggcagcggcaacctgcgagaggctgtccgtctacccgtcggggaggacctcaacgagtggctggctgtcaacactgttgacttcttcaaccacataaacgttctgtacagcacgctggcggagttctgcactccacatacctgcccggtacgagtacaggtgggccgacggagagccaaggtcaaggtgcccatcaaggtgtccgcgcccaagtacgtggactacctcatggactggatagagatccagctggacgacgaggccattttccctcaacagcttggggctcctttccctaccaacttccgcgacgtcgtcgtcaagacgatcttcaggcgcctcttcagggtgtacgcgcacatataccactcccacttccagatgatcgtcaagctcaaggaggaggcgcatctcaacacttgcttcaagcactttgcgctcttcacgctgtttttcaagcctgacaagcgccccggatga

SEQ ID NO: 10068 - DNA, 1003 bp, Zea Mays
acacgtttctttatcgtaactttttcactgctccagtgaaggcacacatccgccgccgtttcttctcccatcatcttcctcgcagcgccggcgctccctctcccgctcccttccttactcgcgctcggcacacaggcggcggcgctcgggctctcagcgacggcgtcagcggcttaccctcgcgccctcgcctccggtcctccgcacaccggccggtgaccctgcgacaacattgcatctgaactgcattggatcctaagagatgatggatgagtcttttcttgataggatggtttcccaacttcggtcaacatgcaagtactacactggatatcccaaggacttagggcgatcaagaattataccattcacatctgagcgtcagtttgtgcagctattacatgaaggcaggtgcacatatacacagcatcttgataaagttctggaagaggccgcagctaaattttatccacatatcaagtttgtccgagttgagtgcccgaagtaccctgggttttgcctcacaaggcaaaggaacgaatatccatttgttgaagtattctacaacccagaacaggctgcaagcccaggaaagagcgtggatcctaacatcaccaagtattctgtaaaagtgctaccgttcaactatgaccaaagcgtgtatggatttcgagaatatttcaagaagcatggtttcaagtattctgaaacaaactagatctgttgttaaagatctgcctcgagagtagtcctagggacttgagtagcatgtggaggcagttgttgtatggagttgaaatggcgtgaggctctaatgggaggccttgactagttcattcgagaatgcctgtcatgtattcatttgtatacgggctactgctcatgcctagagatttgcttttccgtacctatgaaccattggatttggtaatgttttacctctcaaagcccggagtgagcaatttgcatcattttttcaagcactgtcgatttgagatttatt

SEQ ID NO: 10069 - DNA, 1986 bp, Zea Mays
tcgatttgaacctgccgctgcgagtccacagcgctgcgcaggcggcactgcggcaggctcttcctccctctcctctctctctgtctgagccgagggctttggcgctcccccccccccccccccccccctctctctctctctctctctcgcacgggcccgcctgcctatcccactgcccggtccaccgccgcaaactctgcccgcccgcgcgcgccccaccccgccgatcgcggtgagcccggactccgccgccgccgcttcgctctaccctgaccagccctagatctgtgcgggatccgccgccatgttctggcgcatgaccggcctctccgcggcctcgcccgtggatacaattctggacaaggagaactttacattggaagagcttcttgatgaggatgaaatcattcaggagtgcaaagcgctgaatacccgactcataaatttcttgcgagataaggcccaagtgtcgcaattacttcgttacattgtggaagaagttcctgaggattcagagaagaaacaatctttcaagtttccttttatcgcttgtgagatttttgcttgtgaaattgacattattttgagaaccttggtagaggatgttgagttaatggatttgcttttttcatttataaaacctgaccatccgcatagcacactgttagctggttacttcagtaaggtggttatatgtttgatgcttcgaaagactgctcctcttatgaattatgttcaggagcatccagatattgttgtccagcttgtcgacctcattggtatcacatcaataatggaggtgttggtgagattgattggtgctgatgaaaccatatacttgaatttcgcggatacattgcattggttagagaatacatatgtactggaaatgattgtggataaatttagctcatcagactctcctgaagtgcatgcaaatgctgctgaaattctttctgcggtaactcgatgcgcccctcctgctcttgctgcaaaaatatgcagtccaagttttgttggcaggttgtttcatcatgctcttgacgagtcaagaccaaaatctgttctggttcattcattgtcagtgtgtatatctttattggaccccaaaagactagcatcagtctcataccaagcatttagaagcaacttaactcacgggacgctggttacagccagtccagaaacagttgatggtatactggagagtctaggtgacttgctgaagttactggacattacttcttctcaaaatgtttttcctacaacttatggatgtttgtgtccgcctcttggaaaacaccgtttgaagattgtagaattcatctctgttttgctaacaattggtagcgaaatagctgagaagaagctaataagccaatcagtgataaagcattgcattgatttattttttcagtacccttataataactttttgcatcatcatgttgagaacattattgtttcttgccttgaggttaaaagaaatcaattgattgaccatattcttaatgactgtggtcttgttggtaaagtccttgccgctgaaaaaagttcttctctggcagtggagtctaatgggccaacattaccatcagaagggaaagaacctccaagaattgggaatattgggcacataactcgaatagcgaataagctcattcaatttggaaatagtaacagcatgatccagagtcacttgcaggagaacagtgagtgggctgtatggcaaatagatgtcctgatcaaacgcaatgaggtggagaatgtttaccattgggcatccgtccaacatctctacatgatcgtgggagggatagcgatgacgacgacttccgagacagagactacgatgtggcagcactcactaataatatgagccaggcatttcgatttgggatatacaggaatgatgacattgaagaggtgaactgcgcatcattatattaagaagatagaagggtccaaaatacaccaatacaagat

SEQ ID NO: 10070 - DNA, 1990 bp, Zea Mays
tcgatttgaacctgccgctgcgagtccacagcgctgcgcaggcggcactgcggcaggctcttcctccctctcctctctctctgtctgagccgagggctttggcgctcccccccccccccccccccccctctctctctctctctctctcgcacgggcccgcctgcctatcccactgcccggtccaccgccgcaaactctgcccgcccgcgcgcgccccaccccgccgatcgcggtgagcccggactccgccgccgccgcttcgctctaccctgaccagccctagatctgtgcgggatccgccgccatgttctggcgcatgaccggcctctccgcggcctcgcccgtggatacaattctggacaaggagaactttacattggaagagcttcttgatgaggatgaaatcattcaggagtgcaaagcgctgaatacccgactcataaatttcttgcgagataaggcccaagtgtcgcaattacttcgttacattgtggaagaagttcctgaggattcagagaagaaacaatctttcaagtttccttttatcgcttgtgagatttttgcttgtgaaattgacattattttgagaaccttggtagaggatgttgagttaatggatttgcttttttcatttataaaacctgaccatccgcatagcacactgttagctggttacttcagtaaggtggttatatgtttgatgcttcgaaagactgctcctcttatgaattatgttcaggagcatccagatattgttgtccagcttgtcgacctcattggtatcacatcaataatggaggtgttggtgagattgattggtgctgatgaaaccatatacttgaatttcgcggatacattgcattggttagagaatacatatgtactggaaatgattgtggataaatttagctcatcagactctcctgaagtgcatgcaaatgctgctgaaattctttctgcggtaactcgatgcgcccctcctgctcttgctgcaaaaatatgcagtccaagttttgttggcaggttgtttcatcatgctcttgacgagtcaagaccaaaatctgttctggttcattcattgtcagtgtgtatatctttattggaccccaaaagactagcatcagtctcataccaagcatttagaagcaacttaactcacgggacgctggttacagccagtccagaaacagttgatggtatactggagagtctaggtgacttgctgaagttactggacattacttcttctcaaaatgtttttcctacaacttatggatgtttgtgtccgcctcttggaaaacaccgtttgaagattgtagaattcatctctgttttgctaacaattggtagcgaaatagctgagaagaagctaataagccaatcagtgataaagcattgcattgatttattttttcagtacccttataataactttttgcatcatcatgttgagaacattattgtttcttgccttgaggttaaaagaaatcaattgattgaccatattcttaatgactgtggtcttgttggtaaagtccttgccgctgaaaaaagttcttctctggcagtggagtctaatgggccaacattaccatcagaagggaaagaacctccaagaattgggaatattgggcacataactcgaatagcgaataagctcattcaatttggaaatagtaacagcatgatccagagtcacttgcaggagaacagtgagtgggctgtatggcaaatagatgtcctgatcaaacgcaatgaggtggagaatgtttaccattgggcatgtggccgtccaacatctctacatgatcgtgggagggatagcgatgacgacgacttccgagacagagactacgatgtggcagcactcactaataatatgagccaggcatttcgatttgggatatacaggaatgatgacattgaagaggtgaactgcgcatcattatattaagaagatagaagggtccaaaatacaccaatacaagat

SEQ ID NO: 10071 - DNA, 2475 bp, Zea Mays
agagagagaaaattataccactcctctctgctgtccaaggcaggggccaggggcgggcggacagcggaggcaagaggcgcgagctcggcccaaggcgctgagggagacagccagccgctgcattgcgctactacattggccaggagggctcgccgccggggggaggctcggatctcgccgtctctggccacccgtacctgctgccgcgtgcttcacttggtgccgctttccgcgcctactggcgggcggcctcgactccagcgcggcgtgatctggcgcgcgccaccgacgccgctcgcgtggggaggcctggatcttggcgcgccgcgagaccccggggaggacggcgacggcgcgctcatcagtcgcccgcagtccgctgagctgctgccgactgcgcccggcggccgggagatctggccgacggcgcggcgctgcagatcccgtcctgcctgcgcgcgtgggcacggctcactgctgctgtggaggctgttacgcgcggtggtggtaccgatgggctacgggtacgtggaacccttcctgcccccacagcagcagcagcagcaggggggctacgggcaactgcaggcgcagctggctccgcggccgccggcttgcccgtactcgtcgtccgcctccgctccgccggtctccgcgtcctaccattcttcgcccccgccaacgtcgcctccgccgctaagcagcccacctccggcgtcccctttaccggagccatcgccgccgtcgtctccgccgccggcattgttgcctcctccgccggacgctccccctccgtcgcttcccccgtcaccgctgccacatccaaccccgtcaccgcctcaagccccgccgcccccgctgccgacggaccagccgcgcgttcagccccgcgtatacccatcaccgccaccgccgtcgcttcctcctcctcctccgccgcctcccaccgtctcgccgccatcgccgggtccatccaactctccatcgccgtcgccgtcgcctgctccagctacacaagctccagctccggctcctgcgcgtgttgctgcctattcgcctcccccgccaaaaatcgcccctcccccgccaccgcactatcgcggcaagtcgcattacacgccgcactcgcccgtgaagtcgcattcgaactcgacccatgcagctagcggcagcggcaacaacatcgagatatcgagggaagcggccaccaccatcgtagcactggccggtctcgctatgctcagctttattggcgccaccatttggttcgtcaagaaaaagcgccggcgcattgagcccccggcgacactgcctacacagcaaccagctcctccgccaccgcccaactacattccatcttcggctggatcctcactagcttcagatgggttctacttgagatcgccagggtatcctttcatgagctatcacagatgactttgcagaagagaaccttttgggggaaggtggatttgggtgcgtgttcaagggcattttgcaagatggtcgcccagttgccgtcaagaagctcaagattgggaatgggcaaggcgagctaagtgaagcatcactggattggcagacaagggttaagattgcagctggagcagctcgagggattggttacctccatgaagattgtcatccacgtattattcatagagatattaaatcatccaatattttgttggataacaacttcgaagctcaggtttctgattttggacttgcaaggttagctgccgattccaatacacatgttaccacacgtgtcatggggacatttgggtatttggctccagagtatgcattgtcaggcaagttaacagcaaagtctgatgtatattcttttggggttgttcttttggagcttattacaggaagaaaacctgttgatgcttctcagcctttgggagatgaaagtctggttgaatgggctcgtcctcttctgatgaaggcaatcgagcttcgggagtttggggaccttcctgaccccaggatgggaaacaggttcgatgaaaacgagatgttccatatgataggagctgcggctgcatgcattcggcattctgcagcaatgaggccacggatggggcaggtggttagagcactagatagtttagccgactctaatctgaacaacggcctccaacccggacgcagcgaggtgttcttagagccacagacggaggagattcgactgttccagctgagggagttcggcagccgggactgtagcgacgagctgagccaagcgagctggagaagccgaagagatttgtgaacagattcgtgaagagagttcggttcctggcattcactgacaaatattactgctagtgctagtgtctgtgtgtaaggattagggcagttcacttgtatgcttaactgaccaggcgctgcgttgggcgggcacaagtacaatgattagcggtgctaatttttattcgtggctcaattatacccaacctccgg

SEQ ID NO: 10072 - DNA, 4313 bp, Zea Mays
tctaaaaaggcggttcagcctttccgttccgcctgtcgcctctctagtttgtttaatcggatactcgtgattctgcgaaagctttgacccgtgttgtttcaacttttcaactggcgtatatccaccaaatggactttaaaggaatcatcgaaccgaggatgtgttggcccttgatgctcaagtcgcacacagcgcccgaatccgtgatcccggttctctgtcgccttaactgcctgcaatgctgaagccgttcttcttgggttccaacattatctggtcatgcttggtaccactgtgatcataccaactgcacttgttccacaaatgggaggaaacaatgaggacaaagcagtggttatccagacattgctgttcgttgcaggtatcaacaccctcctgcagagtttctttggtaccatgttgcctgcagtgatcggcgggtcatacacctttgttctgcctaccatttcgatcatccttgctggacgttatgctaatgaacctaatccacatattaaatttctccgcatcatgcgtgggacacaaggtgcgttgattgtggcttcagccttacagattatagttggcttcagtggcctttggcgtaatgttgccaggtatctgagtccactttcagctgctcctttggtggcactagttggatttggactgtatgagctaggatttccatcggtcgccaaatgtgttgagattggtctacctcaactcatccttcttgtgatctttacaatgtacctgccacatgctgttcacatgctgaagtctatcttcgatcgatttgctgtcctgttcactatccccatagtgtggctctatgcatatcttctcactgttggaggagcatacaggaatgcaccaccaaagactcaatttcattgccgcactgaccgttctggattaattggtggcgcaccctggataagagtaccatatccttttcagtggggtgctccaacttttgatgcgggtgaagctttcgcgatgatggcagcatcatttgttgctctcgtggagtccactggggccttcattgctgtctctaggtatgctagtgctacaccaatcccaccctctgttcttagccgtggtattggctggcagggcatcggtattcttctggatgggctatttgggactggaaatgggtcttctgtatcagttgaaaatgctggtttgctagctttgacacgcgttggtagccgaagggtagtgcagatatcagctggtttcatgatattcttttctattctcgggaaattcggagctgtgttcgcctcaattcctgcacccatctttgcagctatgtattgtatcttctttgcttatgccggttctgctgggatcggcttccttcagttctgtaacctcaacacctttaggaccaagttcatccttgggttctcagttttcatgggcctttctgttcctcaatacttcaatgagtacacatctattgctggttatggtcctgttcacacacattcaagatggttcaacgatatagtgaatgtgatattctcgtccaaggcgtttgttgctggcttcgtggcatatttgctggacaacactattgacaggcatgaagcttcagtcaggagagaccgaggctaccattggtgggacaaattccggtcgtacaggaccgatacaagaagcgaggagttctattccctgccattcaatctgaataagttcttcccatcggtctgagcttttgctgtggttaatgtgagatgctcttgttactctggaactgcccaccccctgttctccggcggtggcaccgtgatctggattttctcggtacatgaaaaaattactgtatattaaaacccgctcagctcgggtttcacctcctccccgtgcttcacgggaatttggcgacactccttccgacacgtgcccacatgaagctcgtctcgtccacactcccgcttgtgaaatgtggaccgctctcaccaaaccctagcttccatcccaatcccatcccacattctggccgccgcgtgcctacacgtcgtcggctagccatcggcgcctcccctcgttacctcgcctgtggatgacccatcaagtcgatagctgccctgagcgagcccctgcggccctgcctcctaccggtgacgcggcggtgcgtcaccacggcgtcgggattcgggacccaggagccactgcccgccgaggtttactaaaaccggcggggtacggtttcacttaaacaccggtttttttaaattcgttctaaattcaaaaaaatataaaattttgtaaaaaccgaaaataatcggtaaaccgttattttagactggtaaaccgtcaatttttgccggaaaaccggatttaatgtcacgtttaatgccaaatgttatatgctatatgtgaagctgaaactcgtagctcaagtcaagtttaggtatttagtggttaatttcggtttcattttttgaccaagatgaaatccgtggatcaagtagcttcagttcttctaataagtatccgtctggacaagacacgatctagaacccttagctccaattcttctgtatgtgttcctaagatttgctaatcaggagaatagttcaacacttggtgaggtgcacatgcaatacacaaacaccaaacacacatatcggtatatatttttttgctttgtgaataagtatttgtttgccgttcttattttcttgctaatgtatttcatttttttatagacctatcactataacggattggaacaatatcacgatacctccaacatgcctaagtactatcactatgactcgatctgaatatgtgagtattgaaaacaagtcgacctatgtgtcgttggctcgttggagagttgtaaaagaacttgtatttgagtattgcgaagttcgctgattgtttattgcatgagaactaaagtttatggttttcgccgttttttcccggttttctgccgataaaccggttcaaattcaaattgatttgaattggtcaaaccagccgacgtatattcaaactatggaattcaggaggacccttaaaatcaagattctggatattgcctccgctcagaggtcacgagcaagacaacattccagacttacttggatgcgattgggcgatgctaacactaagttctttcacttagcggccaataatagaagaaggaaaaatttaatcagatcgctaactcgagatgacatgctgttaatgagccaggaagacaaaatgaacgaggtacaacatcacttcggtcagattctaggcatgacaggaaggaggagcagtgctgtttgttgggaccatctggggtatgctccttttgagctagctgagctggacaacttgattgatgataataaaattaaggacgtggtcatgaggcttcaatctgaaaaggctcccgggccggatgggttcattggacagttctacaaatgctgctttgagttgatcaaaaacgatctctacatggcaataaatgattttttccatcatagatccaaaagcctgcatttggtcaacgaagcaaacatcatcctcatacccaagggggaaaatgctgacagaattgataggtttaggccgttaagcctgatcaatagcttcatgaaaattataacaaaaatcatggcaaataggcttgcgccaagaatgaatgaaattatttccaacgctcagaacgccttcatccagaaccggtcaatccatgacaactttctatacgtgcagagggtgatcatgaagctgcataaaaaaggtaatccagctctttttgtcaagcttgacatctctaaagctttcgacaccctgaattgggcatatctcttggatgtgttaagggcctgtgggttctcccagaattggcgcaattgggtagctgaaatcctgggatcgtcctcctcaagaataattttaaatgggcaacgttcaaaggcaatcaaacacagacgtggggttcggcaaggggaccctctttctcccttcctattcattttagcgatggatccgtgtcagctctcctggaatggctgaagatggagcaggggagacaacgctggaagggccacaagacagggtggtgggccgacgcactaggaagcccagctccagaatttctggtgccgaatggattcgttaaggcccgtattaaatagtggttgtaatagaataaataggagagttgagggaaaagacattcagttttggaaataacagaataccaaagctcacgctcaatcctccttcttcgtctcttcttgtctgtaatctccgttcagtgttcttcctctagtaagaacgct

SEQ ID NO: 10073 - DNA, 1608 bp, Zea Mays
acagagtaccgctgcgcgagtcgtgaccttcccgacgtgcgtgacgcctaaccaagccccgcaccgccccgcccgcccccgcccccgccccgccgcaggagacggggtcggcacggggcgatgaggagcagcgaggccatggagctcctgggcttccctccctactccaggccctccccttccgaggtgaaggctgcgtatagaagaatggtgatggagtcccatcctgatcgtgtcccaacgcatctgaaatcgcaggctgagtcaaaattcaaggaggtaagatagcagaagcatattcttgtttgaaggacggaagaagatcagggagtaggatggaagttcatgttatgcgttctggtgttccaactagccacggaagatcaaatagaacgttggttaaagccccgtttctactcataatgtttgcagcagtttcttttggcgccttcagcgcatcaagagcgtatcaacggcaaaaggaactgtgttcctctcagaacccatttctaccatagaggaagacggtgggctctgtccatgttcataggcgagaagagcttcttgctacgttgtatacagatgtaaaacaatcacaccatcctgaataaacgtgccaacctgtgccttctaactttgttgtttcagactttccaaacatgtaaaatcacttttgtattggtttcctgatttcgtctgccttgttgctactacgttcagttagctttgctttaaaactgcttcgagggcaaccagaaacacacaacagcatgtccaagcatttaacagaatcattgaccattcactcccaggcaacatggcaaccagaacaattggcaggatcagcaaccagtaagatttacaagaagcaccacaatagtttgataactgtcagcattacaggaaacatcccacagtctaagatgggagcaaagatgctgaaaggtgctttagatggaactccaaacctttcccaacggagacaagaggtaaccaaactataggtaaccttgcagccaacagcatgactgtctttaatgcagtttgcttgcatttcagactctctcgtcatgcttcaaaagtggatacacttaacttcacagccatacttgctgcaagtagaaactgggaatacaatatgaatagctcgagtcttcaatcagtagcaacagctatgaaactataccaatactacagaaaatttcctcgatgtcaactcatatttcatggaagccttttaagccatctgggtacaatgagagcagatcataaccaccagcatcaggcatcactgtactgcgtactgcctgaacaaaatgccatagtccttctgaaccgctttatgccttgattgcataatcatcttaccaccacaactattaccgataggaataaccacagccagggctacgggtggagttcttttaacattaccgatagttggcacagtgagtccaactaaaatgtaacaggttaaggctacctactgtttcactcttgctaagatatcttgtgtgtaaaactacttaatccccaacttggcaaaatgcagagcattgtgctaggtaggatacaccaggaccacaaatgttcaattgatacaagaag

SEQ ID NO: 10074 - DNA, 2855 bp, Zea Mays
acgaaacctgtgtgtgaatgtgtgatgagggcaaaaagcaagtaacccatctatctagggttggaagcttgtacatggccacctcggtggttgtggcacgcctcgcgggcgaggcctcgcagcccaaggtcctaccttctgcgaatggagtctcatccgagagctattggcgggtagctgctacgcgccgttggcagggccgcggtgtccggtgctgcgcggccggtttccgcggtgggggcgccgacgccgacgccgtgatcgccagcgaggactttgtggggttctttcgggaggcgtggccgtacatccggggccaccgtgggagcaccttcgtggtggtcatctccagcgaggtcgtgtgcgggccgcacttctaccgcgttctgcaggacatatcacttctccatggtctggggattaaatttgttcttgttccaggaacacatattcaaattgataagctgttgtcagaaagagggaagaaggccaagtatgttggtcagtacagaattactgatgaagatgcaagaaaggctgcaatggatgcagctggtagaatacgattgacaatagaagctaaactttctcctggtcctccaatgttaaatcttcgtaggcatggtgttattggacgctggcatggtcttgtggatagcattgcaagtggcaatttccttggtgctaagagaagaggggtggttaatggtattgactacggattcaccggggaagttacgaaaatagacgtttcacggataagagaaaggcttgatagtgatagcatagttgttatcagcaacatgggcttcagttcatcgggagatgtgttaaattgcaacacctacgaggttgctactgcatgtgctttagccttggaggcagataaacttatctgcgttgtagatggtcaggtatttgatgatcatggacgggccattcaatacatgtctattgaggaggctgatttgttgattagaaagcgtgctaggcaaagtgatattgctgcaagttatgtcaaggttgtggatgaggaaggcatcaattctttgcataaaggggacgacagaccatcattgagtcccaaggcttacataaatgggtatgctgcttcttttcgaaacggattgggttttaacaatggaaatggtatttattctggcgagcaagggtttgctattggtggtgaagagcggttaagcagatcaaatgctgatccttttaaaaacgggttgggttttaacaatggaaatggtatttactctggtgagcaagggttcgctattggtggtgaagagaggttaagcagatcaaatggctatctttctgagttggtcgcggcagcatatgtgtgccatggtggtgttcaaagagttcatattatagatggatgtgttgatggatcacttctattagaattgtttacgagagatggagcaggaacaatgattgctagggatgtttatgaaggaacaaggatggctacagcggaagatcttcctggcattagaaaaattattcggccgctggaggattctggtgttttggtgcggagaacagatgcacagcttcttgaagcgctagagtcattctatgttgttgaaagagatggttcaatcattgcttgtgctgctctatttccattccctgaggaacaatctggtgaagttgctgcaattgctgtatctgaagaatgccgaggaagaggtcagggggacaagttacttggtatgttctttgcttacatggataatcagaatccattctcttgattggttgttgcaacccctctaccaggttgccacaaccatttctccaacacatgcccacatgttcctgtgtgcactttctcacatgcacatacaatccctaaatattataacaagataacagaccgcctaccagtaatgtggtgttaaagtgggggttctctgttttttcagtaagcgtatcttctcacccattttaaaggggtttcagtcttgtggcatttgtactagaacaagctaagaagtcctttttttgttactcatggtggttgccattcttcagattacgtggaaaagatggcattatccctgggtctcaagaaattattcttgcttactacacgaactgcagattggtttgtgcgacgtggcttttcagagtgctcaattggatctatccctgagcagaggagaaaacgtatcaacttgtcccgtggatccaagtattacataaagcagctgtagccaaagcctgctgggattatcgccaacaattttgtcatcaggtgactcagcagcatgcacagagtttggttccacacttccacttaattaagatggtaccagccaagattacaccaatttcgcggttgcccaaaggcatataattgcacaaagaaacaaaacaccattttactgtcactgtgtttgaaagatggttgtctttgtttaagtatgtgacagaagtttgttttgccaatagaatcaaggcagagaagaaatagctgattgaattatatgtagaccctatttaacaagcaataccaaagatgaagtgctcgtacagtatcatctctggttggtgcctcattgtgtgcatcatagatgattgaacttgccttttccactcatagctgattggccttatcttttctacttttgttgagagaaaaaaaagagctagtgaaacaattggttctcttgtatcagatgtcaaagtatccttgaatgaaaacaaaaaatatgaagtgctcgtctgttatcatctctggttggtcgctcactgcgtgcatcaggaaagaataaaagataagttgcccttttctcttcgcgtgtgtgggtctgcaaaaaagaggcggattttgt

SEQ ID NO: 10075 - DNA, 1482 bp, Zea Mays
agaatattatccttgcacataacattgtttatcgcgacctcggcgggtagattcgccgccgcccacagcccacccggtcgctggggcctccccgtcgtcgccggtcgctcgacattccccgtgccggtccgcgcttccgatccccagcgcttccccgagtcgctgcgtgctcgcgtttccccgagccaagggtcgaaggtcgattcagcgccgtcctcaccggagcttgtccacgcccccttgtcccttcgcgcccgctccttcgccggagaccaccacgctgtccttgagcccgtcttctcgggaaacggcgcttcacgccctgcaagcgggacgaccccgtcccgcatctacggtgaatattcgcctgtgggacgagcccatcccacttctcctcacatccaaccaaacgccagcgagaagaggaccgtcccgtcccgttacggttcgtctctccacccctagttccccaaaccggggcatcgattcatcgaaccctgcccggagacgcgagcaatcatagacaggcatggcgatcgctcggaccggcgtgtacgtcgacgactacctcgagtactcgagcaccctggccggcgacctgcaaaggattctctccaccatgcgcgagctcgatgacagggcacatggcattatgggtcagaccaaagaacagataaagtatattctaggagtatcatcccatgggtatgacaggtcaaacatggatgatgatgagtcggagaggatgaagaaggacattgaagctagccaggacaatgctctgaatctttgcaccgagaaagtcttactggcacgccaagcttatgacctgatagagagccatataaaacgccttgatgaagacttgggccagtttgcagaagatttaaagcatgaagggaagatacctccagatgaacctacagtccttcctccagttccggtggttagcagggatgagaaaaggaggtttggttttagtacacctcaagcatcaaaaaaatttagagagagggaatgggacagggaaaggggtatggactttgatttaatgccccctccaggtagcagcaagaaagcaggtacatctatggatgtggatcaaacaattgatccaaatgaaccgacatactgtatatgccaccagatttcatatggtgacatgattgcttgtgacaatgagaattgtggaggaggtgaatggtttcattacacgtgtgtgggtcttacaccagaaacgagattcaaggggaaatggttttgcccaacgtgcaggaatcttcagtgagaggttctccaaggaaaaaatccaaatgcatggggattagtggtgcactgaagaagctacctagtctctccgtattttattgactgtcgctatggaaggcgtgtttgtcgaactttttaaaaatttaattaggtttatagaaaatagtagcaacatttgtatcttcaagtttattatgaaaatatgttcaagga

SEQ ID NO: 10076 - DNA, 1557 bp, Zea Mays
agaatattatccttgcacataacattgtttatcgcgacctcggcgggtagattcgccgccgcccacagcccacccggtcgctggggcctccccgtcgtcgccggtcgctcgacattccccgtgccggtccgcgcttccgatccccagcgcttccccgagtcgctgcgtgctcgcgtttccccgagccaagggtcgaaggtcgattcagcgccgtcctcaccggagcttgtccacgcccccttgtcccttcgcgcccgctccttcgccggagaccaccacgctgtccttgagcccgtcttctcgggaaacggcgcttcacgccctgcaagcgggacgaccccgtcccgcatctacggtgaatattcgcctgtgggacgagcccatcccacttctcctcacatccaaccaaacgccagcgagaagaggaccgtcccgtcccgttacggttcgtctctccacccctagttccccaaaccggggcatcgattcatcgaaccctgcccggagacgcgagcaatcatagacaggcatggcgatcgctcggaccggcgtgtacgtcgacgactacctcgagtactcgagcaccctggccggcgacctgcaaaggattctctccaccatgcgcgagctcgatgacagggcacatggcattatgggtcagaccaaagaacagataaagtatattctaggagtatcatcccatgggtatgacaggtcaaacatggatgatgatgagtcggagaggatgaagaaggacattgaagctagccaggacaatgctctgaatctttgcaccgagaaagtcttactggcacgccaagcttatgacctgatagagagccatataaaacgccttgatgaagacttgggccagtttgcagaagatttaaagcatgaagggaagatacctccagatgaacctacagtccttcctccagttccggtggttagcagggatgagaaaaggagcaagaaagcaggtacatctatggatgtggatcaaacaattgatccaaatgaaccgacatactgtatatgccaccagatttcatatggtgacatgattgcttgtgacaatgagaattgtggaggaggtgaatggtttcattacacgtgtgtgggtcttacaccagaaacgagattcaaggggaaatggttttgcccaacgtgcaggaatcttcagtgagaggttctccaagtagaaccaaggccattggcgagaatggaacctgctggaatgatatacaaggggtaatcgttttgctcgacatgcatgatcttcatccggaggttgttctgtgtgaagaacttgtcgcaatttggtcgctcggagttgttgcttaaagcgagtttaacattagagactcgcccttcatctcttggctgtctgtctatacttggcactgattttccttgcttggaataacttatggtcagattcacaaacgtttgtagttgtgatatgaaacgctgtgtgttcttttcgacatcgagcaatttagcattatcacgtttggaacatcgctgtcagcatttcatcatgaacagcatttccag

SEQ ID NO: 10077 - DNA, 2273 bp, Zea Mays
tctgttttccgatcccggtcgcttcacctcgtcgcgcttcctgtcgtctgctgcgtgttgtcgcaggattggattggagcatcttcccagcaccacccacgcggaagccatgaccattcagttgctccgctgacgactcctctgacgacagcacggctgcgctgacctgcaggcctctcgcccacgctgccctgacagggtaaagtcagggggtggcgtgtgtgggtgggggggggggacaatcaggtgaataatcatggacagaagagctggggcgatcctagtgttcctgctcgtcgtcctggtctgggatgtggcggcggtcgccgagaccgagcctggcagcgtgcggctagtacaggaggcgccacataggaaggtggtggaggatggggccaaggcggggagggtgccggtgtcgaccgtcgcgtggtccacgcttgccatggccgcggcgacggggttgggagcggtgcccttctttttcatggagctcgaagcgcagtgggctggcctttgcaatgggctggcggccggggtgatgctggccgccagctttgaccttgtgcaggaagggcaggtgtatggcagtgggagctgggttgtgttcggaattctgagtggaggtatatttatttggctttgtaagaagtttcttgagcaatatggagaagtaagcatgttagatataaaaggggcagatgcaagtaaagttattcttgttgttggaataatgactcttcattcttttggagaaggctctggtgtgggtgtttcctttgctggctcaaaagggttctctcagggtcttctagttactatagctatagcagtgcacaacataccagaaggcttagcagtaagcatggttctcgcgtctagaggggtgtccccccaaaaggcaatgatgtggagtatcattacatctttaccacagccaattgttgctgttcctgcattcctctgtgccgatgcattccagaaggtgcttcccttttgtactggtttcgcagcagggtgcatgatatggattgttatagcggaggttcttcctgacgcttttaaggaagcaactccatctcaagtagcttctgctggaacactcgctgttgctttcatggaaacattaagtacggtgcttctgggatttacagatggcaacaatgtggaagacgcatcaggcttcttagtatcacttgtgtttggactcggtccacttatcggtggaattatactcgtcacattctctcttgggttcagcatgccgcaccctcttctcaccggtgtcgcatccggcatagctttccgtctcgcggcatggagacctgtgcagctcctaatgacctcaaaaatgggtctcttcaccaccctcttcctcctcatcggaggttccctggcctaccacgccgccacatcaagcatcctccggttgttcaatcgcaaaaggtcttccgtgaacgtgatcgcgtcatcctccggcctctctctcagtgccctcacagtgcagtcccttcttgcctgtggcgccgtattccttcacgcatatgctgaagggcttgcgctcggtgtcgcggctcgcaaggcctatggcctcggccgctacatggttctcccagcctccctccacggtcttccacgtggcgctgccgcggcgagctgcgtgtatggtgccacagatagctggcgtggagcccttgccgctgccgctttgacagggctcgcagcgccgagcgccgccatcagtgcaatccttgcgaagatcgactatgatgggcttgactactggatggtcatagcgtgcggggctctgatccccagctttggccgcgtcttcaggcgctcactgcggttggacgtgcggaagagcgtcgttggcctgctggtaggtgttgccttcgcctccgtgtgcttgatgtcgactagattcatctgtctgcacactccttactgtaactcggctccagaagccgtcacataactttgttgctgccccgtgctgttgtaaaacacatgtaatactagtgtaatggcgatacaaaaggaggatgtggaagggttacgttgcgtcgaagagatctcttacggcgatacaacaaagggaaatggatgttgaacagaatttgcctttttcttgctgtcacttgtgtaaaattattcccaaacattgcctgaacgatagcccattcagccgttaacctcagtcccatttgatcattttctcctttgaaaaaggctcgtttttttcccagctcctgtcgccagaccgaacatat

SEQ ID NO: 10078 - DNA, 2838 bp, Zea Mays
atcgccttcaccgccacacgctgccacgcgccatatataaccagccgttccctcctctcatgctcccctttccaaatccgtctccgccctcacgcacgcggcccaactagcctaacaaaccctagctagatttagaaaaaaaatttgtccccaatccgaaccgacgaggagctcgccgccgtgagatgtccgagtacgacgagcgctaccagggcaacggcgacatgcccgcagccgaaggcggctatccgcaggccgagtacgccgccgccgccgcgcctgccgccgggggttcgccgcccgcagacagcaagccctccgggttctccgaccacgccgacggccgctcctcccagcaccagcacgagacacaatcacatgacagtggttcctcgaaatctcgagaaagggaccgagaacgcgataagggcaaggatagggagcgtgacagggatcgtggccgagaaaaggggagggaccgagacagggataaggatcgtgaaagaagtgacagagatcgcgatcgccaccacagggaccatcgagagcgcagcgagaaaagggaacaccgtgatcgttctgatgatcgtgaccgtcaccgtgatggtcgtgaccgccaccgtgatgatcgtgattctgagaggagaagagatcgtgacagagatggtcatcgtaggcatcgctcccgctccccttctaagagtcgtgaccgtgaccgcagatctagatctcgttcacgctctcgatcaaagagcaagcgcgtgagtggttttgaccaagcacctccacaacatgcacttcctattgttgctgctggtgctatccctgaaggcaaccttggcgcactttgtcacctgctgccaatggattgagctgactgctgtagctttgatgtacgaggacactatctggtttggtcagcttcctggtatcactgctcctattcccggggttggggtgcttccgaacttgtataatttggctgcaggacagttcaacccccttgttattcagccacaagccatgacacaacaggctacccggcatgctcggcgtgtctatgtgggtggacttcctccaacagctaatgagcagaccgttgccatattcttcaatggagttatggctgctattggaggaaacacagctggtccaggtgatgctgttcttaatgtctatataaaccatgacaagaaatttgcttttgtggagatgagatctgtggaggaagcaagcaatgcaatggctttagatggcataatgtttgagggagcaccagtgaaggttagaagaccaacggactataatccttccctagcagctgctcttggcccgagccagccaaatccaaatctcaatcttgctgctgttggcttaacacctggctctgctggaggattagaaggtccagaccggatctttgtaggtggtctaccatattatttcactgaggctcaagtgcgggagttgctcgagtccttcggacctctgcgtggattcgatcttgtgaaggatagagaaactggtaactcgaagggatatgccttctgtgtttaccaggatcttaatgtcaccgacattgcctgtgctgcccttaatggcatcaagatgggggacaagactcttactgttaggagggcaaaccaaggagcttctcagcctaggccagagcaagagagcatcctgctgcaggcacagcagcaggtgcaaatgcagaaactcgtataccaagtcggaggtgccctgccgacaaaagttgtctgcctgacacaggtagtgacagcagatgaactgagagacgatgaggaatacaatgacattgtggaggacatgagggaagaaggacgcaaatatgtcccacataatgccattgcagagtgttttatagtccgaccctatgcaatattggcaatcgggctttaacccacagaagacactattcttttgagtttgattaatcattatatcattagcctcttgcctatatatctctactcactaacacttggacaggtaacttggtgaaagttgtaattccacgacctgaccccagcgatgctccagttgctggtgttggaaaggtgtttttggaatatgcagatgtcgagggctcgaccaaagcaaagacggggatgcatgggcggaaatttggcgggaaccaggtggtggccgtgttctatcccgaggacaagttcgctgctgagcagtatgactgaaagttgtagaacctgttctagagttgcaacacacaatgtgtgtgttttttttaaaatctttgagggtaccgttttctcttgaatttgaatcttatctagttataagtttggtgcaggaccagtcgataagcgataagtttgtgcaggaccattaggctttgtttgggtaattagtattgatcccaatccaaatctatatatgttaatgccttgttcagttattcttattccatatggattggagtgtatcggaatgagttttgacttgctatagatttaaacaaactcaatatcatccattccacatggattgacgaagaaatgaacaagccctaaggccttgttcggttattgatattacatgtgtattggagtgtattgggtggaattgagatgaattttgacttgttatagatttaaaccggctcaatcccacccaatacatgtagattatcaccaaaacgaacaagccctaaggtggattggggtcaatactagagtacccaaactaggccttagttggagggtttgtacttgctactagggcagctaagatgaattcattcgctgtttgttctgggtccattgtttgctcaaattaacaggtgttgttatggtgctg

SEQ ID NO: 10079 - DNA, 2902 bp, Zea Mays
atcgccttcaccgccacacgctgccacgcgccatatataaccagccgttccctcctctcatgctcccctttccaaatccgtctccgccctcacgcacgcggcccaactagcctaacaaaccctagctagatttagaaaaaaaatttgtccccaatccgaaccgacgaggagctcgccgccgtgagatgtccgagtacgacgagcgctaccagggcaacggcgacatgcccgcagccgaaggcggctatccgcaggccgagtacgccgccgccgccgcgcctgccgccgggggttcgccgcccgcagacagcaagccctccgggttctccgaccacgccgacggccgctcctcccagcaccagcacgagacacaatcacatgacagtggttcctcgaaatctcgagaaagggaccgagaacgcgataagggcaaggatagggagcgtgacagggatcgtggccgagaaaaggggagggaccgagacagggataaggatcgtgaaagaagtgacagagatcgcgatcgccaccacagggaccatcgagagcgcagcgagaaaagggaacaccgtgatcgttctgatgatcgtgaccgtcaccgtgatggtcgtgaccgccaccgtgatgatcgtgattctgagaggagaagagatcgtgacagagatggtcatcgtaggcatcgctcccgctccccttctaagagtcgtgaccgtgaccgcagatctagatctcgttcacgctctcgatcaaagagcaagcgcgtgagtggttttgaccaagcacctccacaacatgcacttcctattgttgctgctggtgctatccctggcaaccttggcgcactttgtcacctgctgccaatggattgagctgactgctgtagctttgatgtcagcttcctggtatcactgctcctattcccggggttggggtgcttccgaacttgtataatttggctgcaggacagttcaacccccttgttattcagccacaagccatgacacaacaggctacccggcatgctcggcgtgtctatgtgggtggacttcctccaacagctaatgagcagaccgttgccatattcttcaatggagttatggctgctattggaggaaacacagctggtccaggtgatgctgttcttaatgtctatataaaccatgacaagaaatttgcttttgtggagatgagatctgtggaggaagcaagcaatgcaatggctttagatggcataatgtttgagggagcaccagtgaaggttagaagaccaacggactataatccttccctagcagctgctcttggcccgagccagccaaatccaaatctcaatcttgctgctgttggcttaacacctggctctgctggaggattagaaggtccagaccggatctttgtaggtggtctaccatattatttcactgaggctcaagtgcgggagttgctcgagtccttcggacctctgcgtggattcgatcttgtgaaggatagagaaactggtaactcgaagggatatgccttctgtgtttaccaggatcttaatgtcaccgacattgcctgtgctgcccttaatggcatcaagatgggggacaagactcttactgttaggagggcaaaccaaggagcttctcagcctaggccagagcaagagagcatcctgctgcaggcacagcagcaggtgcaaatgcaggtagtgacagcagatgaactgagagacgatgaggaatacaatgacattgtggaggacatgagggaagaaggacgcaaatatggtaaaccgcacgaggcccatcgagttctcttataccttctttgttttaaaagctcttacattcagctgttatgattatgattgcctaccctcagttactgaattggtttccttttgtgtttttgtcttttgtgtgtcttttttgtagtcccacataatgccattgcagagtgttttatagtccgaccctatgcaatattggcaatcgggctttaacccacagaagacactattcttttgagtttgattaatcattatatcattagcctcttgcctatatatctctactcactaacacttggacaggtaacttggtgaaagttgtaattccacgacctgaccccagcgatgctccagttgctggtgttggaaaggtgtttttggaatatgcagatgtcgagggctcgaccaaagcaaagacggggatgcatgggcggaaatttggcgggaaccaggtggtggccgtgttctatcccgaggacaagttcgctgctgagcagtatgactgaaagttgtagaacctgttctagagttgcaacacacaatgtgtgtgttttttttaaaatctttgagggtaccgttttctcttgaatttgaatcttatctagttataagtttggtgcaggaccagtcgataagcgataagtttgtgcaggaccattaggctttgtttgggtaattagtattgatcccaatccaaatctatatatgttaatgccttgttcagttattcttattccatatggattggagtgtatcggaatgagttttgacttgctatagatttaaacaaactcaatatcatccattccacatggattgacgaagaaatgaacaagccctaaggccttgttcggttattgatattacatgtgtattggagtgtattgggtggaattgagatgaattttgacttgttatagatttaaaccggctcaatcccacccaatacatgtagattatcaccaaaacgaacaagccctaaggtggattggggtcaatactagagtacccaaactaggccttagttggagggtttgtacttgctactagggcagctaagatgaattcattcgctgtttgttctgggtccattgtttgctcaaattaacaggtgttgttatggtgctg

SEQ ID NO: 10080 - DNA, 2954 bp, Zea Mays
atcgccttcaccgccacacgctgccacgcgccatatataaccagccgttccctcctctcatgctcccctttccaaatccgtctccgccctcacgcacgcggcccaactagcctaacaaaccctagctagatttagaaaaaaaatttgtccccaatccgaaccgacgaggagctcgccgccgtgagatgtccgagtacgacgagcgctaccagggcaacggcgacatgcccgcagccgaaggcggctatccgcaggccgagtacgccgccgccgccgcgcctgccgccgggggttcgccgcccgcagacagcaagccctccgggttctccgaccacgccgacggccgctcctcccagcaccagcacgagacacaatcacatgacagtggttcctcgaaatctcgagaaagggaccgagaacgcgataagggcaaggatagggagcgtgacagggatcgtggccgagaaaaggggagggaccgagacagggataaggatcgtgaaagaagtgacagagatcgcgatcgccaccacagggaccatcgagagcgcagcgagaaaagggaacaccgtgatcgttctgatgatcgtgaccgtcaccgtgatggtcgtgaccgccaccgtgatgatcgtgattctgagaggagaagagatcgtgacagagatggtcatcgtaggcatcgctcccgctccccttctaagagtcgtgaccgtgaccgcagatctagatctcgttcacgctctcgatcaaagagcaagcgcgtgagtggttttgaccaagcacctccacaacatgcacttcctattgttgctgctggtgctatccctggcaaccttggcgcactttgtcacctgctgccaatggattgagctgactgctgtagctttgatcttcctggtatcactgctcctattcccggggttggggtgcttccgaacttgtataatttggctgcaggacagttcaacccccttgttattcagccacaagccatgacacaacaggctacccggcatgctcggcgtgtctatgtgggtggacttcctccaacagctaatgagcagaccgttgccatattcttcaatggagttatggctgctattggaggaaacacagctggtccaggtgatgctgttcttaatgtctatataaaccatgacaagaaatttgcttttgtggagatgagatctgtggaggaagcaagcaatgcaatggctttagatggcataatgtttgagggagcaccagtgaaggttagaagaccaacggactataatccttccctagcagctgctcttggcccgagccagccaaatccaaatctcaatcttgctgctgttggcttaacacctggctctgctggaggattagaaggtccagaccggatctttgtaggtggtctaccatattatttcactgaggctcaagtgcgggagttgctcgagtccttcggacctctgcgtggattcgatcttgtgaaggatagagaaactggtaactcgaagggatatgccttctgtgtttaccaggatcttaatgtcaccgacattgcctgtgctgcccttaatggcatcaagatgggggacaagactcttactgttaggagggcaaaccaaggagcttctcagcctaggccagagcaagagagcatcctgctgcaggcacagcagcaggtgcaaatgcagaaactcgtataccaagtcggaggtgccctgccgacaaaagttgtctgcctgacacaggtagtgacagcagatgaactgagagacgatgaggaatacaatgacattgtggaggacatgagggaagaaggacgcaaatatggtaaaccgcacgaggcccatcgagttctcttataccttctttgttttaaaagctcttacattcagctgttatgattatgattgcctaccctcagttactgaattggtttccttttgtgtttttgtcttttgtgtgtcttttttgtagtcccacataatgccattgcagagtgttttatagtccgaccctatgcaatattggcaatcgggctttaacccacagaagacactattcttttgagtttgattaatcattatatcattagcctcttgcctatatatctctactcactaacacttggacaggtaacttggtgaaagttgtaattccacgacctgaccccagcgatgctccagttgctggtgttggaaaggtgtttttggaatatgcagatgtcgagggctcgaccaaagcaaagacggggatgcatgggcggaaatttggcgggaaccaggtggtggccgtgttctatcccgaggacaagttcgctgctgagcagtatgactgaaagttgtagaacctgttctagagttgcaacacacaatgtgtgtgttttttttaaaatctttgagggtaccgttttctcttgaatttgaatcttatctagttataagtttggtgcaggaccagtcgataagcgataagtttgtgcaggaccattaggctttgtttgggtaattagtattgatcccaatccaaatctatatatgttaatgccttgttcagttattcttattccatatggattggagtgtatcggaatgagttttgacttgctatagatttaaacaaactcaatatcatccattccacatggattgacgaagaaatgaacaagccctaaggccttgttcggttattgatattacatgtgtattggagtgtattgggtggaattgagatgaattttgacttgttatagatttaaaccggctcaatcccacccaatacatgtagattatcaccaaaacgaacaagccctaaggtggattggggtcaatactagagtacccaaactaggccttagttggagggtttgtacttgctactagggcagctaagatgaattcattcgctgtttgttctgggtccattgtttgctcaaattaacaggtgttgttatggtgctg

SEQ ID NO: 10081 - DNA, 2982 bp, Zea Mays
atcgccttcaccgccacacgctgccacgcgccatatataaccagccgttccctcctctcatgctcccctttccaaatccgtctccgccctcacgcacgcggcccaactagcctaacaaaccctagctagatttagaaaaaaaatttgtccccaatccgaaccgacgaggagctcgccgccgtgagatgtccgagtacgacgagcgctaccagggcaacggcgacatgcccgcagccgaaggcggctatccgcaggccgagtacgccgccgccgccgcgcctgccgccgggggttcgccgcccgcagacagcaagccctccgggttctccgaccacgccgacggccgctcctcccagcaccagcacgagacacaatcacatgacagtggttcctcgaaatctcgagaaagggaccgagaacgcgataagggcaaggatagggagcgtgacagggatcgtggccgagaaaaggggagggaccgagacagggataaggatcgtgaaagaagtgacagagatcgcgatcgccaccacagggaccatcgagagcgcagcgagaaaagggaacaccgtgatcgttctgatgatcgtgaccgtcaccgtgatggtcgtgaccgccaccgtgatgatcgtgattctgagaggagaagagatcgtgacagagatggtcatcgtaggcatcgctcccgctccccttctaagagtcgtgaccgtgaccgcagatctagatctcgttcacgctctcgatcaaagagcaagcgcgtgagtggttttgaccaagcacctccacaacatgcacttcctattgttgctgctggtgctatccctggcaaccttggcgcactttgtcacctgctgccaatggattgagctgactgctgtagctttgatgtacgaggacactatctggtttggtcagcttcctggtatcactgctcctattcccggggttggggtgcttccgaacttgtataatttggctgcaggacagttcaacccccttgttattcagccacaagccatgacacaacaggctacccggcatgctcggcgtgtctatgtgggtggacttcctccaacagctaatgagcagaccgttgccatattcttcaatggagttatggctgctattggaggaaacacagctggtccaggtgatgctgttcttaatgtctatataaaccatgacaagaaatttgcttttgtggagatgagatctgtggaggaagcaagcaatgcaatggctttagatggcataatgtttgagggagcaccagtgaaggttagaagaccaacggactataatccttccctagcagctgctcttggcccgagccagccaaatccaaatctcaatcttgctgctgttggcttaacacctggctctgctggaggattagaaggtccagaccggatctttgtaggtggtctaccatattatttcactgaggctcaagtgcgggagttgctcgagtccttcggacctctgcgtggattcgatcttgtgaaggatagagaaactggtaactcgaagggatatgccttctgtgtttaccaggatcttaatgtcaccgacattgcctgtgctgcccttaatggcatcaagatgggggacaagactcttactgttaggagggcaaaccaaggagcttctcagcctaggccagagcaagagagcatcctgctgcaggcacagcagcaggtgcaaatgcagaaactcgtataccaagtcggaggtgccctgccgacaaaagttgtctgcctgacacaggtagtgacagcagatgaactgagagacgatgaggaatacaatgacattgtggaggacatgagggaagaaggacgcaaatatggtaaaccgcacgaggcccatcgagttctcttataccttctttgttttaaaagctcttacattcagctgttatgattatgattgcctaccctcagttactgaattggtttccttttgtgtttttgtcttttgtgtgtcttttttgtagtcccacataatgccattgcagagtgttttatagtccgaccctatgcaatattggcaatcgggctttaacccacagaagacactattcttttgagtttgattaatcattatatcattagcctcttgcctatatatctctactcactaacacttggacaggtaacttggtgaaagttgtaattccacgacctgaccccagcgatgctccagttgctggtgttggaaaggtgtttttggaatatgcagatgtcgagggctcgaccaaagcaaagacggggatgcatgggcggaaatttggcgggaaccaggtggtggccgtgttctatcccgaggacaagttcgctgctgagcagtatgactgaaagttgtagaacctgttctagagttgcaacacacaatgtgtgtgttttttttaaaatctttgagggtaccgttttctcttgaatttgaatcttatctagttataagtttggtgcaggaccagtcgataagcgataagtttgtgcaggaccattaggctttgtttgggtaattagtattgatcccaatccaaatctatatatgttaatgccttgttcagttattcttattccatatggattggagtgtatcggaatgagttttgacttgctatagatttaaacaaactcaatatcatccattccacatggattgacgaagaaatgaacaagccctaaggccttgttcggttattgatattacatgtgtattggagtgtattgggtggaattgagatgaattttgacttgttatagatttaaaccggctcaatcccacccaatacatgtagattatcaccaaaacgaacaagccctaaggtggattggggtcaatactagagtacccaaactaggccttagttggagggtttgtacttgctactagggcagctaagatgaattcattcgctgtttgttctgggtccattgtttgctcaaattaacaggtgttgttatggtgctg

SEQ ID NO: 10082 - DNA, 3244 bp, Zea Mays
gtgccctgcgcgatacgtcgtcgtgagaccggcgtgtgtggagggtgcaagcccgtgcgggcgcggccagccggccacaccaccactttcccgcgccatcaatgcgcgggccgagggtcacccgtcgccctcgcgccgcgctggcgagcccctgcccctccgtcgcctccgacgtcgctctcgccatcgccccgcgcgccgcgccagagctcgcctcaatctcgctcgctctgcctgcctgcctgcctaccgagtcgctcgcgcgcggcgggtccgtccgtcgctggcagacgtatatatcgcccgcccgtgtaacagctacagttttcctttagctgtatgtagccgtgcgcgcgcgagcacgtctccagccagctaggtaggcgaggtgacgatggagtcgacaatggagaagccggcggtgatggacgcggcgcgcggcggcggaggggtcgggcgggccaagtcggaccacctggcgccgtcgctgtcgctgagccggacggcgtcggcggagacggtgctgggcacggcggcggacgcggccaagcccgccgggttcgggaggaagcggcgctccgcgtcggtcggcggcggcaacaacaacagccacatccgcaagtcccggagcgcgcagctgaagctggacgtggaggacctcgtcagcagcggcgccgcgctcagccgcgcctccagcgccagcctcggcttctccttcaccttcaccggcttcaccccgccgctccagcacatgtgctccgccgacccgccttcattcagcgacgacgagaacctggacatcgaagccggcacacggcgcaagaaactggtgaccgagccgaccctgccgatatacctcaagtttgcggaggtgaagtacagggtggcggggaagggctcgccgcgggagatactgggagggatatccgggtcggcgtcccccggcgaggtgctggcgctgatgggcccgtccggcagcggcaagacgacgctgctgagcatcctgggcgggagggccgccgccggcggcgccgtcgacggctgcatctcctacaacgacgagcccttcagcaagtccctcaagcgcaggataggatttgtgactcaagatgatgttctctttgcccatcttactgtgaaggagacattgacttacgcggcactactccgtctcccaagaacaatgacacagcaacaaaagaaagagcgagcgatggacatcatacatgagcttggccttgaaaggtgccaggacacaatgattggaggatcgtttgtacgtggggtttcagggggtgaaaggaaaagagtttgcattggaaatgagattttaatcaatccatctttactgtttctggatgagccaacatctgggctggattcaactacagctctaaggatcgttcagcttctccatgacatagctgaggatgggaagacggtaatcaccacaattcaccaaccatctagcaggctgtttcataagtttgacaagcttattctcctgggcaaaggaagtttgctatactttgggaaggcatctgaagccatgccatacttccagtccattggatgcgccccacttattgcaatgaaccctgcagagtttctactggatctcgccaatggcaacactaccgatgtctcagtcccttcagaattagatgacaaggtgcatatggaaaatcacaatttggagaacaataattccaagattgactacaggccatcagcacaagatgttcatgagtatttggtagatgcctatgagactcgagtggcttttaaggagaagaagaagcttctagcaccactgcctatcagtgatgatctgaaggcaactataacatcatcgaagcgagagtggggcacatcctggtggcagcaatattccatcctcttttgtagagggatcaaggaacgacgacatgattacctgagttggatgagaatcacccaggtcatagctacatcggttatcttaggtttactgtggtggcactctgatcccagcacactaaaaggtctagaggatcaggctggcctgctgtttttcatcgctgtgttttggggcttctttccagtgtttactgcaatctttacattccctcaagagagggcaatgctgaacaaagagcgcgcagtcgacatgtacaagctcagtgcatacttcttggccaggacgacgagtgatctaccacttgaccttttcctcccaatcatattcatggtgatcgtgtacttcatggcaggcctcaaagcaactgccacacatttctttctcagcatgttgaccgtctttctcagcataattgctgctcagggactcggattggcaattggagctactctgttggacatcaagaaggcgacaactctagcttcagttacagtcatgacattcatgctagcaggaggcttctttgtaaagagcgttccaccattcatctcctggctgcgctacctgtccttcaactaccacacgtacaggctcctgctgaaggtgcagtacgaccccgtgccggacatcctgaccaccacgaggcacatggacagcggtggcaccgaggtggcagctctcgtcgccatggtcatcgggtaccgggtgctggcctacctgtccctgagaagggcgaaggccctgggcagctagcgcatcccttcaccgcagtgactgaagcctgagctcgtggagcgggttgggtcattgggtgtgtagggaagtttgtgctatattgcgctgtgaaaagatggaagtctttttttttaacttttctgtctttttcaactaagttctgagcaagtaccaacactgaagaacaaggatctgtagcgagtgtaccagagacaagctgtgctgtaatttttccttcacaacgattgcgtggttaaagtgattgagtataagcgtgagtttagattgccggcatattcttaggatgggtagctctaggacaaattctgttcatactcccaagaacgcgtacatttcatcaatgacattatacgagttcttcgcgatggacagaagcacaggatgaaggcctgatgtcccataggtcagagggaaggtatgatcagtgtttgattcatctacatcacccttatacggtcccatttctgcaatgttcatatgttctaaaattctgggctccatcgatctttccaatctgtgactaaagctcttcttttttttaactgctattaaggtaaacacgcacacgcacaaagaacttttttgcca

SEQ ID NO: 10083 - DNA, 984 bp, Zea Mays
tgactcatgagacagctctcaccactacactaggcctgcccttcaatgtgttccttggactgaagaagaacaccggaggtttttgctgggattacaaaagcttgggaaaggtgattggcgagggatttctcgtaatttcgtggtctcaagaacacctactcaagtagcaagtcatgctcaaaaatattttatacgtcaatcaaatatgagcagaaggaagagaaggtctagcctttttgacatggtgcctgatgagtccatggaccttccaccccttcctggaagtcaagagccagagacctcagtgttaaatcaaccaccactgcctccccctgtggaggaggaggaggaggtggaatcgatggagtcagatacttctgctgttgcggagagttctgcagcttcagctcttatgcccgagagtttacagcctacctatccgatgattgttccagcttatttctcaccgttcttgcaattctcagttcctttctggccaaatcaggaagatggaggtgatctgcctcaagaaacgcacgagattgtcaagcctgttgcagttcattccaagaatccaattaatgttgatgaacttgtgagcatgtcaaagctaagcataggggagcctggtcaggaaacggtgtctacttctctgtcgttaaatctgctggtgggtcaaaataggcagtcggccttccatgcaaatcctcaaacgagggctcaagcttgatcccgcttccgcacagaaactgcattaagaaggattccctctcttttttttttctatatgtaagattgaccgtgctctgtagcttgtatcatgttgtaagttatgctatgtatgaatgtacctgttgtttgtctggcacgcatgacatgccactcatgataacaaactcataatgttagtgctgatctttatggttgtaatgttgtaaacttttctgagagaaaaaaacgtactagccagttgttttcacgtgc

SEQ ID NO: 10084 - DNA, 2454 bp, Zea Mays
ggaaaaaattgctgcgtgcgccccgccgcctacacacgcctagcccgctccccaagaaagagcccccgcacacaggctgggaggggagcgaaagcgaaacgtattaaactcgcgtacatcatcaaccgcatgcgctgatgcgcactgccactgccccggagaaattcaaatcccaagccccacaagcaaattaccccagcatcaaatcagcggccggccggccggcagctctcggtcgatccactgcggtttccagtcccgaataatcccaattcccaatcgattcgaagcttccttccttcgaggagagggggaggtggaaggcgcgggggaagctctgcttagggttcggaggtggccggcgccgccgcggggcggggacggcagggggatggatccggagcagacgttcctgcgggtgcacgcgcgcttatcggggacgctttcccagctgctcacgccgcggatccgcctcgtcctcgagtacctctacctcgccggcgccgtcgcgctcttctgcctgctcgtcgtcatgcacacgaacttcgtgcagcagcctggttgctcaagtgaattttctggaattgaatttggagaagcacaacttgtccaaatcaagattatcagtgggggattatggtccagcagaggtgcttcttacatcatggatctccagaacctgggacgttcagctgagaaaattttagaggttaatggtgataagttcaacattttggcatctaaattttggtcaacctgggttggccctggagctaggaggagcttaccagatttgaaggcagccggagagggttctgtacaccaccctttatctgctaaggagtcatttaaagcagcagtgacatttttgttcagaaaatggtaccttcgtgctgtttcattctggaagaacataaagcaactttcagaaaataccctccagttaatgatcaaattggaacgatttcctacatattattaaggatcttcaactaccaagcatggatcatcttatttcgacaatagtgcaatggtttgagaggagaagtaaagcatttgagcctacttatttatatggcgtggaaaagggttatttcttgctttctgaaggtgctaaaactcgtcatggtgtccgaacaatcaatatcacaatttctgctcgaaatccttgctttggaaacaggtggcagcaacttttgataaacagcattgttggatatgatactatacttacaaacagcttggtgaattctcctggtcatggctatttatacaactttcagacgaaggagctctatgatcttagttatgggcatgaaccaccagaaggtcctacaagatttggagattactttgtgacaaaatgtggtgtccttctaatgtcactctttgtctttttcacaaccaccatgtctgtttcatttactttgagagaaacacaatcccgcatgcttagattcacagtgcagcttcaacaccatgcacgccaccacctgccaacctttcagttgatattcgtgcatgtcatcgaatcattggtttttgtgccgattatgattgggattctcttttttctatttgagttctatgatgatcaattgcttgcgtttcttgttttgactcttgtatggttatgcgagctattcacgatgatcagtgtgcggacatccatatcgatgcagttctttccacgcttcttcttgctgtattttttggttttccatatctacttcttctcatatacctatggcttctcatatctggctttctctgctacggcagcattcatgcagcacctgattttatatttttggaaccgttttgaggtgccagctctccagagattcatgcgaagtcgagcacacattcaccagcaaacagagatgttcgtgatcatggtcaagattacaccgatccacctcgaaatggaaatgatcaggtgacatagaatcacggggatgaaagtgggccaattactgaactcgagtgcttgggcggcagtagtctctttctaatatgatataatgccagcacctcccgtcaaaaggataatgacgaatattggtggcaactatacagactggtgtcgctggagatgccatgttagtgttatctgtttctcacttttttagttagtaggtaagggtgaaggttgtatctatattcattacatgtgcacattccctaccgtctgaatgggagcgcccgtcccagtcctgtacagaaatgtcaactcacagcagattgtgcacattctttttgtactcccatgggcgggtgctggcctggaacatgcagtgtgtgcaccactgtcactgaattggacagttaatggtttggatacatcgttgcatgtactgttccaacttccaaattctgaattctgtgcttgcagattagttcctgaaaatcatgtttttcagtgttccttggagttttgaacaccgatgtcca

SEQ ID NO: 10085 - DNA, 2714 bp, Zea Mays
ctaaaccagccaacgtgccggcggtaggaaaaaattgctgcgtgcgccccgccgcctacacacgcctagcccgctccccaagaaagagcccccgcacacaggctgggaggggagcgaaagcgaaacgtattaaactcgcgtacatcatcaaccgcatgcgctgatgcgcactgccactgccccggagaaattcaaatcccaagccccacaagcaaattaccccagcatcaaatcagcggccggccggccggcagctctcggtcgatccactgcggtttccagtcccgaataatcccaattcccaatcgattcgaagcttccttccttcgaggagagggggaggtggaaggcgcgggggaagctctgcttagggttcggaggtggccggcgccgccgcggggcggggacggcagggggatggatccggagcagacgttcctgcgggtgcacgcgcgcttatcggggacgctttcccagctgctcacgccgcggatccgcctcgtcctcgagtacctctacctcgccggcgccgtcgcgctcttctgcctgctcgtcgtcatgcacacgaacttcgtgcagcagcctggttgctcaagtgaattttctggaattgaatttggagaagcacaacttgtccaaatcaagattatcagtgggggattatggtccagcagaggtgcttcttacatcatggatctccagaacctgggacgttcagctgagaaaattttagaggttaatggtgataagttcaacattttggcatctaaattttggtcaacctgggttggccctggagctaggaggagcttaccagatttgaaggcagccggagagggttctgtacaccaccctttatctgctaaggagtcatttaaagcagcagtgacatttttgttcagaaaatggtaccttcgtgctgtttcattctggaagaacataaagcaactttcagaaaataccctccagttaatggtcagatcaaattggaacgatttcctacatattattaaggatcttcaactaccaagcatggatcatcttatttcgacaatagtgcaatggtttgagaggagaagtaaagcatttgagcctacttatttatatggcgtggaaaagggttatttcttgctttctgaaggtgctaaaactcgtcatggtgtccgaacaatcaatatcacaatttctgctcgaaatccttgctttggaaacaggtggcagcaacttttgataaacagcattgttggatatgatactatacttacaaacagcttggtgaattctcctggtcatggctatttatacaactttcagacgaaggagctctatgatcttagttatgggcatgaaccaccagaaggtcctacaagatttggagattactttgtgacaaaatgtggtgtccttctaatgtcactctttgtctttttcacaaccaccatgtctgtttcatttactttgagagaaacacaatcccgcatgcttagattcacagtgcagcttcaacaccatgcacgccaccacctgccaacctttcagttgatattcgtgcatgtcatcgaatcattggtttttgtgccgattatgattgggattctcttttttctatttgagttctatgatgatcaattgcttgcgtttcttgttttgactcttgtatggttatgcgagctattcacgatgatcagtgtgcggacatccatatcgatgcagttctttccacgcttcttcttgctgtattttttggttttccatatctacttcttctcatatacctatggcttctcatatctggctttctctgctacggcagcattcatgcagcacctgattttatatttttggaaccgttttgaggtgccagctctccagagattcatgcgaagtcgagcacacattcaccagcaaacagatgccctattggttcaggatgagtctaccaggagccagcaagagggtcaacagaatggaatttctgagccagctgccaacaatgctctccagtatcaagagcaaaaccctcagcgagctggaagtacccctgcaggctcaggctccctcaacccatttgggtcccttttgctgtggttgctgggaggcggtgcttctgatggcatagtttctttcttctctatgttcagagatgttcgtgatcatggtcaagattacaccgatccacctcgaaatggaaatgatcaggtgacatagaatcacggggatgaaagtgggccaattactgaactcgagtgcttgggcggcagtagtctctttctaatatgatataatgccagcacctcccgtcaaaaggataatgacgaatattggtggcaactatacagactggtgtcgctggagatgccatgttagtgttatctgtttctcacttttttagttagtaggtaagggtgaaggttgtatctatattcattacatgtgcacattccctaccgtctgaatgggagcgcccgtcccagtcctgtacagaaatgtcaactcacagcagattgtgcacattctttttgtactcccatgggcgggtgctggcctggaacatgcagtgtgtgcaccactgtcactgaattggacagttaatggtttggatacatcgttgcatgtactgttccaacttccaaattctgaattctgtgcttgcagattagttcctgaaaatcatgtttttcagtgttccttggagttttgaacaccgatgtcca

SEQ ID NO: 10086 - DNA, 2794 bp, Zea Mays
ggaaaaaattgctgcgtgcgccccgccgcctacacacgcctagcccgctccccaagaaagagcccccgcacacaggctgggaggggagcgaaagcgaaacgtattaaactcgcgtacatcatcaaccgcatgcgctgatgcgcactgccactgccccggagaaattcaaatcccaagccccacaagcaaattaccccagcatcaaatcagcggccggccggccggcagctctcggtcgatccactgcggtttccagtcccgaataatcccaattcccaatcgattcgaagcttccttccttcgaggagagggggaggtggaaggcgcgggggaagctctgcttagggttcggaggtggccggcgccgccgcggggcggggacggcagggggatggatccggagcagacgttcctgcgggtgcacgcgcgcttatcggggacgctttcccagctgctcacgccgcggatccgcctcgtcctcgagtacctctacctcgccggcgccgtcgcgctcttctgcctgctcgtcgtcatgcacacgaacttcgtgcagcagcctggttgctcaagtgaattttctggaattgaatttggagaagcacaacttgtccaaatcaagattatcagtgggggattatggtccagcagaggtgcttcttacatcatggatctccagaacctgggacgttcagctgagaaaattttagaggttaatggtgataagttcaacattttggcatctaaattttggtcaacctgggttggccctggagctaggaggagcttaccagatttgaaggcagccggagagggttctgtacaccaccctttatctgctaaggagtcatttaaagcagcagtgacatttttgttcagaaaatggtaccttcgtgctgtttcattctggaagaacataaagcaactttcagaaaataccctccagttaatgatcaaattggaacgatttcctacatattattaaggatcttcaactaccaagcatggatcatcttatttcgacaatagtgcaatggtttgagaggagaagtaaagcatttgagcctacttatttatatggcgtggaaaagggttatttcttgctttctgaaggtgctaaaactcgtcatggtgtccgaacaatcaatatcacaatttctgctcgaaatccttgctttggaaacaggtggcagcaacttttgataaacagcattgttggatatgatactatacttacaaacagcttggtgaattctcctggtcatggctatttatacaactttcagacgaaggagctctatgatcttagttatgggcatgaaccaccagaaggtcctacaagatttggagattactttgtgacaaaatgtggtgtccttctaatgtcactctttgtctttttcacaaccaccatgtctgtttcatttactttgagagaaacacaatcccgcatgcttagattcacagtgcagcttcaacaccatgcacgccaccacctgccaacctttcagttgatattcgtgcatgtcatcgaatcattggtttttgtgccgattatgattgggattctcttttttctatttgagttctatgatgatcaattgcttgcgtttcttgttttgactcttgtatggttatgcgagctattcacgatgatcagtgtgcggacatccatatcgatgcagttctttccacgcttcttcttgctgtattttttggttttccatatctacttcttctcatatacctatggcttctcatatctggctttctctgctacggcagcattcatgcagcacctgattttatatttttggaaccgttttgaggtgccagctctccagagattcatgcgaagtcgagcacacattcaccagcaaacaggtgtccacattacatcctcaactatctacacttctaccttacacattgctagggtaaatgtgagggaccctggtacaataaacgatggcctcggtgctgctcgtgaagcagatgccctattggttcaggatgagtctaccaggagccagcaagagggtcaacagaatggaatttctgagccagctgccaacaatgctctccagtatcaagagcaaaaccctcagcgagctggaagtacccctgcaggctcaggctccctcaacccatttgggtcccttttgctgtggttgctgggaggcggtgcttctgatggcatagtttctttcttctctatgttcagagatgttcgtgatcatggtcaagattacaccgatccacctcgaaatggaaatgatcaggtgacatagaatcacggggatgaaagtgggccaattactgaactcgagtgcttgggcggcagtagtctctttctaatatgatataatgccagcacctcccgtcaaaaggataatgacgaatattggtggcaactatacagactggtgtcgctggagatgccatgttagtgttatctgtttctcacttttttagttagtaggtaagggtgaaggttgtatctatattcattacatgtgcacattccctaccgtctgaatgggagcgcccgtcccagtcctgtacagaaatgtcaactcacagcagattgtgcacattctttttgtactcccatgggcgggtgctggcctggaacatgcagtgtgtgcaccactgtcactgaattggacagttaatggtttggatacatcgttgcatgtactgttccaacttccaaattctgaattctgtgcttgcagattagttcctgaaaatcatgtttttcagtgttccttggagttttgaacaccgatgtcca

SEQ ID NO: 10087 - DNA, 1139 bp, Zea Mays
  misc_feature (1138)..(1139): n is a, c, g, or t
cacacccaaacccgtggcgcggggcagccggcagggcgcgccttcgccaccacaattccacaaagagacctcgcgccccaccagtctaatctcccgcgggcgggcagataacggctcgcggtacggaaagggcgagagagggggagcggagagcaccagtccaccgagaggcgcggagcaggagggcacacatggaactggaggaggcggtgccgccggccgcgatggtgggggaggacaacgcggcggcgccgacccaagactttgggctccccgctgagctgatagccgtgctgccatcggacccgttcgctcagctggacgtagcgcgcaagatcacctccatcgcgctctcgcaccgcctcggcctcctcgaggccgaagcagcgcgcctgcgctcgcagctcgccgaacgcgacgccgaggccgaggacctccgggagcacgtcgagcagctcgacgccgcgctcgccgtcgccaccggccgcctccgccacgccgaggaggaaaaggacgcactgcagcgggacaactctgagctgtccaacaccgttaggaagttgaacagagatgtcgccaagttggaagttttcaagaagacacttgtgcagtcactccaggaagatgacagcagtgataatactgctcccagggaaagagctgcagcagcttcaaatttctcctctgcaccatcagattctgcattttcgacttccaaatcatcacaggtttcagaaaccgcaagttcagtttcagaggaaaataaccaagttgacccagatgcacctaggcggccaccccggccacatgtatttttgcaatcatacaacagcacaccgaggatgactcccccagactcacctccaaggcgttttgcatcggtatcaccgccaaggcgacattcaatctctgttacatcgatgaatatgtttaatgacaggtcctcaggcttttctggtcagcatagctctccatttgacgctccaagtcaaacaggacgaacaagagttgatggaaaggagttctttcgtcaggtcagaaatagattatcttatgagcagtttggtgcattcctggctaatgtgaaggagctgaacgcacataggcagaccagagaggataccttaagacaagcttnn

SEQ ID NO: 10088 - DNA, 1445 bp, Zea Mays
aaaatagcaaatttctcgcccctggagaggacgcggtcatggcgtgcccccaggcgccgcacgccgcgggacgaggaggatgggggcggggctggaccctagcccgagcttcggcggctgctcggaccccgtgttggtggagctatccatgggcggggactactaccgcgcctgctgcggcgagcccgactccgatatccccgaggggcccaagctgccctgcgttggggacaaggagcctctttcctcttcagcagccgagtttcagtctggcagccccattttacaagagaaaattaagttgctcggcgaacaatatggtgctttaagacgggcacgtggagatggaaactgcttttatcgaagctttatttatgttttcctacctggaacacatcctagagagacaagacaaagctgaggttgatcacatcatggtaaaaattgaggaatgcaagaaagaagacactcctgtctcttggatatattgagttcacttttgaggatttctttgcgatgaattggtttacaagctgtctgaagtctgtatctgtagaacaggtttggtttggattactgtggtgcatgtgcatgcttcttgtcaatccttcgaggctcagatatgctgatttttatgtggaaagttaactaagttgcaacttgtttattttagtctggaatactaaccagcctgtcttctaaaggacatgagctttcagctagagacatagcatgtcacccaaagttttttctaccgtactcgagactttttgtgatagaaagaaaaaaaaaaagagacgcagcagatcaatcagtttgacgaagacatggccttgcgattggtctggggctcagcagaggcgagaatgaagaacgggtctcagctagtcagctgccaagtacgctgtgccttcccggcacctgaaagaagcaagcacattttcgactccgtttggtggtctatctttctgtttccacagtcagggtggttgggtggctggccggctgggtgttgctggagtgctgctgctctctgtctcttttcgttctgggcccttttcgctgcttaggtaggttccccgtgtcacgccatccaactcgcaaggagatagatagacagcgatcgtgcttcgttcatatcctcggaagacagcggtcatgcttcgttcatatgagcaaggaggaggaggcgtccaatcttggatcggaccacgcagttcagttcctcacaagcaacgaaaaccaaactaattgtgcaagaatgatgtaatcctcctccggggaagaaggcgtcttatgcgtgcgttctaattttttttggttaaggattagaggatgagggagttaataagtggcaggcagatggcgccaaattgtttgaaaccttgtagctgattagtcgcaatttttatgcgtggcgtacgggtaaacaatcataatctgac

SEQ ID NO: 10089 - DNA, 1518 bp, Zea Mays
aaaatagcaaatttctcgcccctggagaggacgcggtcatggcgtgcccccaggcgccgcacgccgcgggacgaggaggatgggggcggggctggaccctagcccgagcttcggcggctgctcggaccccgtgttggtggagctatccatgggcggggactactaccgcgcctgctgcggcgagcccgactccgatatccccgaggggcccaagctgccctgcgttggggacaaggagcctctttcctcttcagcagccgagtttcagtctggcagccccattttacaagagaaaattaaggaacacatcctagagagacaagacaaagctgaggttgatcacatcatggtaaaaattgaggaatgcaagaaagaagacactcctgtctcttggatatattgagttcacttttgaggatttctttgcggtaagtttgttcagtggttattttttgtgtatttctctgagtcatacgttttctgttagggcggctttccagtttatttgtctacattatctactgtttgtgggtttgtctacttaattgtcacaaccgtttccagatgatttttttgtgtatttgcatagatgaattggtttacaagctgtctgaagtctgtatctgtagaacaggtttggtttggattactgtggtgcatgtgcatgcttcttgtcaatccttcgaggctcagatatgctgatttttatgtggaaagttaactaagttgcaacttgtttattttagtctggaatactaaccagcctgtcttctaaaggacatgagctttcagctagagacatagcatgtcacccaaagttttttctaccgtactcgagactttttgtgatagaaagaaaaaaaaaaagagacgcagcagatcaatcagtttgacgaagacatggccttgcgattggtctggggctcagcagaggcgagaatgaagaacgggtctcagctagtcagctgccaagtacgctgtgccttcccggcacctgaaagaagcaagcacattttcgactccgtttggtggtctatctttctgtttccacagtcagggtggttgggtggctggccggctgggtgttgctggagtgctgctgctctctgtctcttttcgttctgggcccttttcgctgcttaggtaggttccccgtgtcacgccatccaactcgcaaggagatagatagacagcgatcgtgcttcgttcatatcctcggaagacagcggtcatgcttcgttcatatgagcaaggaggaggaggcgtccaatcttggatcggaccacgcagttcagttcctcacaagcaacgaaaaccaaactaattgtgcaagaatgatgtaatcctcctccggggaagaaggcgtcttatgcgtgcgttctaattttttttggttaaggattagaggatgagggagttaataagtggcaggcagatggcgccaaattgtttgaaaccttgtagctgattagtcgcaatttttatgcgtggcgtacgggtaaacaatcataatctgac

SEQ ID NO: 10090 - DNA, 1162 bp, Zea Mays
caaacgggtccttagtgatttcttgtagttgctctgagtctctctcgtctgtcgcccaaatccattttccacgtctcttccatcccatccccgtgacgccgtctagatttcaaatccgcgtcaagccagggcagagctcagggctcggtctcccccttcgccgccagttgccgcagcctccaacccctcgagatccgccgcgtgtgagaccgccgaccatggaggccatggaggagctgtcagagctcgccgagtcgatgcgccaggcggcgtcgctcctcgccgacgacgacccctccgacgccgccgcgccgcgccggcccaccaccttcctcaacgccgtcgccctcggcaacgtcagctctggcaagtcggccgtgctaaacagcctcatcggtcacccggttttgccgacgggggagaacggggcgacgcgggcgccaatagtggttgacctgcagagggatccggggctcagcagcaagtccatcgtgctgcagatcgacagcaagtcgcagcaggtttccgcaagtgccctccggcattcactgcaggacagactcagcaaggggacgtctggtggatcagggaggggccgtgctgatgagatttacctcaagctgcggacgagtacagctccctcattaaagctgattgatttacctgggatagaccagcgagctgttgatgattccatgatcaatgagtatgctgggcacaatgatgcaatactgctcgttgtcataccggcaatgcaagctgctgatgttgcatcatctcgagctctgaggttggccaaggatatcgattcagatgggacaagaactgttggtgttataagcaaagttgatcaagcagatggagatgcaaaagttatagcctgtgttcaggccctactatcaaacaagggtccaaaaaaccttcctgagattgattgggttgctctaattggacaatctgttgcgattgcgtcagcacaatcagctgggtctgaaaactctctagagacagcttggcgagccgaagctgaaagcttgaaaaacatcttaactggagctccgcagaataagcttggtagaattgctttggttgacacaattgctaagcaaatccgtaaaagaatgaaagtgcgggttcctaacctattgagtggtaccacaca

SEQ ID NO: 10091 - DNA, 5438 bp, Zea Mays
cagccaacgacagcttgctctcgcccctgccttctcctctcctctgggtgttcccggcggtttcttcgccgctcaagccgcctccactctccctgccgcgctagcaactacgtttcggacttccccgctcgactttcgacctcccctgccgccaacaccgcccaaccgccgtcctccaccaccctcggccggcggcgccccgccttgccggaggcggagcagacgacgcgtggcagccgattccgcgatggatgcatccactgccggcgatggagacacgaatactttgaagaggccatgcaaaacatcgcctccagaaggcgaaacagacaagtataaacggcagaagagggaatgccaggatttctctcccagaaggtaccagcttgatgtctatgaggttgctacgaggcacaacacaattgcgatgcttgacacgggagctgggaagacaatgattgctgtcatgctcatcaagcattttgggaagatcaacaaagcaaacaatgatcgaaagctcatcatattccttgcaccaactgttcaactcgtcacacagcaatgcgaggttattaagagctacactgattttgaggtggagcattatcatggtgcaaagggtgttgatcaatggaaggctcatagctggcaacagcaactcttaaagtatcaggttatggtcatgacaccacaggtgttgctagacgctttacgccaagctttcttgatcttggacatggttagtctcatgatatttgatgaatgccatcacgcaactggtaaccacccatatactaggataatgaaggagttctatcatggatcagagcataagccaaatgtgttcggtatgacagcctctcctatcataagaaaaggggtctcctctgatttggattgcaaaaatcagctatctgagctggaaaatattttagattccaagatacactctgtggtggatagagaagagatagaactttgtgttccttctgcaaaagaagtgaatagatactatgagccaagaactgtttcttttgacgatttaagtgaagaactggaaattttgtgttccaagtatgatgggctgatcatacaattgcataacagatcgaccaatcagtacaaagatgctgatgaaataacaaaagaatcacggaaacgtctctcaaattctttagcaaagatttgctattgcctagaagatgctggtcttctttgtgctagtgaggctactaaaatctgcattgaaaggggccagagaaaaggttggctgaaggggggcagtgacaccactgatcagcaaagtggtcaaaatggacctatcctgtttgcagaaatttcaatgcttcatatggagttttttcaggaagtgttggatataatcggcaaacgcgtccaacagcaacaaggaattgatgcccttctgaactcagagcgtggatgtgtggaagcaaaaaatatgggctatatttcaccaaagctctatgagctcatgcaagtatttctctctttcagtgaccctgataacgttagatgccttgtttttgtggatcgaaagattagtgctagagtcattgagcggacgatgaagaaaataggccaactctcctgtttcagagtctcttttctaactggagggagttcttcagtggatgcactcacccctaaaatgcaaaaggatacactggattcgttccgctctggaaaggtcaacttactgtttactacagatgttgcagaagagggtatacatattccagactgctcgtgtgtaataagatttgatttgccgagaactacccgcagctatgtccaatcacgtggacgagcccgacagagggactctcagtacatactaatgattgaacagggaaatgtgaaacaagatgatttgatatctgggattatgagaagtaaggcctcgatgactgggattgcttcaaaccgagagcctgaggattcacaccccagtttcttacccactgaagaaataaatgaataccatataagcaaaacaggagccaaaataactactgattctagcatcagtgttctcaaccagtactgtgataagctcccgaaggacaagtactacaccccaaggcccaagtttcagttcactcattacggtgatggttatgagtgtactgtaacactaccatccagtgccatgtttcaacttttggtaggtcaaaaagcaagaaacatgcagaaagcaaagcagcttgtttgccttgatgcatgtaagaggctgcatcagctcggagcacttgatgaccatctttctccatcagttgaagagccgcctccggaaatttcaagcaagtctagtatctcgacacctggtgcaggtttaggtacaaccaaacggaaagaactgcatggtacaaccaaagttctttccatgtctggctcttggggttcagatagaagtgtgactaaacttcaaggctacaagttgaattttgtttgtgatcaagttggtcaaaaatactctgcctttgtccttttaattgatgctagtatagcaaaagaagctgctactttagatattgatctatatttgcatgacaagatggtaaaagcttcagtttccccttgtggacctcttgagttggatgcttggcagatggaacaaacaaaactatttcaagcacttctctttaatagtttgtttggaaaactgttcattggatcaaaagcatcaaaaaccccaagggagttcattctcaagaaagatgatgtgttcctttggaacaaagaaaatatgtatttgcttttacctgtggattctactctggattctcataaaagtgtttgcatcaactggagtgtaattgatgtagtggctacagctgttggattcatgagaagcatttattcagatggcaaatgtaacctaactgataaacttaattatgaaaaaaatggtgaagatcttattcatttggccaacaagtcatgcaagggtaatgatcttaaaaatatggtggttctagcaattcacactggaaagatctatactattgttgttgtatctgatttatgtgccaatagtaaatttgatggtacaactgacaagaaagaagcaaaattccggacatttgcagaatattttgagaagaagtatagtatatttctttgtcatcctttacaaccattgctagtgttgaaacccacccataatcctcacaatcttctttcctcaaagaatagagatgaagacaatgttgtggaaaataaaaatagggcgaacagccttgttcacatgcctccagagttgctgattccccttgatttacctattgatgttttgagagtattctacttgtttccatctctgatgcatcgtcttgagtcactaatgctagccagccaactaagaagtgaaattgcatacagagattctgatatatcaagcttcgtgattttggaagctatgacaacacttagatgctgtgaggacttctctatggagcgattagagttattgggggactctgttcttaagtatgcagtgagtgcccatcttttcatgacatttcttaataagcatgagggacagttatcgtccagaaggcaagaaacaatatgtaatgccacactttataggcttggtattgaacgcaggatacagggttacatacgtgatgctgcatttgatcctcgtcgatggcttgctcctggacagctgtccagacgtccttgtccttgtgaatgcccagtaaattctgaggttgtaactgaggatattcataggattgatgacaagtctataattataggcaaggcgtgtgacaagggacacagatggatatgttcgaaaaccatctctgattgtgttgaggctctaattggggcctattatgtcgaagggggattaaaagcagcttttgctgttctcaaatggttccagattgagactgaaatcgaggaagagttaattatggaagctctgtcgagtgcttcagtgcgaaactatcttccaaaagttgatgtagttgaattgcttgaagcaaaactaggctacacttttcaaatgaaaggtttgttaatagaggctctcacccactcatcacagcaagaatctggagcaacatactgctaccaacgcttggagttccttggtgatgcagtcttggatattttaataactcgccatctgttccttagtcataaagacacagatgagggggagctgacagatttacggtctgcatcagtaaataatgagaattttgcacaagttgcggtaaagcacaatctccatcagtttctacaacattcttcggggttcttacaagaccaaattactgaatatgtgaatagtcttgaaagttcgtccatggacagagccagccttttatccagtggaccatgtagggggccaaaaagaacttaatgagtggtctgacaagaatgggtactttattggaattaagtgtgaaaatcgaggagacagcacaatggctatccttaacttacaactcaaggatttgcttcttgtgaggcaaggttgtgggaagaataaagtagatgcgaaagcacatgcagcttccttattgcttagggatctagaggaaaaaggacttataattccaaggaatgcaagcagagtggaacaacttgaaaagaattctggtactgtaaaacattgcaacaacgtgcttgatgttatggacacacaaaacgtagcaccacctaggcaaaaggaagtagctgtgttaagtaccaccactcctggctctgttcttgataagccattggttgtgaaggttaagttgagcaaaggaggacctcgtatatcattgtacgagtcgtgtaaaaagcttcagtggccaatgccgacctttgaattcgtgaaggtcgaaccaagcgtgtgctcctcttcctgtggttcgtcacaaaaggttgcgccccaaggattcgcatttgcttcgacaataacgttgcatataccgaacggcgatgtcatcagcctcacaggagatgggcgtgcggataagaagagctcacaggattctgctgcgttgctcatgctctatgagctgcagcggcaacgtagattccaagttcaagaagtatgaggaatcacctcgtggttccatcaccaaagatgcaatgttaccgccaccggcgattattgcttgggcatcttggagtaatgtcaccgccaaatcagtctttagtcgtcagccgcacgggggtgtaagaaaataatgtacttcattctgattctaaattataagacaccccgaattatgtaatctaattatcataatgtcctataatttgaaatggagcggtgttggttactctcgttcccgtctgatggattcagacatttcatctgtacacattaggttctggtgcatgttaaaagagcctggaagggcactgcttacgtccgccgtggtcgtgatgtgtgtacacgtgca

SEQ ID NO: 10092 - DNA, 2899 bp, Zea Mays
ccgccgctttaaaccccgtccgtgtcccgctagccgccattgcagagcactgactgagcacaccacccaccagctccgaagtcatgtcccacctcgacgcggcctcgctcctcgccccctcgccgccgctggcaaagccccacccgcgcagccgcttcctctgcctcatctcctccatgctcgccgtcctcggcgcctccctcgcgggtctcctcttattcgcgctccaccccgcgccgaacccggtcccgaactacgcgtcgctcttcctctccctcggatccaacgacaccgccgcctcgcacctccgagcgctcactctccacccgcacgtcgcggggaccaaggcgaacgccctcaccgcccgctacgtgttcgacgcgctctccgcgctctccttccccacccacatcacgccttactccgtcctcctctcctaccccgtccaccgctccctctccctctcggcgccaggccgcggcgtcgtcacctccttctccctaaagcaggagacctaccccaacgacccctacgcagcagccgcggcggagaccatcccgacgttctacgcgtactcggcctccgggtcggtctccgcggaggccgtgtatgctaactacggccgcgaggaggacttctcttacctcgcctcccgcggcgtggacgtcgcgggcaaggtcgcgttcgcgcggtacgggaggatccactgcgaggacatagcgcacaacgcgcgcgccgccggcgccgcggccgcggtggtgtacactgacccgctgcagtacggcggcgcacccggtgaggggtggttccccgactcgcggtggctgccgcccagcggtgtgcaggtggggagcctcttccggggcgtgggggacccgacgacgccgatgtgggcatcgtccgagggctgcgagcgcgtcagcttggaggaggccatgaataccgatgacatgccgctcatcccagccctgccggtatcggctcaggacgcgatggagatacacagagccatgggcggggccgtggcgccggaggactggcagggccgtgaagacggacccgtttaccgcctcgggccagggccggcagttttgaacctgacatatcttgggaatgattcgatggcaacgattgagaatgtcttcgccattatcgagggcgccgaagagcccgatagatatgtcattcttggtaaccatcgtgatgcttggacgttcggtgcatctgatcccaacagtggaacagcagctatgattgagttagctaaaaggttttcaatgctgcaaaaacaaggatggaggcctcgaagaactattatcttctgtagttgggacgcggaagaatacggactgacagggtcaactgaatgggttgaagaaaaccgggagatgttgtattctagagctgttgcttatctgaatattgacgtttcagtcgttggtccaggattcctgccttctacaactccccaacttgatgagttacttcagcaagtaactaaagtggttcaagaccctgataattcatctcagactgtgtatgattcatggattaaatcgagcactcctctccgggttcttagactaggtgatggaggatcagactattcagcattcgtccaacatgttggtattccttcgatgaatataatttttggagaaggaccaggatatccggtttaccactccttatatgatgactacgtatggatggcgaaattcggagatcctgcgttccgtagctgctagcatatggggaatgatggctttgaggttggcaaatgaagacatcctacccttcaattacatgtcctatgcaattgagcttgaggcatacacaaaaacggtagagaatgaagtgaagggaacaactgtcacttgttcccctctgtacaactcaatcagaactctcggagcggcagctaccaaagtgaataacgaacaaaaggaacttcaaaagctactcttgagcaagcagctgaacaaggattcactgaaaatccgacaactcaatgaccgtcttatgcagaccgagcgtgcattcactagcagggaaggcatcttcaagctagaatggtttaagcatctggtgtatggaccttcagaccagaatgactgggatactgcagtctatccaggtatagccaatgccatagccagcgcccggagcagcaacacttcggagtcctggaagtttgtacagcatgagatctacagagtagccagggccgtgacacaagcatctgctatactgagtggccgtctgacatgacaggattcaaaccatattcgttaaaaaagattgttactgtggatttcggaagttttgacattttttgaaactttcgactatgaaatatctgagttgcagagaaagaccgtgcaccacattagggcttgttcgttttgctctcaatccatgtggattgggtgggattggatgagtttcaatcccaaacaagtcaaaatctttcacaattttttccaatcccatccaatccacatgagataggaataaccgaacaagcccttaaaaggatttggtataggtcagaactttccgatagggggttggaaatttcaacttgggcatactttccaaacacaaaaaagaagtgtgcagtgttgtgcttagtgtctctcagttttatattaaagaatttgttatgcacttaagcacaactagtagtgagagttgagccgctttttagtacaggttccctatactcaagaatagaaaacaagtttacaaagcattgaggttgaagcttgattgaaagctctcatttcctgtacatctattggacaaatctccatttgtgcttaacaactataatcatatcccatatgacttgttggatcctaaatttcttgtcatcaatacaccaaaaacccacttc

SEQ ID NO: 10093 - DNA, 3017 bp, Zea Mays
ttttaacaacacacagcctacagcagctttttccacagctcacagcccacagcaactttttccacagtcacagcccacagcaactttttccacagccaaagcccaaccaaacagaccctaagttggtcgccatcccctctagatgcctagatggacacacgaaatttgagcaccagcaagccgtgtgcaacccactgccacgcgccggagccactgccggcagccatcgacggccctggcaaacgcggccaccgaagcaagcagacgccaggcgcgagcgccacacaacacgccgccagcagcatatggcgtcgcacctcctgttggccagatctgacagcagcagccgcgacacattggatctgtggtgctggcgcgcgcaccgcagtagacacgccctcggccgccgtcgagccaaccaacctcggagcaccgccgcaagaccagacagccgccgccgccccagcccctcgcggcctccaagccccgcacgccgctgatcggcagcgccgtcttccccaatgcaccgtccgcggcgaggcgcgccgccgagagcgccgtccggcgaacgcacattgccagggaggctgacatgacgctgccgtcgtcgaagcagctcctctccctccacgacgccgctgccaacggcaccgacgcaggccacggggaggcaccgcgcaccaagcgggaccttggcgagcggacggacgcgtcccgcgcgcgcagcgatgcccccgcggggagacccaaagaagaagaaagaacgccccgccgccgccatccttggggcccgcgccggcgtctggcagactcctccggcgacgatgagaggaggggagggaggggagggggtggtggcgctagggttttggtggccacccgtgtcgcccgagaggaggacgacgcgggggcgtttttcaatttcaagaattaaagcaaacttttcttgaacgaacaaaagcaaaaaaaaaataagatatgtcattcttggtaaccatcgtgatgcttggacgttcggtgcatctgatcccaacagtggaacagcagctatgattgagttagctaaaaggttttcaatgctgcaaaaacaaggatggaggcctcgaagaactattatcttctgtagttgggacgcggaagaatacggactgggtcaactgaatgggttgaagaaaaccgggagatgttgtattctagagctgttgcttatctgaatattgacgtttcagtcgttggtccaggattcctgccttctacaactccccaacttgatgagttacttcagcaagtaactaaagtggttcaagaccctgataattcatctcagactgtgtatgattcatggattaaatcgagcactcctctccgggtgagttgttgcaacttgcttatccaacagcctaccttctatgtagtgctgagaatccagttagttgtcactataaaatagtgattgtattgttaccaagctacaagttccttttcagtttcagttccattcctcgagaattatgtggtttcaggaggacagaccacttcgacttcctgacaaattatataacattactcactattcactgcatatctcttgcgttaaggttcttagactaggtgatggaggatcagactattcagcattcgtccaacatgttggtattccttcgatgaatataatttttggagaaggtaatgcccctgctctcttctatttgtctgctcagtgacttttatttttcaatgaactttcctgggtacttttgcttttgtaggaccaggatatccggtttaccactccttatatgatgactacgtatggatggcgaaattcggagatcctgcgttccgtaggcatgtggcagctgctagcatatggggaatgatggctttgaggttggcaaatgaagacatcctacccttcaattacatgtcctatgcaattgagcttgaggcatacacaaaaacggtagagaatgaagtgaagggaacaactgtcacttgttcccctctgtacaactcaatcagaactctcggagcggcagctaccaaagtgaataacgaacaaaaggaacttcaaaagctactcttgagcaagcagctgaacaaggattcactgaaaatccgacaactcaatgaccgtcttatgcagaccgagcgtgcattcactagcagggaaggcatcttcaagctagaatggtttaagcatctggtgtatggaccttcagaccagaatgactgggatactgcagtctatccaggtatagccaatgccatagccagcgcccggagcagcaacacttcggagtcctggaagtttgtacagcatgagatctacagagtagccagggccgtgacacaagcatctgctatactgagtggccgtctgacatgacaggattcaaaccatattcgttaaaaaagattgttactgtggatttcggaagttttgacattttttgaaactttcgactatgaaatatctgagttgcagagaaagaccgtgcaccacattagggcttgttcgttttgctctcaatccatgtggattgggtgggattggatgagtttcaatcccaaacaagtcaaaatctttcacaattttttccaatcccatccaatccacatgagataggaataaccgaacaagcccttaaaaggatttggtataggtcagaactttccgatagggggttggaaatttcaacttgggcatactttccaaacacaaaaaagaagtgtgcagtgttgtgcttagtgtctctcagttttatattaaagaatttgttatgcacttaagcacaactagtagtgagagttgagccgctttttagtacaggttccctatactcaagaatagaaaacaagtttacaaagcattgaggttgaagcttgattgaaagctctcatttcctgtacatctattggacaaatctccatttgtgcttaacaactataatcatatcccatatgacttgttggatcctaaatttcttgtcatcaatacaccaaaaacccacttc

SEQ ID NO: 10094 - DNA, 3119 bp, Zea Mays
cagcgttggcttcgcaaccaacattccagatcaagtaacctgtccggcgtgcgaggagtggaagttgacagcacccgccgctttaaaccccgtccgtgtcccgctagccgccattgcagagcactgactgagcacaccacccaccagctccgaagtcatgtcccacctcgacgcggcctcgctcctcgccccctcgccgccgctggcaaagccccacccgcgcagccgcttcctctgcctcatctcctccatgctcgccgtcctcggcgcctccctcgcgggtctcctcttattcgcgctccaccccgcgccgaacccggtcccgaactacgcgtcgctcttcctctccctcggatccaacgacaccgccgcctcgcacctccgagcgctcactctccacccgcacgtcgcggggaccaaggcgaacgccctcaccgcccgctacgtgttcgacgcgctctccgcgctctccttccccacccacatcacgccttactccgtcctcctctcctaccccgtccaccgctccctctccctctcggcgccaggccgcggcgtcgtcacctccttctccctaaagcaggagacctaccccaacgacccctacgcagcagccgcggcggagaccatcccgacgttctacgcgtactcggcctccgggtcggtctccgcggaggccgtgtatgctaactacggccgcgaggaggacttctcttacctcgcctcccgcggcgtggacgtcgcgggcaaggtcgcgttcgcgcggtacgggaggatccactgcgaggacatagcgcacaacgcgcgcgccgccggcgccgcggccgcggtggtgtacactgacccgctgcagtacggcggcgcacccggtgaggggtggttccccgactcgcggtggctgccgcccagcggtgtgcaggtggggagcctcttccggggcgtgggggacccgacgacgccgatgtgggcatcgtccgagggctgcgagcgcgtcagcttggaggaggccatgaataccgatgacatgccgctcatcccagccctgccggtatcggctcaggacgcgatggagatacacagagccatgggcggggccgtggcgccggaggactggcagggccgtgaagacggacccgtttaccgcctcgggccagggccggcagttttgaacctgacatatcttgggaatgattcgatggcaacgattgagaatgtcttcgccattatcgagggcgccgaagagcccgatagatatgtcattcttggtaaccatcgtgatgcttggacgttcggtgcatctgatcccaacagtggaacagcagctatgattgagttagctaaaaggttttcaatgctgcaaaaacaaggatggaggcctcgaagaactattatcttctgtagttgggacgcggaagaatacggactggattcctgccttctacaactccccaacttgatgagttacttcagcaagtaactaaagtggttcaagaccctgataattcatctcagactgtgtatgattcatggattaaatcgagcactcctctccgggtgagttgttgcaacttgcttatccaacagcctaccttctatgtagtgctgagaatccagttagttgtcactataaaatagtgattgtattgttaccaagctacaagttccttttcagtttcagttccattcctcgagaattatgtggtttcaggaggacagaccacttcgacttcctgacaaattatataacattactcactattcactgcatatctcttgcgttaaggttcttagactaggtgatggaggatcagactattcagcattcgtccaacatgttggtattccttcgatgaatataatttttggagaaggaccaggatatccggtttaccactccttatatgatgactacgtatggatggcgaaattcggagatcctgcgttccgtaggcatgtggcagctgctagcatatggggaatgatggctttgaggttggcaaatgaagacatcctacccttcaattacatgtcctatgcaattgagcttgaggcatacacaaaaacggtagagaatgaagtgaagggaacaactgtcacttgttcccctctgtacaactcaatcagaactctcggagcggcagctaccaaagtgaataacgaacaaaaggaacttcaaaagctactcttgagcaagcagctgaacaaggattcactgaaaatccgacaactcaatgaccgtcttatgcagaccgagcgtgcattcactagcagggaaggcatcttcaagctagaatggtttaagcatctggtgtatggaccttcagaccagaatgactgggatactgcagtctatccaggtatagccaatgccatagccagcgcccggagcagcaacacttcggagtcctggaagtttgtacagcatgagatctacagagtagccagggccgtgacacaagcatctgctatactgagtggccgtctgacatgacaggattcaaaccatattcgttaaaaaagattgttactgtggatttcggaagttttgacattttttgaaactttcgactatgaaatatctgagttgcagagaaagaccgtgcaccacattagggcttgttcgttttgctctcaatccatgtggattgggtgggattggatgagtttcaatcccaaacaagtcaaaatctttcacaattttttccaatcccatccaatccacatgagataggaataaccgaacaagcccttaaaaggatttggtataggtcagaactttccgatagggggttggaaatttcaacttgggcatactttccaaacacaaaaaagaagtgtgcagtgttgtgcttagtgtctctcagttttatattaaagaatttgttatgcacttaagcacaactagtagtgagagttgagccgctttttagtacaggttccctatactcaagaatagaaaacaagtttacaaagcattgaggttgaagcttgattgaaagctctcatttcctgtacatctattggacaaatctccatttgtgcttaacaactataatcatatcccatatgacttgttggatcctaaatttcttgtcatcaatacaccaaaaacccacttc

SEQ ID NO: 10095 - DNA, 963 bp, Zea Mays
ttggaaggtggtggtgccggtgcatccgctgatcagccactgggtctcagtactccgcgatcgctccaccccttcccacgccttcaggagtgcaatgggggagctagggagattgctaatctatgaggcaacacgagattgccgacagtaacacggcagatccagtcacctgtgggcactgaggttgttgaatctgtcagtgagatggagccaataatgattgtacctattcttagagcagggcttgcacttgcagatctcgcaacatcaattttgccttcaactagaactttccatttaggtatggcccgggatgagacaacactgatggcctctgtttacttaaataagctacctgatagattcccgaaaggatgtaaaatcctcattgtggatcctatgctagcaactggtggaacagtcactgcagcagttgatctggttatggaacgtggagctgaaatcagtcagataaaaattctgttgctgcccctcctgccctcaagaagctcaatcaaagattcccaaggatttgtgtgtatacaggagccatggatcaaattgtaaacgagaaaggtttcataatcccaggccttggggatgctggagatcgcagctatggaacatgactccggcccttcggtgatggccatcgttaggaatttcagcaaaacccagatttagttgatgcctgcttattttcgtagatgagatttgtggttccactgaacacaaatctgtagttttgagggtctggacataatattttgacaatgtgatgtcaaatttcgcccttctattgtggcgatgtcctgataatggttatgagcttcatggagtgtttattttgagaagtgggatagcctgcaatcaccgtagctctaaacataacctatttgccttagctctgaacataacctatttgcttggtttcaagaatgatgggagtgctttgtttgaaaa

SEQ ID NO: 10096 - DNA, 970 bp, Zea Mays
ttggaaggtggtggtgccggtgcatccgctgatcagccactgggtctcagtactccgcgatcgctccaccccttcccacgccttcaggagtgcaatgggggagctagggagattgctaatctatgaggcaacacgagattgccgacagtaacacggcagatccagtcacctgtgggcactgaggttgttgaatctgtcagtgagatggagccaataatgattgtacctattcttagagcagggcttgcacttgcagatctcgcaacatcaattttgccttcaactagaactttccatttaggtatggcccgggatgagacaacactgatggcctctgtttacttaaataagctacctgatagattcccgaaaggatgtaaaatcctcattgtggatcctatgctagcaactggtggaacagtcactgcagcagttgatctggttatggaacgtggagctgaaatcagtcagataaaaattatatcagctgttgctgcccctcctgccctcaagaagctcaatcaaagattcccaaggatttgtgtgtatacaggagccatggatcaaattgtaaacgagaaaggtttcataatcccaggccttggggatgctggagatcgcagctatggaacatgactccggcccttcggtgatggccatcgttaggaatttcagcaaaacccagatttagttgatgcctgcttattttcgtagatgagatttgtggttccactgaacacaaatctgtagttttgagggtctggacataatattttgacaatgtgatgtcaaatttcgcccttctattgtggcgatgtcctgataatggttatgagcttcatggagtgtttattttgagaagtgggatagcctgcaatcaccgtagctctaaacataacctatttgccttagctctgaacataacctatttgcttggtttcaagaatgatgggagtgctttgtttgaaaa

SEQ ID NO: 10097 - DNA, 6212 bp, Zea Mays
ccgcgagctacagctttgcagcgctctctcttggctcgctcgctcgctcgcccgcctcgcctgcgccctctctttcactcctggctcgcttgcgttgtggagctcgagactgtcgccattccgctacgagaaaccctaaccctagccctcgcaccgccgcgggaggccgcgggagagaccgtgtcgcaccgcgccgtcgatcccgatccagacgccgtcgcgccgtgccgcgctgatcgagtgtggaggaatggaggacgggcagaatatcagattgcttgcagctagtttatttttccagcccagggtgaacttctgggtagtgtagtttgtcgtgggtttatcttctgcagaatagaagcaaatatttgtaaaagctgcttatagttctatatgatatgaaagtttgggaactatcaactgcaaattggccactctttctcaggcattagaccctaagggatactcaaggaatgtcacattttcatcccacacagcatgctagtgacaatgattttcagatgtggcaacagcagatgatgttcaagcacttgcaggagtttcagaggcagcaacaactacagcagtctgatcatggagccaggatgcagctctcttttggacagtttcatgctcctgcaaaacctttgcctggtgatcaattgtcgacaatgtcaaatgaaatggtcaacaatgagaccatgaattctggatggccacataattttacaggtggtgacctgagtttgacgagcaactcccagatgttgaacaatggtagcacaaattgggatcagattgttggttctcctgttgtgggcaatttcatgaatggttcaatgtttgtgaatgctcataatcagtcgatgagaccaatgggattagctacccaccaagtggatcaaactttttatccaatgcatgctaccagcagtagagggcctggaaaccagtattcccaatttttagggattcctgctgatcctcagagtgaagcggcaagggttggtccagttcagtcagaaaagacatccagaccattcaactcttcaatgaacgaacttggtcttcatatgcaaggtaccaccagtttgatgcataattttcgtggaaaagggggcttcttaaataacagtctgatgcaaagtcaaggtgataatatcagggcaggcagtccggttacaatgaatcaactacaacatggttttcaaacccaagattttcatggtaggccaaaccaagttgatcttcaagcgggcatgcaagagaaatcagcaatgcaggtagggcaagcgagtcgtggggctagccttgaccctactgaggagaaaatcttatttgggagtgacgaggatagcaactggggagctttgttgaggggtgacaatgacaatgtcaattctttggacaatgacaactatggtggtggctactcatctctacagagcggtagctggagtgcccttatgcaggaagctctccagtctacaaccagtgaaagtcccaaagaagagtggagtggcttgagtttccataaaactgagcaggtgatggctagcaatgcaaatttatcaggccgcaatggtagtaagtttactggattaagtggtgcaaacctagaaaatgcacgtccttcgccagcgtccagctatgctgatggaacaatgaataacccaaaccttgccagttttcagcatgtcataaggcctccatccgagcgaagggaccatatgtctcatgaatcttctaatgctcctgttaacaatcatcaatcaacttctgaagtcaacaaggggtactttcagcaaggcataaaacaaattcactctgatgcaaggcaaggacaagcgcacctagtaaatggaacctggccgcatcaaaagactgaactgctcagaagtaatttgcagtcaactggtgtacatgctacaccacctggtggacatggatttgggatgtcacaacaaattgcaactgatcacaatatcaacagagagtccagtaataatcaaaatgactggaaagctaacaatgcacttggacaagacatgtgcaatagccaaaatatctttaatagcaatgagaactcttggaagtcaactggaggtaatgccaattcagtccagagatttcagcagaggaggtctgatgtaagcgctactaatgaaagttcagatggtaaaaatattagcatgatgagctcaagcatgccaatgatgacacaggatcattaccagatggtcactagtcagagtggtgagcaaattggcatgaaccgtaatctgacacatagagctccagagacctctgagtcaccaggaaaaagcgcagaacaaagaccaggtgatttcaatcaggaatatctaaatgcaatccctaacgaaagagaaacacacatttcaaaccatggtcgacacataacaagtgattctgcccccagaaggcattctgtatctgctgggaaggaatctgaaaatttaggtcagtctagtcagcaagcaatgggatcttacatcttgcagaaccgtgctatggggagttctggaatgaacattggtctgtctccaggcaatccaatgtcaaatagtctgtttccacctcagacacgaaatagtctgcagcatcattttggcacaaactcccatgtttccaatagtatgccgtcagcaagtgagaaaatgatgatggcacaggaacaacttcaatcgcgacatggtctccccaacagctccagtgcatcaactttaggaggagctgatactggtctatcccagaatagagcagttcaaaacagtcaacatatgcttcagcttctgcataaggtggataactcaaggaatagcaatgtggttgctgacatacccaacaattcccttggcgttgtttctgcccagcaacaacttaaccattcttctttgcaaggatttgggttgagactggcaccaccatcccaactccaatcaatttcgggtaatttatggtctagtcagactaatgctgatggcaagcaattttaccaagatggcgaccgcacacagctaccttccacccctagccagtcactgactcctcagcatcaaaattctctatcttcaccatttcacagttcagaaacagaaaatactgggcaaccaattgcgtgtttcccccaattaggatcaggccaacagtatcctatggcagatgatagatctggtcctgcacccatgctgcagcagcagcctcagcaaagcaactctgcaacagtgttcaagaatgtatggacaaacatatcagcacagcgcctaactgcttccaacttatggagctctcagaaggcagatgatcaagggcagagggcatcaactccatcagatattgcaacaagttcagcgaactcacagaatcaatctccaaaacaagctgctgatagtgatgcaaagttagcatcttcccagaagggaaacctagagttgacaggaactaccgtaacaggaggaaacgaatccttgcagaagccttcttcagatgagaattctatcaatgctgtttcatcctttgcacagttgcgtcagcaaggcatccttggtgctaaacatggggagaacccaggagctaattttcaggctatgaatgtttcccacaataatgctaatcacagtggtggcattgttttacatggaagtccagcacctacaaacattcagcagcaaaattactctcttctacatcaaatgcaaacctcgaggcatatggatgttgatccaggcagtttatctggaaagacgacaaaacctgatattggttctgatgctgcacagattgattggaattctggtcagagatttgctcatgtaaccaataactcaaccaaatcgtctgcagataacattggaagccctggtgtcccagggtcattcacatcggacttgaaaatgttgagttttgcttcaaggaacgaggagagaaatccaaacataccttctcggtttccttccggagagtgcccgtctcctggtatgataaccacacaagatgataatcagaatcaagttcagcatatgggcacaggtgcaatgtcaaattctgatgaaagaagtgagaggccgaggataaaccctcaaatggcaccttcttggtttggacattacggaaactacagaaatggtcagagtgttgctacgcttaatgctgctacgcttaatgcgcagaagcccatggctttgccatttaattttccgaaagcatctcggaacaatgaaaataatagccatgctgaaaatagagttgaacctagccaatctgttaggcctgggcatcatctcccatcagcaagaatggaagctttggttccttccaatgtaaaagtgtcttcaatgatgagaaggcctaagaagcgtaaaactatggactccacacttgtttcttggcataaaataattgaaagcccacgaaaattgaggggcatcagcacacctgagatggactgggcttgggcagctaaccggttaattgagaaggatgaggcagaaactccagacgatgctcctttaaattatttgccgcggaagaggctaattttgacaagccagttgatccagcaacttctccctgctataccagcgaccattctgagagcacaagctgtgtctgcttacggaagtgcgacatacactctatcaatgttgacactaagggatgcatgcagcatggcatcatcatcatataactcttgctcacctgtggaggatgaaaataacccatctgaacaaccaagtgctaagaaaatggaagacagagtgtcaaaggttgtggaagtcttcgttggaagaatccggaagatggaaaatgactttataagtttgaacaagagggcctcgatgctagatgtgcaactggagtgccaagatctggagagaatttctattgtaaatcgtctgggaagatttcatggccggagccatgcagcggcagttgagagttcatcagctccagaaatgactcctcggagaatttttcctgaaagacatgtcatgtcttttgccgtgcctggaaatcttcctgaaggagtgtgctgtttgtcactctagtggaatgatcttcagttattttctagccgcaatgatgatcccgggtcgcgccctgtgattcccagtgctccttgtcccatgcaaagcatggtcaaacagaaggatcatatattgtcaaggggtaacttgagaactggaagcatcacagtaccacgatgaggcaggccggggacatgttccagccgatcaagtcagtgctggctgttgttgatgcaccttatatcaagtataggtccatgtatattgtggaaagtgaaggaaaaaaactgtggatctcccatcatttttctcgatgaagagtaattagcctcagaatttttttagagaagtcgatgcttactagcttagtgcatctggtgggtttcttgggtatttgtcgatctctaagaaatccgtgatgatggagtgttggcaggctagagtggaaataataatgtgagcctttctctgggttctttggttcctttaggatgggatgcaaattggctagtgtgtcctccagtctaactgaccacccctgttagtcagcagttaattattactagttttatgtagtgctgaaagcattcatggaacaattggcgggtaaagtgcttgggaattcttgtaacttgtgtacccgtgatgtttaaacgctaacgggttcttgtaaatttgaagtgccaatattcctgagtttgtatcgggttgaaatgggaaaatctgtacagatcctcatacgttttgttgccaagagcactcagtggaagaggcttcaagtccaagagttctgtgtgtgttatttgtgtctgcatgggcaatgggtgcagcattcagtatacaataatcaaaataagcattaacgagcatcagtgagcgattgttcgattcacctgtggcaatgtcaaattatgaaaagaaacagtgaagagtgtttcagcatgtagccatgagtctgagatggcatgtatatagtactgtggcggatgaggttcaaatattggtacattaaaagatatctttgtaggtgttcctcttgccatcttcttcgttaatgtgaatagctctgaatgataaatggtatcattttcagaatcctgtaaaataaaatgttaatgttactgagtactgaccactgcatgcctgcgataggaatcaactaca

SEQ ID NO: 10098 - DNA, 1080 bp, Zea Mays
atggagatgagggcagccccggacagggctacgcctagaatggtcgcggcgatgagtccgcccacgccggagagggggacgctggggaggagggttgcagctgtggctgtgtcggcgggctcgccgcgaagttcgccggacagagggagaccggcgctggtggagagaagctccgctacagcgctggctgttgaattgattgatgcagaaatagcccagtcattttcacaacaaaggaaacaaagagagggcggtggtcctacatatcatgaaacttttgcttatgctcaagggccgtttgctcgtgtacctgaagcattaagttctaagcctgggcatttatctgcttcccaacagagagtgtacgaggactttgttcatgtatggcatccccacaatcaaaatgtgggagctacaggttctggtctgtctggtgttgctactgtctcgagtactcttggtgtacttcgagcttacagtccaaattcgacatcagcatcctccagtaatttgtcaactgtccatatgggtggactaacatgtataactcagccgacagaactggggtctgaggatactgttatcgcacaatttttgagtaatcctgcccaagttggaccaagcgagtctcctgtcctatttagtggaacagttggtgctgcatctacattttctccattggcatctaatgaccttcctgaaataagtgctatggtgccccctccatcaacatctgctgatcgtctgggatctattttacctgaacctttgaatactggggatgctttggagagatacaaacaggttgctcagaagctggaagccttgattgctaatgatggtaaacatgtggaaattcagtctgttattgcagaagttcctgatatgttacgccggtgtgttagccgtgatgaggctgcattagtagtagcgcaaaaggttttcaaaagtttgtacgataatgcatcaaatagtgcttatgtctcctggcttctagcaaccttaattgcaatacgagatgtctgcaagcttgttgtcaaagagttaacaagttgggtggcagtcctgttttctgagtgg

SEQ ID NO: 10099 - DNA, 1413 bp, Zea Mays
atggagatgagggcagccccggacagggctacgcctagaatggtcgcggcgatgagtccgcccacgccggagagggggacgctggggaggagggttgcagctgtggctgtgtcggcgggctcgccgcgaagttcgccggacagagggagaccggcgctggtggagagaagctccgctacagcgctggctgttgaattgattgatgcagaaatagcccagtcattttcacaacaaaggaaacaaagagagggcggtggtcctacatatcatgaaacttttgcttatgctcaagggccgtttgctcgtgtacctgaagcattaagttctaagcctgggcatttatctgcttcccaacagagagtgtacgaggactttgttcatgtatggcatccccacaatcaaaatgtgggagctacaggttctggtctgtctggtgttgctactgtctcgagtactcttggtgtacttcgagcttacagtccaaattcgacatcagcatcctccagtaatttgtcaactgtccatatgggtggactaacatgtataactcagccgacagaactggggtctgaggatactgttatcgcacaatttttgagtaatcctgcccaagttggaccaagcgagtctcctgtcctatttagtggaacagttggtgctgcatctacattttctccattggcatctaatgaccttcctgaaataagtgctatggtgccccctccatcaacatctgctgatcgtctgggatctattttacctgaacctttgaatactggggatgctttggagagatacaaacaggttgctcagaagctggaagccttgattgctaatgatggtaaacatgtggaaattcagtctgttattgcagaagttcctgatatgttacgccggtgtgttagccgtgatgaggctgcattagtagtagcgcaaaaggttttcaaaagtttgtacgataatgcatcaaatagtgcttatgtctcctggcttctagcaaccttaattgcaatacgagatgtctgcaagcttgttgtcaaagagttaacaagttgggtaatatattcagatgaagagaagaagtttaacattgaaatcatttttggccttattcattccaagttgctgaatcttggggagtacaacgttcatttgacaaagctaattgatgggggaagaaataaggttgcaacggagtttgcaatgtctcttgtccaaacattgattacacaagatcctgttagcatatcagagcttcacaatgttgttgatgcaatatcgaaacttgcatggggaccaggttcacctgaatcgttgcaacaattgattgggatcgcaaggaataatgttctagctgcccaggtaaacaaagaggaaagcattgctaatgaaactacactaattgatccaaat

SEQ ID NO: 10100 - DNA, 2276 bp, Zea Mays
gttggttgtgcattactgcattgcatccagtaaaaaaactacagctcaaccaaatttagccgagcggagacgcacaagccggcgtgggctgcattacacgagacgatcaacaagggcagcggcccagcagcaacgaaccaccgcacaagcgccaggccgccagctcgcactctggtccagccacgcggcgccgctgccaccttcctctcaccgtgtacgtcttcggcgtacacgtctctctctctctctctcctcccctaaaccctacgctgcccttctttccctccccgtctctccctcccgtgcgggcggcggagctgatgagatcccggccatggcgggccccacctcgcggctcctcatcctcgcccgccgcgccgaccgacgcagatgcctcccttttctcgttccccgcgccttgcaggccgcccccccgaccttttctccggcgttgccgctacctccctgcctccccgcctcaacgccggtgatgagctattcaagtgcatttacaagtgtacatggagagaggccttcatcagaatatgcaaagatcaggaaggagtcactggaaacccagtttggaagaatattgggttcaagttcacgcaggcattttgctgaccgtggctttggtccattccttgctctatacagggctgctactatctcctttcatgttgtaaaactcactatttggcatttgttgctcaatgatatgcataaaagagcagaaaagtttcgagagaccttgatacgcttgggtcctttttatatcaagcttggccaagcattgagcacacgccctgatatacttcctagtgcgtactgtcaggagcttgcaaagctacaggatcaaataccaccgtttccaactcgcattgcactcaggaccatagagtctcagttgggttctcgaatttctgatttgtttgctgatatcagcccagagccgattgcagcagcatcactggggcaggtttacaaagctcatctacgatctggagagcttgttgcagtcaaagttcaaaggcctggaatggcgcccttgctgactctagatgcacttttgttccacatgattggaggacaaatgaaacgatttgctaaggctcgcaaagacctattggtggccgttaatgagattgtcagacacatgtttgacgagattgattatattttagaaggaaaaaatgctgaaaggtttgctactctttattcacatggttcaagtggggtcaattctgaagctagtacaagtatcaaggtcccaaaagtttactggaactatacatgtaaaaccatattgacactggaatggattgatggaattaagctaactgatgctgagcgcatcagcaaagccaatttgaacaggaaaagaatgatagatgagggtctctattgctcattgcgacaactgcttgaagaagggtttttccatgcagacccccatcctggtaatctagttgcaactgaaggtggatctctagcatattttgactttggtatgatgggagatattccgaggcactatcgtgtggggcttatacaaatgcttgtacattatgttaatcgggactccttaggcttggcgaatgacttccattcactaggatttgttcctgagggaacagatttacttgcagttgcagatgcgttgcggttttcctttggtgatgtcaggaggcaatcaaatgatttccagggcgtaatgaaccatttgtatgatgtgatgtatgaatttagtttctcccttccccctgattatgcgttggtgataagagctcttggttctctagaagggactgcaaaagcactggatcctgagtttaaagttattgagagtgcatatccttttgtaattgggagactccttgcagaccccagccctgatatgaggaaaatattgcgggagcttcttatatgtgacgatggatccatcagatggaatcgactggaaaggctgattgcagctatatctgaacagtcatcagaatcttcaagcgcatcaggagctgactccagtgagaacgccaatggaagtcctgagtggagatcatttgatatgcattctgtgattgcagctacagaagacctatttgatttcattttatcgaggaaaggatggcgggttcgggttttccttgtccaggacatcgttaatgcttcagacgtgttccttcaagaagcgacattcccatatgtatatgcgaaagtgggaaagataggggacctaaatccagagggtggtcacgaacctcaattcaggttgc

SEQ ID NO: 10101 - DNA, 1193 bp, Zea Mays
caaggcctcacccttcccctcctctcctctccacctcatccgtatctccctccctcttctcggcggccgtggcggcgccggaggactatgcgcggcctccaccgctgcccgcaccagctcctcctggtctctccaccgccgcggtccgcccccgcgtgccgccagtcggccaccgcctcatcgcggggcctcaggagctccctcgccgtcttctccgcacccggggctcgggtagcggcggcggcgcgcgagcagaagtggggccacgtggagggtgatgaagacggtggagaggagggcctaggggaggcgctccacaggacgcgggagctcgtggagtgcgccatgttcgcggccgtcgctgggctggcctacttcctcagcaattccctcgccattgagaattatttcagttgctttttcccattgccgatagtcatttcctcattaagatggggactagaagccagcaggaaaaccgtggctactgttttactgctattcacattatctggccctgtaaaagcgtcaacttatctgctaatgcatggagtagttggtctcatcatgggtactgtttggagattggagaccaactggattgtctccatcatcctctgctccattgtccgtgccctgggagcttgtggttacgtgctagtgtcatcgtttctgataagagaaaatattctcgcgctgataacggttaacattcatgcttcgttgacatacatcctgacggcagctggcgtgaacacaattccttccatgggcacaatatatctactctttgggacactgcttctacttaattgtgggttcttcgtcttcctcctgcatgtgatgtatacggtattcctggcgaagcttgggataaagccgtcgctgaggtcaccaagatggctggacagagtgatgtgaaaattttaggagtagggcatcgtacgtagtgactgttcttcctgttctgctgttttagccttgctgtttgtcgcccctacctatactgggacctgtaaccatggggtgcatctgtgcatgcaaacgcgacaagcaaaattcgggattatcaatcaatcatctgtgctactcgtgctctgttgatgatcttcttgttaaggcaaatgcgagaggaagttctggagtgccaataatctacggtgagcctgaaactaatactggcaccgttccat

SEQ ID NO: 10102 - DNA, 1985 bp, Zea Mays
gtaatgacttgaaaatcgtatacgacgacttggttctgacaagagaaggacggcgggtaacatcttgatcaatgggcgacgagagaaacttgcctttggaacatctgcctacgtgacccaagagacgctgctgatggcgacgctgacggtgacggaggccgtccactactcggcgcagctgcagctgccggactcggtgccgccggccgacaagcgggagcgcgccgaccgcgccatcaagcagatggggctcgccgcggtggccgggcaccggatcggcggccgcgtgtgcaaggggatcagcggcgggcagcgccggcgcgtgagcatctgcgtcgagctgctggcgtcgccggcgctggtgttcctcgacgagcccaccagcgggctcgacagcgccgcgtcgttccacgtcatgagccgcatcgccgggctcgcgcgggccgagagggtcacggtcgtcgccaccatgcaccagcccagcagcgaggtgttccagctcttccatggcctctgcctcatggcgtacgggaggatggtgtattttgggccagcgtcggatgccatccagttctttgattcgaatggttacccatgtcctatgagaaggaacccttcagaccacttcttgatgatgataaacaaagatttcgagagaagtttggcaataagaaacgaagcattatttatgatgaaacagcagggcgcagctttcacaaagaaaaggcaagctactttcttgaccaaatgtgtggtgttaaccaagagatcagtaatcaacatgcatcgagacatgggctactactggttgcggttcggtatttatatagccatctgtgtgagcattggcaccatcttcttcaacgttggctatggttttgcatcgatccaagcaagagcgtctatgttaatgtttacatcaaccctattgacaatgatgtcaatcgggggattcccctcgtttgtcgaggacatgaaggtgttcagaaaagagcagctgaatgggcattacggtgctactgcatttgtcatcgctaacacggtctcatcaacactgtacctggggatcatctccataataccgggcgcagtatgctactacttgaccgggctccagaggcgcttggaccacttcctctacttcgcggcggtgctatgggcttgcacgatgctggtcgaagggctgatgatgatcgtcgctgcccttgtgcctgatttcctgctgggcataattactggctcagggatacagggcctgctaatgctcaacgctggtttcttcaggcttccacacgacctccccaaacccttgtggaagtacccgacgtactacatctcctaccacaagtacgctacgcaggggctctacaagaacgagttcctaggtttagtgttcgatgatggtgtgttaggaaaggggctcactgttagtggtgactatatactgaggaccagcttgcaggtcgagatgggctactcgaagtgggtggaccttgcaatattgcttgccatggtcttcatctatcgggtccttttcttagtcactattaaagtaggtgaggcggtcaaacccatgattaaatgcatgtcgattaaagtttaagaagggttttatatgttttcttttcttttcttttcttttcttttctttactttagccagagatagatatgatatgatgccgccgtcagttggctgcacatcatcaatgcattgtaacagtataagcttgttcaacctccaacaaataatggaccttgacaaattgttgggagtttaagaaattcctacagaatacggaattcctgctgaagcaccagtgcttggatatgtatgggccttactaatgggccgtaagcctgagatgcagacaaatgctcaagagactcagcccaattgcagagctagtgaaactcgagtcctagggcaactgtgtatgtacctctgaccaacctataatagcttacacgattagaagatatttc

SEQ ID NO: 10103 - DNA, 2592 bp, Zea Mays
ccgcaacaagcatatatatcaccaaagctggacgaagcaaaccgagccaaaacgacgtgtccagacacgaaaatacacagcatagcagtcgtcgtatagatatacagtgaacaagtgatcgttggtccatggcagcctcgccgctgccgagatgggcgccgacaccaagcccgaccagaccactcagggtgtcgagcgccggcggccaaacagccgtgtcttcgtcatcatggagctgggcattctgccgctcgttcatcggctccgccgtcgtctacccgccgtggaggcgctctacaccaccgccaccgccaccgccagcgccagcgggtgatccggcggcggccaatgctgctgcggacgatggtcgtcgtcacggccggttttgctctcatccgttggactgtgttggagccagagactgcagccttccagaggacgccggcggcggccgtgaggtgttcctgacatgggaggatctttcggtgacagcgtcgtcgtcgactggcgggaaggcgaaacccgcggtaattctcgacaagatcagcgggtacgcgcgccctggtgaggtgctggccgtcatggggccttcggggtgtggcaagacaaccctacttgatgccctagctggacgacttggttctgacaagagaaggacggcgggtaacatcttgatcaatgggcgacgagagaaacttgcctttggaacatctgcctacgtgacccaagagacgctgctgatggcgacgctgacggtgacggaggccgtccactactcggcgcagctgcagctgccggactcggtgccgccggccgacaagcgggagcgcgccgaccgcgccatcaagcagatggggctcgccgcggtggccgggcaccggatcggcggccgcgtgtgcaaggggatcagcggcgggcagcgccggcgcgtgagcatctgcgtcgagctgctggcgtcgccggcgctggtgttcctcgacgagcccaccagcgggctcgacagcgccgcgtcgttccacgtcatgagccgcatcgccgggctcgcgcgggccgagagggtcacggtcgtcgccaccatgcaccagcccagcagcgaggtgttccagctcttccatggcctctgcctcatggcgtacgggaggatggtgtattttgggccagcgtcggatgccatccagttctttgattcgaatggttacccatgtcctatgagaaggaacccttcagaccacttcttgatgatgataaacaaagatttcgagagaagtttggcaataagaaacgaagcattatttatgatgaaacagcagggcgcagctttcacaaagaaaaggcaagctactttcttgaccaaatgtgtggtgttaaccaagagatcagtaatcaacatgcatcgagacatgggctactactggttgcggttcggtatttatatagccatctgtgtgagcattggcaccatcttcttcaacgttggctatggttttgcatcgatccaagcaagagcgtctatgttaatgtttacatcaaccctattgacaatgatgtcaatcgggggattcccctcgtttgtcgaggacatgaaggtgttcagaaaagagcagctgaatgggcattacggtgctactgcatttgtcatcgctaacacggtctcatcaacactgtacctggggatcatctccataataccgggcgcagtatgctactacttgaccgggctccagaggcgcttggaccacttcctctacttcgcggcggtgctatgggcttgcacgatgctggtcgaagggctgatgatgatcgtcgctgcccttgtgcctgatttcctgctgggcataattactggctcagggatacagggcctgctaatgctcaacgctggtttcttcaggcttccacacgacctccccaaacccttgtggaagtacccgacgtactacatctcctaccacaagtacgctacgcaggggctctacaagaacgagttcctaggtttagtgttcgatgatggtgtgttaggaaaggggctcactgttagtggtgactatatactgaggaccagcttgcaggtcgagatgggctactcgaagtgggtggaccttgcaatattgcttgccatggtcttcatctatcgggtccttttcttagtcactattaaagtaggtgaggcggtcaaacccatgattaaatgcatgtcgattaaagtttaagaagggttttatatgttttcttttcttttcttttcttttcttttctttactttagccagagatagatatgatatgatgccgccgtcagttggctgcacatcatcaatgcattgtaacagtataagcttgttcaacctccaacaaataatggaccttgacaaattgttgggagtttaagaaattcctacagaatacggaattcctgctgaagcaccagtgcttggatatgtatgggccttactaatgggccgtaagcctgagatgcagacaaatgctcaagagactcagcccaattgcagagctagtgaaactcgagtcctagggcaactgtgtatgtacctctgaccaacctataatagcttacacgattagaagatatttc

SEQ ID NO: 10104 - DNA, 2733 bp, Zea Mays
gcatatatatcaccaaagctggacgaagcaaaccgagccaaaacgacgtgtccagacacgaaaatacacagcatagcagtcgtcgtatagatatacagtgaacaagtgatcgttggtccatggcagcctcgccgctgccgagatgggcgccgacaccaagcccgaccagaccactcagggtgtcgagcgccggcggccaaacagccgtgtcttcgtcatcatggagctgggcattctgccgctcgttcatcggctccgccgtcgtctacccgccgtggaggcgctctacaccaccgccaccgccaccgccagcgccagcgggtgatccggcggcggccaatgctgctgcggacgatggtcgtcgtcacggccggttttgctctcatccgttggactgtgttggagccagagactgcagccttccagaggacgccggcggcggccgtgaggtgttcctgacatgggaggatctttcggtgacagcgtcgtcgtcgactggcgggaaggcgaaacccgcggtaattctcgacaagatcagcgggtacgcgcgccctggtgaggtgctggccgtcatggggccttcggggtgtggcaagacaaccctacttgatgccctagctggacgacttggttctgacaagagaaggacggcgggtaacatcttgatcaatgggcgacgagagaaacttgcctttggaacatctaataatgttacaagcagcggtggatggtgcaccatgcatacctgtcttctcattgcattgaaggcctacgtgacccaagagacgctgctgatggcgacgctgacggtgacggaggccgtccactactcggcgcagctgcagctgccggactcggtgccgccggccgacaagcgggagcgcgccgaccgcgccatcaagcagatggggctcgccgcggtggccgggcaccggatcggcggccgcgtgtgcaaggggatcagcggcgggcagcgccggcgcgtgagcatctgcgtcgagctgctggcgtcgccggcgctggtgttcctcgacgagcccaccagcgggctcgacagcgccgcgtcgttccacgtcatgagccgcatcgccgggctcgcgcgggccgagagggtcacggtcgtcgccaccatgcaccagcccagcagcgaggtgttccagctcttccatggcctctgcctcatggcgtacgggaggatggtgtattttgggccagcgtcggatgccatccagttctttgattcgaatggttacccatgtcctatgagaaggaacccttcagaccacttcttgatgatgataaacaaagatttcgaggaacttgaggaagaagggtccaccgcccttctgttaccaagtgcgactgaagtcatagaaactttggtagattctttaatgtctcagagaagtttggcaataagaaacgaagcattatttatgatgaaacagcagggcgcagctttcacaaagaaaaggcaagctactttcttgaccaaatgtgtggtgttaaccaagagatcagtaatcaacatgcatcgagacatgggctactactggttgcggttcggtatttatatagccatctgtgtgagcattggcaccatcttcttcaacgttggctatggttttgcatcgatccaagcaagagcgtctatgttaatgtttacatcaaccctattgacaatgatgtcaatcgggggattcccctcgtttgtcgaggacatgaaggtgttcagaaaagagcagctgaatgggcattacggtgctactgcatttgtcatcgctaacacggtctcatcaacactgtacctggggatcatctccataataccgggcgcagtatgctactacttgaccgggctccagaggcgcttggaccacttcctctacttcgcggcggtgctatgggcttgcacgatgctggtcgaagggctgatgatgatcgtcgctgcccttgtgcctgatttcctgctgggcataattactggctcagggatacagggcctgctaatgctcaacgctggtttcttcaggcttccacacgacctccccaaacccttgtggaagtacccgacgtactacatctcctaccacaagtacgctacgcaggggctctacaagaacgagttcctaggtttagtgttcgatgatggtgtgttaggaaaggggctcactgttagtggtgactatatactgaggaccagcttgcaggtcgagatgggctactcgaagtgggtggaccttgcaatattgcttgccatggtcttcatctatcgggtccttttcttagtcactattaaagtaggtgaggcggtcaaacccatgattaaatgcatgtcgattaaagtttaagaagggttttatatgttttcttttcttttcttttcttttcttttctttactttagccagagatagatatgatatgatgccgccgtcagttggctgcacatcatcaatgcattgtaacagtataagcttgttcaacctccaacaaataatggaccttgacaaattgttgggagtttaagaaattcctacagaatacggaattcctgctgaagcaccagtgcttggatatgtatgggccttactaatgggccgtaagcctgagatgcagacaaatgctcaagagactcagcccaattgcagagctagtgaaactcgagtcctagggcaactgtgtatgtacctctgaccaacctataatagcttacacgattagaagatatttc

SEQ ID NO: 10105 - DNA, 683 bp, Zea Mays
cagatatgcatcagcagtgtgtaccatatgatgcactggagggcaggcttgagcacgcggccagcctcgcgaggacgaccagcttctgcagcgtgtccgctgccaggaaccggagattcatggcgtacaggtcgttggtggagatgaagtggaaggatttgaatcaagaaatcgttggagagaatgttatccaaaggaaatattttaattggccatagcttacatagagatttatgcgccttaaagattgattactctcaagttattgatacaacatacatatttaagtatgcaaatttaccgactactgcatcaccttccttgaacagtctgtgcaaggctgttttggagtatttagttcgagaagaaggagaaccacataattgcttaaaggatgcagaagctgcaatgaatctagttcttgcaaagcttaagaatgagtttaatgaccccattgaaattgctgcaagtattgtaagcgccaaaaaaagatgttcttaaatcttaccattagtatagatgatgccaccttacttctttgtggtaccttcctaggtaactgaatctgattttgtgaagttgctcgctcatagaattctagtgtcttattatgactatggatgagacttttgtgatgtaattgatgagactatggatttaaatattattatgtgattgtgtgt

SEQ ID NO: 10106 - DNA, 1248 bp, Zea Mays
cacacccgtgtcttccaccaagaggaagccgccgccgatgccgcctccgcctgcatacccgctcccgcccgcgcccgccgcgcttgccggtgcccccgccccggccaaggtttgtgtcgctactcgctagactagaattccgcgcgcggacctttgccggccgagccgttctgcggcatctcgacggggacaaccatgcgaatttccttggcgtccacgttgacgccacctgagccaccaccggtgaaggccggctggccgctgacctccgagacaggggaggcgcccgagctccacaacggccgcgggcctcgacgactgggctaaggccgagcgctcgtcgaagttggactgccgctgcgtcagccccctcgaccgctgcgacaccgacaaccagcgcaccgtgacgtggagcctatcgtcctccgccacctcggcctccatctcggcgcgcccgccctacagcgacaacacgtccgggtccacatgcagcgacgcgatggctgccgtggtgtcagggaactggtccacgatgagcgtccgcgcggcgcagaacttgaagaggaacagcagcagtgtgtaccatatgatgcactggagggcaggcttgagcacgcggccagcctcgcgaggacgaccagcttctgcagcgtgtccgctgccaggaaccggagattcatggcgtacaggtcgttggtggagatgaagtggaaggatttgaatcaaggttcatttattttcaggcgtggaaagtattgcagatagatgtctctattttcacgtcatcattagttgatgttcagccttaaagattgattactctcaagttattgatacaacatacatatttaagtatgcaaatttaccgactactgcatcaccttccttgaacagtctgtgcaaggctgttttggagtatttagttcgagaagaaggagaaccacataattgcttaaaggatgcagaagctgcaatgaatctagttcttgcaaagcttaagaatgagtttaatgaccccattgaaattgctgcaagtattgtaagcgccaaaaaaagatgttcttaaatcttaccattagtatagatgatgccaccttacttctttgtggtaccttcctaggtaactgaatctgattttgtgaagttgctcgctcatagaattctagtgtcttattatgactatggatgagacttttgtgatgtaattgatgagactatggatttaaatattattatgtgattgtgtgt

SEQ ID NO: 10107 - DNA, 1688 bp, Zea Mays
agtcctgatatcataattgccacgccaggaaggctcatgcaccatttgaatgatgttaaggacatgactctttgttcagtggaatatgttgtgtttgatgaagctgattccttgttcagcatggggtccgccaaacatttgcatgatattctgaagaagctaagtgatacacgacaaacgttgctttttagtgccactttgccgagcgcacttgcagattttgcaaaagctggactgcgtgatccgcacactgtgaggctcgacttggacaaaaagatcagtcctgatctcaggctagccttcttcacactgcgccgagaagagaagcttgctgccttactgtatttggtcagagagcgtatcagctctgaggagcagataataatttttgtttcaaccaagcatcatgtggagttcttgaatattttgttcagagaagagggtttagaaccttccctatcctatggtgctatggatcaggaagcgcggatgattcatatttcaaaattcagggcaaggaagaccatgctgcttattgtgacagatgttgctgcgaggggcttggatattccattgctggataatgtagtgaactgggacttttctgcaaagcctaagttatttgttcatagagttggtcgagtggctagacaaggcctcttagacctgctccaacagaggaggaactcctaaaagacatggacggtataaatatgaaaatcgatcaagctattgcaaatggggaatcagtttatggacgatttcctcaaaccgtccttgatcttgcctctgatggattaaaagaagttattagtggatgtacggagttgatagcattagaaaagccatgtgctaatgctttccggttgtatctcaagactcgttccatgccttcaaaagaatctatcaaaaggggttctaatcaatggctagatgtgatgaagaagaaacgagaagttcatgaggggattatcaatttagttcaccaaaagagttctgaggatccaaggccagaggttgaagaggtggatgacattccaaattgggagaaaaaagaagtttgtggcaagaaacggaagttacagaactttagagacgaggactactacataagttcagtacctcaaaaccatcatttggaagctgggttgtcagtgagggacaatgaaggatttgttgaaaatagattggatgcagctgttcttgatctagttgacgatgaagcttctggtatgcaagcacagagaagtcgatatcactggatgaagaacaaatttgtcaagttgaatgcaggggatcgtgtcaccgctacaggaaagatcaaaacggaaggtggtgcaaagataaaggcatcggctacagggatatataagacatggcagcagaagacacataaatcaatcaatattggtgggaaatctggcaactttgcagaagagcgcacacccagttcaggcgggtatcagagaggcaacaagaagcatttcgcggggccatggccacagatctataccaaatgccaacgtgccctccgaaataaggaaccccgagcaaatgcagaagagcaggcagcagaaggcaatggaaatcacgcggttgaagaacaaatcggcgaaagacgggaaattccagaagaacaggcggcccgatgggaacgggttcagcaaaggggctggtgggaaaggtaa

SEQ ID NO: 10108 - DNA, 2838 bp, Zea Mays
ccgagcggcccattggaaacataccctcctctccccgcggggacatgatactcctgcaaaaccctcgacctagacggtgcagcgccgccggcccgccgccgcggtctctgcctctgcctcgtcatggcgcggacgatgctgccgtctccttcgcctcacaccgccgtcaagagagaaatcgaggacgcagagcccaccgctcacacgccggcgtcactgcctcgcaagaagcgccgccgtggaggccgcctcccagtgactcccacccagcttcccctaagccctcccctcgtcacgccccagaccatcccatcggtggcatcaggggacgcgtccttcgccggcctaacgccgacgcccgtgttctctgccgtcaaggacgagtccggcgcggacaccggggtggggagcaacgggagggcgtccgggaaacggaatgactcgcaggacctccgctccgtcccgaggcccgcggcagcggagcctcccactctctggctcaaccgccggcgtctgggcctcatcctccacgagctcgcgggagcgcaccggtggcgcgacgcggccagcgtcgtctcgacgctccttagcggcaaccgaaagcccgactcctacgaggagacgcgcagaatgttcgtggtggccatggagattcataagcggcttgctgaggacagcagcgtgcagtacggtggcaggagcagctactacctcagaacgcagaagttgttcaatgtttggatgcgaaagctgatttggtttccttcttgcccaaaaaaaaacttggttacacttgaactggccctattttacctttcacaaggcaacatcgacaatgcacacatcgcaacaagaacccttatcgccaatggtaaactgcagacagaaccaatcttaaatctcgttcatggtttaatatcatttgataaatggaactgatcttctggttaattcagatgaggatagcatgaatattgatgagtccagtttggctacttgctcttcagaaagttctatcaataatgagaatatagacaaaaaaatgaataacaaacctggttttcttcaccctaaagaggaaatggatccacttgaatcacaaggaaatgaaaacttgcgaagcatatttttggatacctctgatggtcctacttgtgggactcgaacccgggactttgggtgctacttgagctgtgtgctactacccagtcaagtcgcaggcttgtttgcgatgatgcagcttcatttgtgttttctgtcagaatagtcctcagactgatccacctcattaagctgaactaccaccttatcagattggagcagagcttgctgcctttaaagctgaagttcgctactggggcttccaatgattgttttgataaatatatgaagtacaagtcagtgcctaataccttgtatgaagatgcagaaaaatgtctaagattggctctttattcaaatccgccagtgatggctgcattattgccactaatacagattctcctcctaggtgataaactgaaagttgcactaaatgagcttgagaaggcctgcctcagtttagctacagccctccctttcaggttgagaggtaggctgctggaagagtatgaccaaaaccaggtatcaaccattttctcttgctatgaggaggctttgagaagagatcctacatgtagctactccatggagaggctaatcaaaatgcataaaaaaggatattataacaccatccaactacttgaggcaatagctttacatttagattccgtcaatgggaaatcctgcatctgggaagagcttgtatcatgtttccttcggcttttttctgacaatactgctgactacgaggattgcatatcatgtactaatacccatgggggtgaatcattggaggcttccagtaaattttcttcagtcttttttgagcagtttaccagagaatcatggaaggcccgatgcagatggtgggcacgccatcatttcagccaaaatgcttatacatcagaagctcagtcaggtgattgcaagctcctggctgccaaggcagcttgtgctgctcatttgtttggaccagaattcccatatgtcaaagcagttggtgtctatattgcaaagcaagaagctctggacgaaatcagtgtcctagtcagaaataagcagaactctgtcaggctattacaaactttggagaaactaacacgatgattctttcaccattgcttggtgttggtaattagcataatgttgacgatattttatagaccccttgatgaagcaaaattttgtaggatcaatagcatgtcactaatgtagtgtgttggcagaaaattttgtagtatcaatagcatgtcactaatgtatgtgttggcagaaccttggcgctggatgaaatcttggcgcgggtgatgccatacgttgtgtagcagcaaaaaaagcaaagacatcagaaacgtaagagatagaagccatttgctcccttgttttttttttgtttttgcgaaatgtaagtacaaggccgagaagagtcctgaaaatttatacttatttcattatccctggagctgcactgagggtctgtttgacaactttacaaatgaaaattttaagcacatgtgatcccttgtaacggttcctcttgtagtcccttgtaggtttctcatgtagtttgctgttcagataaaaacgaattcaactgcagctcagccttgtgaattaagatggactacatttaagaataattgtctctagagagttggatatagagaaaaaaatgaagaacaatgcaggggtattgtaatcactatcctcggtctgcctgagatgcccagatcgtgg

SEQ ID NO: 10109 - DNA, 1711 bp, Zea Mays
tagcattcaggccttcgcatgctgtggtttccaatagtggtgtcattcctgttgcacctagcctggacactataggttggtttgcaaaggatccaagtgttttgcatcgtgttgggcatcttcttcttagacttccttatgctggtattcgccaaccgagaattttttacatagcagatgattgctttgatctttcaaagatacctgctaggagacttactcaggtggtgacaaaatctgtggagaagctctttggaagacaagtccggcatgtgaatctcgaaaattatttgagttcaagaatatccagcctgggtaactattcaaatgggcataagaatggggattcaaagttccctctgttgctagcactttgtaactccatgatatcacttcacaagaattcaaagataagcatatggagtggataaattcagttaagcctgctgtggatgcacgcatagtcagtgatttgtctgaggatggtgattcagatattgatggctgccaaaatgtgaggaaagaagcgcgctctgctctaagtggacttcttaaggatgatgggattctggtgattccaactgctttggggtgccccccgaagcttaacgctaaggaactctcgtctgaaagctacaattctcagacactacgccttttgtctttagctagcatgtcagggtgttgccaggtttccattcctttgggtacacatgataagtgccccatttcagtttcgttgattgctaggcatggtggtgatcggtttttgttggacaccacacaaaccatgtatacaaccatccaagagcaagtggagatactagcgaaatctagtgtttcaagtaaacaggcgatgaatgaagaagcagctgaagctgctaaagagaaaggtaatgctgcatttaaggaaaaacaatggcaaaaggcagtaaatttctacactgaagcaataaagttaaatggaaaagtggctacatactacagcaacagagctgctgcctttctagaactaactagctaccgtcaggctgaggcagattgcacaagtgccatcgaacttgattccaagagcgtgaaagcttatttacggagaggcactgcaagggagatgctaggttattataaggaggccgttgatgatttcaaccacgcccttgttctagaaccaatgaacaagacggctggtgttgccatcaacaggttaaagaagctgtttccttgaatatgaagctgcatgaagatatgataacctcatattttgtgcacacacaaggggtgggattgaagtacctgagttcaaccgacggatgctgatcacagtttgagctagtgggaacggatttcaacactgagatcaggttaagggtcaatttagcggtttctctccccacccaaagttttggaaaagcaaaataaagaaggttttttgggaaccggaaagcagtttacgggtgtccgccatccccaccatgtataatatagtttcgccaattatttgttcagacgctttgccaatcgaactttttctgccatgcttacctgtacccatctctccttgccgttctgagcggcagcttttttgcgggctcgctctgaaaacggctgccaccagtgaggtcgctcgtggaggctgttaggcggccatgtgctgacgcgcagtcgcttcgccggctgaacctttcagccctttcagtttcggttgtttgct

SEQ ID NO: 10110 - DNA, 815 bp, Zea Mays
cccaatcctctcttgtagccacggccgcatgctcgcgcgcccgcgccgcctttctacttccaagtgcagctcgcctcggcttgccagcgccatcttttcttcctcccactccctcacctgaccggtctgattctgggtcgatgtcggtcgccatggtccgacccatggtcggaggatagcggagaccagtgaaggccttgcgcagaagagtggcggggaggagaagcgacggagaagcgcgctgccgcgctcacatggccgaccaagtttatgcagggtactggagttgggaacacaatggtgtgctgttggagcagttcccaacgaaggatgtgatcgaagatcttgacttgggcctggataacttgctttcacttgagcaagtaatagtcaaagtcaactgcttaggtgctactgctgcacaagtgcaggagctggaggctgtggccatgcgtgccgtggaaaatcatgccaaccgtccaaccataaaaatggatcgattatatgaagaaaatatcttatctgatgaaaagctggaggctctgcttcagcagcacattcaactagaaggcggcgtgctccagctgaaggataaacctgacgctttcttcatcagccagctacggttgtatcgacatcttcagaaagccgttatttcctacgactgtgcgggtgccagcatgtgtgaggtgctgaaagtggaagcagcttgtagacatgcagccgaggttcatcctaaccatccaagtattgaactgatcagaacaaataccgatgaaatggcctcctcatctgaccatcctagcacagaggtt

SEQ ID NO: 10111 - DNA, 1973 bp, Zea Mays
cggcgtcgaccaatcccgcggcggaacgtgttaggcggccgacctcaggcctcaccccttcccacggaggcccccgagtcgccattgcttgccctcgctcggctcgatccccactctaccgtgccagccaccaaccccgcccgcgcctccgctactaaagccgaggcctcacccaccaggccaccgccatgctcctccccttcctcagatcccacccgctcctccaccacgccgctcgcctgtcctccccgcgcactcgcctgatcctccgccgcgacttgctcccgctcgcgcgctcccggcctatccgcatggcggcccattccggctccggctccggcgccagctcccctgccccagcgccgcctgctgccgtggtgcaaaagtcaaagatcaaattttgccctgcttgtggaagtccaacgaaattggccatacctgatggtgatgagaagatgagggctgtttgttcttcttgtggaggagttcactacgaaaacccaaaaatggttgttggttgccttgtggagcacgataataaggttctcctttgcagaagaaagattgaaccggcttatggtctttggacacttcctgctggttatttagaggtgggggagtctgctgctgaaggagcctctagagaaacattagaagaagcatgtgcagatgtagagataatctcaccttttgctcagttggatattccactgattggtcaaagttacattattttccgagcaagactgaagacccccaatttttcacctggagcagagtcgctggaatgtgcactttttgctctcgatgatataccattcgattctctagcattttcttcaatcgttgtcaccttgaggatgtatactgaagatgtgaggtctggaaacatcaaatatcactattgcattataaacaaaaggtaaatcgtccctttttgtagtaactgatcattgttgtcgttcgtaactctgattgcttttacaaagtaagtttatgaatcttgctctagtttccttgtctcactgcaaattttctgcagcactcacctatatgacaatcttgcagcatgttcaagtttacgaatactactctagtttcctatatggtctataacttgttttgtgcaacttgatttacagattaggagccagcccgtcagaccttcggagtttcgatattgataaccatatagctgtgtgaggttttaaaggttctaaaacccttggcgattgaggggaatggttttggcatacaacaggcacacggccacacaacaaaaacatcgccatcagatagaccagtgttgaatgctgaatccccatgggagccttttttggcgcctctctgcggattggaacagatttagagggtggaacagatttagagggtgtttgatttttatggactaatttttagtttctctattttattctattttagactctaaattgacaaatacggaaactaaaataggattttagtttctgtatttggtaatttagtattcagtaatttagagactaaaatgaaataaaatgaagaaactaaaaattagtacttagaagccaaacactcccttaaagtaggtgctggaactgtaaatggttcgtatcctaaagcctggtttagcccttttaggagattctgcgtttggatgggagttgggaggactgagaattgtatcatagtgcagcaaatcttggttgtaggattgagctatcctgcatgccatacttgtggcgcttcttcagcgaccgcatgctgtgatctggttacaattgaattatgtgagctcttttttaaccatttatttcagttgtaaagcttgtgttgcattatttttttatcataactgagtgctgaatacaccttcaggcttgctcgttcgtggttatttgcaccctcaaaacaggtttcgattgtaaatatagatgtaaacctcgtgttgccaatataaaatttattcatgg

SEQ ID NO: 10112 - DNA, 1710 bp, Zea Mays
tattttttcatctcgtcaccctagtagaatcattgtcatcttcgttgccctgctagtcccgtagcttctctccctcctcgctcctcggctcctcgcttgtcgctcctcctcagccctcaccgcgttccccgagcacctcgtcatcatggtcaatggcctcgtcgggagcgcggacgattggaagttcgcggcagagcagtttgtgaggcggatgccggacaaggtgatcgtgcaccgaagtcagtgcaactctgccactcagacatttgatggtgttgatttaatgggtgaaaggttagcaaatgaggttctatcagttgtagagcaaagacgaggtgtgaagaaaatctcgtttgtggcacattctcttggtggccttgttgccagatatgctataggaaggctctatgaacctaatagtagaaggaaatcttctgggggggagagcagagatgatgttgtgcacttgaatggtcacattgctggtttagaacctatgaatttcataacatttgcatcaccacatttgggttcaagtggaaacaaacagctaccttttttatgtggccttcctttccttgagcgaagagcttcagaagctgcgcatttgattgttgggagaactggaaagcatttattccttacagacaatgatgatggtagacgcccacttctccttcgaatggttgatgactctgatgatttacagttcagatcggcgttgcgttctttcaaacggcgcgtagcatatgctaatgctaattttgaccatatggttggatggagaacatcatcaatccgacgtcagcatgagttgccaaaacatcgtcttcttgttcgtgatgaaaagtatccacatattgtttatgttgaaaaggaagttacagacaacaatgaaacgaaggcccatgctgatcattatgatccagaagaggagatgataagaggccttacgcaagttccgtgggaacgtgttgatgtgagcttccagaaaagcacccaaagattagttgcgcataacacaattcaggtgaaaagctattggctaaactcggatggagcagacgtgatcaaccacatgatggacaatttcatcgtctagtccatggaggcatgaagcctacgttgtgtcgatggaggttgcagtttcccatcccaggaaatgtggttgattctttaggcccgtttgctgcaggcgcagagcagagccccgccctcgatgcttatcatcctgcaccatcagcaaggctagttcgttcaactgtatcataatctgtcccctcctttgtatacttgtattccgcaactaagctagtaaatagatgttgctggaaatagaattcttctatctggttcaattggagttgaagttcgaactgaaacttgccatattcttgtgatccatcgacgtgcttattgggcacggtacggtacttcaatcaagctgtttttttaggaacttgaagtttttttttttgggaattgtatggataacaggatcgctcttcagagagctcctgtcgttcttaaagagaagctatattctatgttgaaagtaattcttgcgattttttttttgtttttgaaaatgtattcttgcgatttcaatagactctaggtataacgtgattgtggcgtgtggcgtggagcgaatgaggagcgttttttcagctcgtagtcttctaattcatttcaagcaatcattgatag

SEQ ID NO: 10113 - DNA, 1795 bp, Zea Mays
gccagaacaaataacagagatcgtatgcatttaatagatttgtcgatgagataaacacccttgcagcttatcaatggtgggaaggatctatttacagtattctttgtatacttgcgtaccccgtggcttggtcatggcagcagtggcgtaggagaaagaaattacagagacttcgtgaatttgttcgctctgaatatgatcattcatgcttacggtcttgccgttcacgtgcactctatgaaggcctcaaggtgactgcaaccccagatttaatgctagggtatttagatttcttccttgggggagatgaaaagaggcctgatcttccacctcgtcttcgtcaaaggtttccaatgtctcttatctttggaggcgatggaagttacatgactccgtttttacttaatagtgatagtgtgcttactagtcttatgagccaggctgttccctcatggatatggcaccgtcttgtagctggattgaatgcacagctgcgtttggttcgctgtggaaatctgaaagtaacgtgtcttccagtcatcaactggcttgaaactcacgcgaatccttctttagctgagaatggtatccgcgttgatcttgcctggtttcaagctacagcactagggtactgccaatttggtcttcttgtttatgctgttgaaggagatgctgcacttactgaacctgatgggagccctagaataaaaacagagcaacagacaccaaggatcactggtggagttctcgatagtaatagcttaaggacgctaaacgacaggagagatttattttacccattttctcttatcttgcacaattcgaaaccagttgggcaccaggatcttgttggtctggtaatctcaatactgcttcttgcagatttcagcttagttttgcttacttttctccagctgtattcgtattctatggtcgatgttctcttggttttgttcattctacctcttgggattttgtcgccttttcctgctggtataaatgctctatttagtcatggaccgaggcgatcagcaggccttgctcgtgtatatgcattgtggaacataacttcactggtcaatgtcgttgtggctttcatatgtggttttgtacattataagtcatcaaccaaaacacacccaagcgtgcagccctggaacctgggaacggatgaaagcagttggtggctcttcccaactggactcatggtgttgaaatgcattcaagcaaggcttgttgattggcacgttgctaatttagagattcaagaccgtgcggtatatagcaacgacccaaacatcttttggcagtcatgacacctggtgtaactgaggtccttctggaaagctttttacaactcgattttttgtgagttgataaaaggaaagagtgcgggcagcaaggcctttctttattgaccagaccaaagaagcagctacagaggttatatagacgcatacttccgcatcccccgctgataatgtgcagttgcaaccggtgttctgttgtatatataaaaggtgttcttgatccattctttgtaggatttagacaccatagagtttataaacaatgtcaaaagctaacctaagagagacatcggagggatgtggatttgttgttctattgctaccgtgccctggcccttgatgtttgttgagatgggcagaggggggcaactaaaagtcagggagacgcaaaagcctcttgtatgtgatcagatgggtaaaacaagttattatattattaacatgctccagggttttcactaacagcaaggctgatagactgagaa

SEQ ID NO: 10114 - DNA, 1984 bp, Zea Mays
ctcggcctcggccgtatttaacacagcccctcgccgtccatcgacattctccctccggcctcacactctctttctcgcccgtcccacctcttttcgctgataagcacgccgccttctccagcccgtccacccccgccgctgcaggtcccgggcgctgctccccaccaccggcggaaaaatgtcgacggagtgttcggacctcggggacgagttctggctgccggaggagttcctggacgacgacttcttctccgaggaggagaaggcggccgtggcggccaggagcgagagcgacgaggaggacagcctggcggggctctcgcgcaggctcgcgggcctcctcggcgacgacggggagcggaagccgcctaccgccaaggcggaggtggcggtgattgggtcgccgcagtcgacgctgtgcgggctgcccaagtcgggccaggagagccccaacggcggggcgtccaaggggacgtcgccgccgtcgtcgccgcctctggagcagaagccggccgacccgtgggacgtcctgtacgaggcggcggggcaggtcgcgcgcatccgcgccgccagcagcgtgccggtgcaggtgccggccaacgcatacgccttcagcaagccatccccgccgccgccgccgccgccgcagatcgctccgccctccgccaaggtccctgccggcgccggcggtcactaccacccgctcgcgcacttggtttcgcagcggcagatgcaggctgctcagttccatctcctgaagcagcatcagctgctgaagctgcagaggcagcgccatctcgccgcgtggagcgcgcgccagagcgcctgtgccaagcccgtcggctgcggcggaggcgacgcgccgcttggcctgaacccggcggcgtggcctccgctccagaagccaccgccaccgccgccgccgcagcagcaccaggcgccggcgcatcctgcctccggcatgcgcgccgtgttcctgaccccgcctggcgccaagcgcgagcgtaacggcaccggggtgttcctcccgaggccggccggcgcgcccgcggcggagcccaagaggaagacggcgggggcgtgctcgacggtccttgtccccgctcgcgtcgtccaggccctcaacctcaggctcgaagacctcggcgcccagcctcgctactaccctggcggcttcgttctcgatcacgccggagcaacgccatgctcgcgagccagaagcgccgcgcggctgccgctgcggcagtgtgccacagaagtacctgagtcgtccagtcgccggctggacttggaggggggacgcggacgggaatggagccgccaagattccgtcgacaacacccccgcccccctttcgtttggaggccggcagtcctgttgatcctaataatcgaagaaactagcttgggtaccttttgttaggtagtgtgttagcaggcagagttaggaaggcagtagcagcgttagcatcattgttaggtctgttcgtttcggatctggtgatacattcgttttatttttggtgtggacggaaagctgggggaggttgacgagcagtgaagaaaacccataatgtcgtccggtggtttgggggaagtgtaacaaataataagtggttagagagagagaggtcttagctgatgcaagaagagcctgcatagcaagtgttggatgattttctttctgagatgaaaagcaaataagaggtcatttccctcccatgcgcccaatcagtggctggctttgcttgctttgggcgctaccagcacggacccctctctcctgttttgcaacttttcttttttacttggaaaagaagcttgccgtgggctccatgaataagggcgtttgcttttagcctagagtgtattatgaaagcatttattggtttgtattgtgctgtgcctgtaccagtggtagctagtagtagcagtaaaaagtgtcccttgactttggttacaagtgatgaagtggtggtttacta

SEQ ID NO: 10115 - DNA, 820 bp, Zea Mays
atggagggttcctgggattgcgcgaccaagagcagggcaaggggaggatgtcgggggcaggggcagggcagaaccgtgcgccacgccactgtggacgcctacgcgcaattgataatgccggcgtcgtcgtcgccgtcgccgtcgccgctcgagatcgtgacctgctccgctctggaggatccgtggtcaccaatgatggccatcgccggcgacaagttcacggtggtgcagcgggtgccgagggacgtctcggacggcctcctcggcaagttcgcggacaccagcgcgttcggcttcgactacgaccgcagcgcgctctggtcgccgctggtgctgcgtcccgaggccatgctgctcgcgcagtgcccggccgggcgccgcggccgacggcggctacgatggcggcagcgtcgccggaaccggaggaaggtgctctgcggctgctggcaatggtggtgacgtcgcatgcaatgttgcctacggacgtcgaagcatctggtctgaatcatcctgcaaacgttctgccgccgattcttggatttcttcattcttctgcagtattatgcattcaaagagtcaatactgttaccatatcgtctctctatgatcaacgacgatgggaagctgaggacgctatgtaatgtatatgtatgtatacatgcagcaacgtaaggtccaaatgtaagatgaaatgattgtgtaatgtatagtcacagataattacattgttttttcgatgtgcacattggacacgtatcattgtgttgtgattgttggaggcatcttcaacaggaatgaatacagtaattacacttgctaa

SEQ ID NO: 10116 - DNA, 415 bp, Zea Mays
gatctgattttgctccaggagattgccatgttctagagcgaaacccttatcatattgcaacatccggagagatggcaatttacagggcgaacaaccttattttgagataggtgattccatttggatacttaaagtgaaaacaagtaaaatggcgaccatgcataattgattgattctagcatcattgagccatttccagcatttccttagaggaaccactcatgaacattttctgccatgggcttcaaatcatgttccttaattcaacaacttattatatccagcaaacttgtaggaaacctgtggtatgatcgcctaacaactagcatgtaattgttccctttcctccagtttgggccactttgttggcctattaccaatgttgtgaggtttgtcggggaattattttagtact

SEQ ID NO: 10117 - DNA, 6163 bp, Zea Mays
gcccccgtgagcggacgccagccacccagctccgtccgtccgatcggggccccttgaccgcttaaactcatctaagatacggtttgttacacttttgttccttccgtaatcgccttcaatttcctactactagagagagacggcctcccttcctctcgcttcgcttacacttctcccctccccccaacccaaacccaacacaattcccccgtgttgcctacacgcactggccacgaccaaaccctaggcgccgccgcctccggggccctcagggctgtcatacggggaaggaggaggatatcggtgaggagagaaggggatttatgtcccagcgaggtgacaggggcgaggggcacgccaggagacccggccggtccagcagcttcggcggccaccgcggaggcggagtcggcggcgcgggcaagggcggcgcgggatcctcaggccagcctcctctttctaccaaccgcagctttaggaagcccggcaatggccacggcgggcagcagagggtggtgaaccagcccgacacaaccggtttccaacctgcccccgcgcctgccccccaccaaactcctgcgcgaccgccacctgcacctcagaatgcggctgtgcatgttcccatatccgcaccatggccgcaacctcaaggtccacaagtgtcatcttcatcagctgccagcgacaggccggctaatccgccattacctaaagctactcatgctgctccaagggctccaccaaaaagctctaacccaccccttcctcagggaggatcgaaaggggaaccaccaaaggggtttaactttcagtttggtagtataaatatgaatgggctgccgcaatttcctgccaggacaagctcagctcctccaaacttggatgaacaaaaacgtaatcaggtgcttgtggaggaacttaaggttacacctacccctgtgcaaccaactccaaaacagcagctgttgcagcagcatccgcatccgctgcagaagcaacagcatcagctgccgcagctgtcgcatcagccacagcagccacagcagcagtcaacaagaaaggaaactgttggttccagccaacctaactccatcaatccccatactacatcacaactgaaaagagatgtgcacccatctccgtcggtccccaatgttacatctgttagacctaccgttcaacaaatgcctggtgttcagatgccgatccccttccaccaccagccggcacaagtttccttgcagtttggtggccatggtgcacagctgcagccacaagttgtgcccagctcatttcaaatgtcaatgggattgacaggcagtagtacaccgcaagtcccacagcagctgtatgccccgactctgcagcatcatcaattgcaacagcaagcaatgatgcatcctggccagggtatgggttatgttccttcagttgctcaccaattcccacagttgggcagcattcctatgaacattgcatcgcaatatcctcagcaacagccaaacaaacctgctgctgcacgtaaggctattgtaaaaattactcatccagacacacatgaagagttgaagcttgataagaggatggactcttctgggcagagagctgcaccgagtattgcacaacaatctcagcctggtgttaattatgctcctcatttgggcttctttcatcagccaccgaattcctacaaccagtcaggaatgtattactctactacagctagtgtgaaccaggttgctactggatcatcgggtcctagatataattatcctgtcactcagtctgcgcaagcgatgacatatatcagtccatctgcagcgcctccggtatctggtcagtcacaatatacagttaagccgcaccctatggggttgctgtctgaaaaatcaggtactcatgtcacaataagtgctccaccagcaaaatctgatccacctaagttacatgctgctggggatgctgcgtcaagtctgaaaaaggataatgaagttgtttctgggatcactgttttaaataaaccaacccttgagagggagagtaacgatcctttagtcacagtgaagcattccactgtgataagcccgtccttgccaattcatggtgaaaaaccacaaactttggtgacatcgtcgcctgttgctaattcagtctcacctgtgactggagctgatgggaaaagcaaagaacccattcaaaggtctggatcatttaaagatagtaagaaaaatgtcactaaaaaggatgtcaggaattcatatgaaccaccaaatccaacttcatttgttgaggataaggttcaaactgtaaaggttggagatggcgatctccaggaaactaaaaagctgaacaatgagttggatttgaccaactcatcttcagctccaacggttccactggcagttagtacagagaatgccgacagcacagcagtaaccagtgagatctttaaatcttttgaattgaccaggggtgcctctcaatttttttctaacttatttactttggcagctgctgatgttcctgggacagatacaagctcaagaagaccatcttctgagggtactggtgagcctggagtggaaagcttcactgtttccgctgttgaatgtgacgaaagcaagaggactcacaaagttgtgaaagatcctagcaaggataatatttcttctgatgctaccaaacatgaattgcctaaggaatgtgcagtggactctactgaacaagcatcagcagtgacttctaacactgatgattcatatgcagcacctctagtaactaatcaggagcagttgctgaaagggtctgcttctgagaaacaagctgtgatgaataactcatccatgaattccgatacttcagcacatttttttgatggcaatgatgtgggcgtgacaacttctggaacttcagagcctactgctcaaacttccaatgatgaaggtgactcagatattagtccagaaacagacctagctgtttataatgtccctctaggttcatctgagctacaactgaaatctgagagtagggcaaatgatcaacagcctgctgcaccaacagtatcagttcgaccggtatccagggaaaagcctagtacaaagtccacagctgggaagaagaagaagaaaaaggaaatgcttgctaaggctgatgctgctgggtcttcagatctttataatgcatacaaaggaccagaagagaagtctgaagttgttggtaccgtggagggtgctgataattcttcaacagttgatacaactcatgtactgtctgacgaattagaaaaggatcctagtacatctgcagatgattgtaagaaaaaagttgagcttgatgattgggaagatgctgcagacatgtctactccaaagcagccatcagattctgggaaccaggctagcatcacccaagtgttggattcagacgtaactgaagcaaacagcaggaagaaatactcacgggattttctgttaactttgcaacatcactataccggtcttccttttggatttcagatgaatgaagctgtcaatgctataatgaataatttggcaggaaagtcttatgttgctgaccgggaacctcaccctagtcctggaaggggtttggaccgcccaacttctcgtgaccgccgtggtgctgccatggctgacgacaggtggactagggcgggtgttcctctcagtcctggtcgtgatgttcacatggacctgccaaatggaccatcagttatcaactaccgtggcggcccaggaggtaatcatggtgttttaaggaatccacgcagtcaatcatcaaatcagtatggcggtgggcttcttgcaggacccatgcagtccgttggaccgcaggtacctcgcagcggctctgatgctgatagatggcagcaaaagggtctcatgccttctcctggcacacctgtacaagcaatgcacaaagcagagaggaagtatgttattgggaaagtttctgatgaggaagaggcgaaacagaggcagttgaaagctattcttaacaagctgactccacagaacttcgaaaaactttttgaacaagttaaggaagtcaacattgacagtgtagcaacacttactggggtcatttcacagatatttgacaaagctttgatggaaccaactttctgtgaaatgtatgctaatttttgcttccatctggctggtgccttgcctgacttcagtgaagacaatgaaaaaatcacattcaaaagattacttttgaataaatgccaagaggagtttgagaggggtgaaagagaagaagctgaagctgataaaacagaagaggaaggcgagattaaacagaccaaagaagaaagggaggaaaagaggatccgtgctcgaaggcgcatgctgggaaacattaggttaattggagagttgtacaaaaagaggatgttgacggaaaggattatgcatgaatgcattaaaaaattgtttggaaatcatgatgatcctgatgaggagaacattgaagcattatgcaaattgatgagtacaattggtgatatgattgatcatgtaaaggcaaaggagcacatggatgcctattttagtatgatgcagataatgtcaacaaatcagaagttgtcttctcgtgtaaggtttatgttgagagattcaatcgacctcaggagaaataaatggcagcaaaggcgtaaagtcgaaggtcccaagaagattgaggaggttcacagagatgcagcacaagaaagacatgcccagtcgagtaggttgggacgtggtccagctgttagttctgttccaagaagagcacatcctatggattatggccctcgtggaccatctgcatcagcatcctcaagttcccaacaagggagcattcgaggaatgcctccacattcgcgtggttcacaagacatccgacatgacgaaaggcaccagtttgacaatagaactgttcttccgcagcgggtagtcaaagatgaagccatcactcttgggccacaaggtggccttgctaggggtatgtctataagagggcagccaccagtatcaaatactgaaattccttctgttattgaccaccggaggatagtatctagttctaatggctataactctgcggctgattggacatcatcatctggaagagaagattctaattcaagacttccagatcgaacctctggccgaattcctgcttctagtcaatctgctgtaacttcgcagaggcctgccagccaggaaggccgttcaagaagtaaatcatattctgaggatgagttgagagaaaaatctgttttgaccattcgagaatattacagtgcaaaagatgaaaaggaggttgttttgtgtattgaggagctgaatgctccaaatttctatccatttcttgtgtcactttgggtaaatgattcctttgagagaaaagacatggaaagagagttgttggctaaacttctcgtcagcctttgcagtggtcgacataatttgttgagcaagcaacaactcagtgatggcctttcaaatgttcttgcctcattagaagataatctaagtgatgctccaagagccaccgagtaccttggacgacttcttgcaaggtttgtggaggaaagcatattgctcttgcaagaggtaggtaaattgattcaagaaagtggagaagaaccagggtacctaatacaaggcggtattgcggctgacatcctaggtgcagtcctggattccataaaatcagacaaagggaattcattcttggatgagatcaagacaacttcaagtttaaagttggttgatttcagaccacaacatcttaagcgatcaaagttggacgccttcatgtaggcacataagttattgttacctggtaagtctgttctagtccaggtgtaaatattgttcttgggtagttatttgttctgaagacatacacttgatttaaatactctgaactattctgatgacagattaccaatgggtgcggtcaccaagcagtttagtttcttcgcacctaaatacccaacggcctttttgatgttgcaggaacctacacgagagcccgacgcgcatcctctcgctgggagggttgccacctttgtcgaacagctgtaccgaattgtaaaattgaaaagactataactctacactggacaaaatggttcactttcacaccgtat

SEQ ID NO: 10118 - DNA, 1065 bp, Zea Mays
cgtcgaaccaaagctcgcgagccgcaaagccgcggcgacaaccacttgtttaagccgcgacctgcgtcccagcatcagtcagtgcatcagcattcatcgccccctgcctccccttccattcgccctcctcccactccaccagctcctgcctgcctataaacccagggccgccctttgactctccttccctgtccagtggcggggccgcttcccttgcgttcgcggagagtctgtctgtctgtctagctagctagctagctgccgagagcgtgaggaggaagggggatccatggcggcggagaacgaggagaaggagacggcctgcgcggggtacaagcacgggccgccatgggtgttcaaaggcagcgcattgtaccagctgcatttggtgaaggcgtcgacggcgcgggccttcgtgccgcgggacctccgcctggttgaggccttcggctacacgctcggcggcatgttcctggcgcgctaccacgacagccctgccggcgaattcgacgagctcgtggtgatcgccggcattgtgtggaacccgccgacctcctgcgcgtgggctgccagggtgctggtgaacagcgtcgaagcctgccggcacggccgcaaggaggtaggactgccaagccatgtcgccacattctcgtcaaagaacgaggctgcttcgcttggggatagaccgttggctagaccaaacagcttcctcaacatgctggggatcgggtcgacagccttcgagcaagggaatggccgcgagattgaggtttcagagtccaagggcggctcgtctactcggcatctgtgcaacatcagcctgccatttaccggatcacataaggaccaccagtgggcgggcccagcaatcagaatgtcactcccgagtttcagcggacgtacagtggaccatcctgatcttctcaagtactcctgtcaagtagaatgcaggtgatgacaaaaaacaaaactctgtgaacgtcctgggctagtgagctatccattgatggcgtacgatctacccgtattcgacgcactgttgacatgtttccttccacagggtgc

SEQ ID NO: 10119 - DNA, 1856 bp, Zea Mays
cgtccattcatttgttaaagccaccaaaggtgttcagcagctcagctcagcactattcgttcgttctccgtatatatggcggttgcttcgattcctttcactcgttgttatcactactaaactagtgcggggtataaagctctctccctccgcgcttccgatcagttcacgacgactccaggtccaggaggggcgcacttgactttcccctcctcctcctgcgagcaccttcctcgcctcgctctcatggcctcatcagagcctatagagtgccagagcgcgcaattggtcttcttcttcagcttgtctgattcctgttccagcggttgtggcgctgagggtgtcgattcactgccaaggatgcaagaagaaggtgaagaaggtgctccagaacatcagcggcgtgtaccgatgcgaaatcgatgcccggagcaacaaggtcgtggcgacggtctcgacggagctcgacccctacatgctggtcgccaagctgcgcaagtccggcaagcaggcggagctgtggccggagcagccggtgcagcagcaggagcagccggcaccagtaccaccagctgagagccaaaggcaggaggagcccaagaacaaccagcctgcggagccgggccgacccagcgaacctgccgaggagcgcggcgccgccgccgacacggccgaggccgccgcggcggagccgagcaacccgctaccttcgccgccggagcccaagccgagcgccggcggaggagaggccccgaatccggcggcccaggacagcaaagaaaacgccagcgccgacgacgtcggcggcggcgacgatacggccgcggcaccggcaccggcgcagcaaggacccagcgaggcgaaggggaaagcgaaatcgaagcagcatacggcggagatggaggagaggcagcccgtggacgccagagtgactgtggagtacgaccaccgaggcgtcggtgggggctacgtgagccgcatgccgccgccggcagtcatgagctacaaccaggtgcgcccgagcgtgagcgcgtcctactacgcccccgccccggctccggcgccggcgccgatgccgatggggaggcccgggccgtcgcagggctacatcgacgagcactacacgccgtcttacagcagcagtagcaacaactactactcctccaaccggtcgccggcgtacgagccgtactactacagcgctccgcagccggcgccgtatagctaccagtaccagtaccagccggcttcttcgtccgaggattactactacagcgcgccgccgcagaggagcgccttctcgccgccgcgggagggctacggcgacatgttcaacgacgagaacgccaattcttgcaccgtcatgtgaagggaggatgcatgcaaacatggaagtagctagtttacttacagttccttattaatcaagcgactctctctatatatatatatatatatttgtgtgtgttagtatattttagaaccagtaattaagtacgagtaaggagatgtattaaaagcactgttcagtcttgatggcgctgaataagttgagagctctgagcttgaatgcttgatgcatgtaccaaccgtgatagatagaggagaatgtgaggatctgaatgaacagctctggtgttcatcacagcaaattttgtaatgtatgacatggtcaaaatggggacttccaatctcttcaacttcttcattcatgtaagaactttgtatgtacacagaacatgagcaaagacacgatcgagctgttctgtttccgtgtgaatcttgcacctgaaaaggagctagctatgtgtcaatcattcaggaggttggttaactaaattgagcaggagtatttc

SEQ ID NO: 10120 - DNA, 1610 bp, Zea Mays
gcgcacggccgcctcgccggcttatgcctcaggcttgggatggttgagaaggcaaagacgcacttcacactggctggaagtgcaaaccagtctgatccggctgagtggcagaagctgcatgaggtagagatccatcaaggcagatgcatggatgcaaggaaaattggagactggaagagtgcactcagggaagccgacgcagccatcgctgttggagcggactcctctcgattgcttcttgccttgaggtcagaagcgttgctttggttgcacaaattagaggaagctgatttgactattacaagcttgttgaaactggatgacgcgtcgttgccttcgacgccaaccagagtctcaggcatgtcagctgactcttatgtccatatcgtccaagccaaggtcaacgtgacatttggaaggttcgattcagctgtcgcactggctgagaaggctaagcttattgatggcgtgagctcagaggttgaagtgatcctaaacaacgtgagattagtcgcattggctcgagcccgggggaatgacctttttaaggcagcttgctggtcaaagctgggtcggtgggcaaaagctgttgaggactgcagcgaggccctaagagtccagcctaactacacaaaggctctgctaaggcgtgcggcgtcatatgcaaagcttgagcgctgggcggactgtgtgcgggactacgaggtgcttcgcaaggatcttcctggtgacactgaggttgcagagtccttgttccatgcccaagttgcattaaagacagcccgtggagaggtggtatctaatatgaagtttggaggggtagttgaagaaattatcagcttagagcaactccaagatgttatccgttcacctggtgtatccgttctttacttcatggctacaatgaacaagcaatgtgcacaaattaccccgtctgtggactccctttgctccgagtgccctgcattgaatttcctgaaggtaaacgttgacgagcgccctctggtagcaagcgcggagaacgtgcgagtagtcccaagcttcaagatttacaaggacggcacgagagtgaaggagatggtctgccctagcttgcaggtcttgcgctattccgtgaggcactatgctgtctccagctcttgaggtccggcactcagttcgctggccctgttagtgtcaccacatgccaacatttcaccaacaaatctgtccctctatagtatcacagcatttcccccttcccatcgcgtcacttaggctcctcctaccgcaacatctctagaaccatttgatccaagcttaagcaattctcatgcctcgctttccaaagtgatgacttcaactcctgaagaaaggctccctgtggtggtgttcagggaataggtaaacacggctggctggttttctcattacatgtacatatattcccgtatagcaacacatcaaacccattgatagattggttcactgtggagaaaaggcggggttcggacttggatgaagagtacaggtctagttgccattgaatgtagagatggagaagatagatgggtcgtgttgttggtatggtacgtagagagacagaggagggaggtggctggtgtggttca

SEQ ID NO: 10121 - DNA, 1924 bp, Zea Mays
cagcatcatgcgccgcggcgggggagcgactcccgcgaggaccagcggtgacgcggccccgctgctccacggccacggcagcaattcctcgaggtcgaggtccccggcgagctgccctgcgccagcgccgccggccaccagcggtggcctgcaggagattactcgcgcggggaacgagtggtacaagaagggccgccacgccgacgcgctgcgccactacgaccgtgccgtggcgctgtgccccgacagcgccgcgtgccgcggcaaccgcgccgccgcgctcatcgggctcgggcgcctagcagaagcgttccgcgagtgtgaggaggccgtccgcctcgatccggccagcggccgcgcgcacggccgcctcgccggcttatgcctcaggcttgggatggttgagaaggcaaagacgcacttcacactggctggaagtgcaaaccagtctgatccggctgagtggcagaagctgcatgaggtagagatccatcaaggcagatgcatggatgcaaggaaaattggagactggaagagtgcactcagggaagccgacgcagccatcgctgttggagcggactcctctcgattgcttcttgccttgaggtcagaagcgttgctttggttgcacaaattagaggaagctgatttgactattacaagcttgttgaaactggatgacgcgtcgttgccttcgacgccaaccagagtctcaggcatgtcagctgactcttatgtccatatcgtccaagccaaggtcaacgtgacatttggaaggttcgattcagctgtcgcactggctgagaaggctaagcttattgatggcgtgagctcagaggttgaagtgatcctaaacaacgtgagattagtcgcattggctcgagcccgggggaatgacctttttaaggcagcttgctggtcaaagctgggtcggtgggcaaaagctgttgaggactgcagcgaggccctaagagtccagcctaactacacaaaggctctgctaaggcgtgcggcgtcatatgcaaagcttgagcgctgggcggactgtgtgcgggactacgaggtgcttcgcaaggatcttcctggtgacactgaggttgcagagtccttgttccatgcccaagttgcattaaagacagcccgtggagaggtggtatctaatatgaagtttggaggggtagttgaagaaattatcagcttagagcaactccaagatgttatccgttcacctggtgagtttctcctctacatgcacctagcctgttgtaggcatttcacctccttcttggttcttgttgtgctaagaagtggacagttaaccaggtgtatccgttctttacttcatggctacaatgaacaagcaatgtgcacaaattaccccgtctgtggactccctttgctccgagtgccctgcattgaatttcctgaaggtaaacgttgacgagcgccctctggtagcaagcgcggagaacgtgcgagtagtcccaagcttcaagatttacaaggacggcacgagagtgaaggagatggtctgccctagcttgcaggtcttgcgctattccgtgaggcactatgctgtctccagctcttgaggtccggcactcagttcgctggccctgttagtgtcaccacatgccaacatttcaccaacaaatctgtccctctatagtatcacagcatttcccccttcccatcgcgtcacttaggctcctcctaccgcaacatctctagaaccatttgatccaagcttaagcaattctcatgcctcgctttccaaagtgatgacttcaactcctgaagaaaggctccctgtggtggtgttcagggaataggaacatggaacattgagacgtatgtcaacccaataaattggatattgaagaatggctggatatagatgaaccagctgatatttatgttctta

SEQ ID NO: 10122 - DNA, 1339 bp, Zea Mays
caagatactcctacgaagatgaacagtaacagccttgcaatgagtgcgcctgcagctgctgtatctgctgcagccgatgcaggaggcgagcacgaggagcagcaggaagcagggcacggggaggaaggcgacggcagtcccaagcaggcagtcaaccttggggaagacgagaagacggaatctggccccgtcacagctccacccattgttgctcgtggattccaagaaagtggtggcgtggccgtggagcacatcttgcctgacagccccttcgcatccaccaccaacaaggaggcctcagctccaacggctcagaacgggggcatcagcaatggcagccctcaccatgtggcttcttcgcccctcttcccacctgcacccgccattgagctgcccccgtacaactcctgcttctttcaggcgcccaggttttctcctgggcatgaagccattgggctgtgaatacagagcaaaaaggggtctccttttcctctaatctgggagggctatcgatgaccccatcaagtggaggaaaggagtagaaagctttgattaacaaatactaggtgtatcttcagagagggacaacaacagcagcaacaaaaaagagagagagagagagaaacaagtctaggttgttttagctctaggcctaagtatatgatagtagtcctataatataaataataatagtcttttagtagctcctgccggtatcaagattcaagtgattaaaaccgtagatggcgtagtactagtaaaaactagacagctagtcttggcagccagttgtagtgaagtgacatggctgcatacagacatccaaaggaaacagacttggtgctgctgcagctgcagtgctgctgcacaaggaaaagtgatgagaccgagacgagaggggtgtactctgctgggaccagagcactcacgggtgcagagagactccacttcacctcatgagcaattctgcagggaccccccctctgaatcgtaggagcatgcaccaagcactccttgtcctggtctttcaccttttgctcatcttttcacccttgtagaaaacagcaggaggtagcagacagacagaggaatgggaaaaaaagtatttattagtcgtttatcttgttggtccatgctttttatattttgcttggttcccaaattaaatgaatatatatgtagagttgtcttagctcactattttaagtttgactagcttaagtacataatgaacgtgctttgtttgctttagatgtactttaacagaactggtttttttggttctggactctaaatatgccttaagatatctatgatcacacacgtgcgtatattcttc

SEQ ID NO: 10123 - DNA, 910 bp, Zea Mays
ggtcgttgcacgggtcacatgattggagggactttttgggactcttcgcgaggttctttctgagcaagtttacagcctgtgcgtgagacgcgggaaaagcaagtgcagttatggaaggatctgatacttgattactgtagaagtcaaaagatacatacaatatctctagaagaagatttccccttgttctccaatgcaaagattgagagatctcttagctacgaagcaaaggaagtgttcctcgcagctctcgtcagtgaagaatggatggacaaaggtcacaagaagtgcctaattctttggctaaggatacaggattgggcaaatttcatattgaactttgtaaaggataacgggttggaagtaatgactatcgaagaaatacgctctggaattgatacacgtggaactgaactcgagggaattgatcgtggtgttctcatgcgggctctgcggcagttggagcaaaagggaaaggcagctatcttcaaaggcacctctgctgatgacgaaggcgtaaagttttcggtgtaattcttttgcgatccttaaactggcagactaataatctcgttcagccggtgcccttgaacatggcatgagacacccatagcctcgatcattcagtgccctttgaaaatggcatgacacatccttgtaaaaagcagtagggctgatcacattcttcccgagtagtatcctcttcagtgctgcggtaaaatttcccaactcatcttttgttgtagtgaaaaatcggccaagcctgattaaacattgtggagtggttggtaagaagaagttgaactggtcatgcctcttacgctgattgattttccgatatctaagcaaaggtgttcatgaaatgtacgcgggattaattctgggtttattcgaaatgggcgtaagtttc

SEQ ID NO: 10124 - DNA, 1042 bp, Zea Mays
gggggtttggatcgggttcttctccatctccatcttcatttggataaaggattggcgaaaagtgcctaaagtggtaaaatcaaacctatgggaggatgtgtcaaagaaatttttcatgccaagggatgaaacccataccctcaatgtgaagaaggtcgctttgaaatctatgagccatgcatggaaggatttcaagtggaaactaaatataaattacgtcaagaagaacaaaactccatttgaggactatccagaactcaagaaagagtggtggccaaactttgtggagtgtgttacctctgctgagtatattgctctaggagaaaagggcaagaaaagccaaagcatgaataagttccgtcaaaaactaggtcggcaaagctatactgtacaaaagagaaaatgggcaaaggaagatgcacaagcattaactgagggtaaatctattccatttcaagacatgccagatggtcgtcataaggattgggcaagggtagatgtaaatgaaaagtcagtagctagtacctttacaccattttataatatggacatacttgcaacagcaatagggagtaatcatccagggaggacaacaggggtgagtgcttatgtgggtttagggatgggtcttgctcaaggtgatgggcactagtaagaagaaacgtaaaacaacaaaagaatatgtcaagaggattgtggatgagtatgaggtcaagtttgagaaactgacagccatgtgtcagagtatggagcgtcgattaaacaattctaagagttgctcatcatcaaaatttgttgatacaccagaccatgcaacacatcattcagttgactcattacaagtaacttcatctacttgtagcacatatttgtggtgatacaatgatgttactctggtgtctgttattattgtttccttcgatatgtagcattgttttgcatatcatttttgtcacacccggttctgggggcaaaattgaatgcatagcatatgtgggccaggatccatttcccacacatatgttgacgtcacaagtgtaat

SEQ ID NO: 10125 - DNA, 2643 bp, Zea Mays
cagacatgccctttcctttcgtctgttttcctacggtcgtccattttgttctcccgttccgcatagcgtacgctcgctccctctctatctctctctctcggttctcccgttcccccgcgcggcgatctctctcgtggcgaccagcgggcgaccgccgcacgcccaggtcgtcattggctcctcagccaggtgctgttcgggcccctaaactgggcgccggcgacgagcacgcgccaggactgtaatctgatctcgtggtggtatggttcgtcctaggattctcgtggcttgttcatgctccgagactccgagttgtgctttacctcgaattgctgcagtatccgtagggggcatgattgatggtggaacatcctcaccagtgtcagaaatgtcaatgtagctctaacgttcatttctcagtttgctgaagtaaacgatttcgggatgggtttgcctcaaattcctgtggttaaggaggaagagcctactgaagtgagtacacctgccggttctagtttcagtgtcgatggcccctgcgattcgggtaaacttctcgagggaagctcaagtggaagttggtttcagaacccatccatcagcgacttcaagagaaaatttgcaccaggtgctgcttcgaatggattaaatagtcagttcagaactagacatgccgttgatgatcctgcgggctaccaaagcctgaatcctaaaccaagagatccaaattatagatcatgcactaaaatcaaatctactctacatatacctgcaatgagggttgttgggtttgattcaggaactgatggttctaccgggggccctgatataatggtatctcacaaaatgcattcatctttagtcattggtaattgtgattcatcagttgtacatcacgaagttcaggcaaggaaaagggtgttgtcaccattaactaatgcgcttcctgctggacagttctatgggaatgcgctgaatattggttccggcgatgaaaaagttcagaaccctcgttgtgttagacagctctcttattctggcttccatgacagtaaaaaagctaacactggagctcttgattcctttcagccatctactaggtcagaattgagatactccgattggagtacagggcaggggttctgtaagtttagttctaacacattcactgatggtcctttgcttgagggtagggaattattttcatgctcagatcaacctggagttgaagggattatgaaccttgcaaaggtgcctgcaagattgtcacattctcctccacccactctttctccactccgtccaaaatggatgcatagaatgaaggctgcaagagctcagagggatttgacgggacgaattgaaaatgacatcattgatttgaaggaaatgggaaggtcaaattttgacgattattcagaatatgtcggtacgataaggatgggtgatatactagaagaaaccagtattttgcatgatggatttgatacaatgatccctaagagaaattttcataggagataccggtgcttgggtccagaatctgcccctgtgtctacacacattgaatgtattaatagctcgaacctcctccctgtaaggaggtcattagttggctcctttgaggaatctctcttatctggtcgctattcatgtggaaaagacaatcagtgagcagcattgatgaagatagctccctgttgtactactcgtcgattgatcttgcggggaggttgcctacaaacaataccaaaggcccaaaacttaaaagaagcctcagtagcagtgattcacggtcaacaaatagccgattacgcattcccgtgaaaggccgcatacaactggtggttagtaacccagagaagacaccacttcacacctttttctgtacctatgatttgagtgacatgcctgctggaaccaaggttctgacaatgggcatgagttggaaaagggacgttctgcagatatggaatgtttctccatggaatgtgacgttagagaaccaaatgaaaatggtacttcggggaattcagaaaatgatgctaatgctgaggggtgctgctgtcaaataaactcatgtgaaggtggaaagatatatttcaacagatctcccaaggtcaatgatattccagctggaggggttctgcggtatgctttgcacttacgttttctgagccccttctccaagaagtcatcaaagtcaaggtatcattgcaaattggatatgtcatcacaaccacacagtcgcagtaggactgaggaagagagaagattttatctttacaatgatattagagttgtctttcctcagaggcactcagactctgacgaaggcgagctgcgggttgagcatgacttcccagcaaatcccaagtattttgacataagcaactaagaactccttgcacactcgtgaagctgcagataaaatttgtacataccatttcgtcactaatcaatctttactgcttattaccatcgatgtacagactaaccttgcaatgaaattatttacttcatgtatctatatattttttatgtataaggtagtgcttgtggcttccactagctggtagtagaggtttggttatatcggcttgtgagaccgtcgaagctgattgatcgcgggctgtttgggtacca

SEQ ID NO: 10126 - DNA, 2739 bp, Zea Mays
cagacatgccctttcctttcgtctgttttcctacggtcgtccattttgttctcccgttccgcatagcgtacgctcgctccctctctatctctctctctcggttctcccgttcccccgcgcggcgatctctctcgtggcgaccagcgggcgaccgccgcacgcccaggtcgtcattggctcctcagccaggtgctgttcgggcccctaaactgggcgccggcgacgagcacgcgccaggactgtaatctgatctcgtggtggtatggttcgtcctaggattctcgtggcttgttcatgctccgagactccgagttgtgctttacctcgaattgctgcagtatccgtagggggcatgattgatggtggaacatcctcaccagtgtcagaaatgtcaatgtagctctaacgttcatttctcagtttgctgaagtaaacgatttcgggatgggtttgcctcaaattcctgtggttaaggaggaagagcctactgaagtgagtacacctgccggttctagtttcagtgtcgatggcccctgcgattcgggtaaacttctcgagggaagctcaagtggaagttggtttcagaacccatccatcagcgacttcaagagaaaatttgcaccaggtgctgcttcgaatggattaaatagtcagttcagaactagacatgccgttgatgatcctgcgggctaccaaagcctgaatcctaaaccaagagatccaaattatagatcatgcactaaaatcaaatctactctacatatacctgcaatgagggttgttgggtttgattcaggaactgatggttctaccgggggccctgatataatggtatctcacaaaatgcattcatctttagtcattggtaattgtgattcatcagttgtacatcacgaagttcaggcaaggaaaagggtgttgtcaccattaactaatgcgcttcctgctggacagttctatgggaatgcgctgaatattggttccggcgatgaaaaagttcagaaccctcgttgtgttagacagctctcttattctggcttccatgacagtaaaaaagctaacactggagctcttgattcctttcagccatctactaggtcagaattgagatactccgattggagtacagggcaggggttctgtaagtttagttctaacacattcactgatggtcctttgcttgagggtagggaattattttcatgctcagatcaacctggagttgaagggattatgaaccttgcaaaggtgcctgcaagattgtcacattctcctccacccactctttctccactccgtccaaaatggatgcatagaatgaaggctgcaagagctcagagggatttgacgggacgaattgaaaatgacatcattgatttgaaggaaatgggaaggtcaaattttgacgattattcagaatatgtcggtacgataaggatgggtgatatactagaagaaaccagtattttgcatgatggatttgatacaatgatccctaagagaaattttcataggagataccggtgcttgggtccagaatctgcccctgtgtctacacacattgaatgtattaatagctcgaacctcctccctgtaaggaggtcattagttggctcctttgaggaatctctcttatctggtcgctattcatgtggaaaagacaatcagagtattgatggttttctggctattcttaatgtgactggcggtagtttttctcccccaactcagaagtttccgtttacagtgagcagcattgatgaagatagctccctgttgtactactcgtcgattgatcttgcggggaggttgcctacaaacaataccaaaggcccaaaacttaaaagaagcctcagtagcagtgattcacggtcaacaaatagccgattacgcattcccgtgaaaggccgcatacaactggtggttagtaacccagagaagacaccacttcacacctttttctgtacctatgatttgagtgacatgcctgctggaaccaagactttcatgcggcaaaagatcactctatcctctgcttctccctctcatccgaccagagaagaaagcaaggccagtgatgtaaaggtcgagtcagtccagtgtggaagtgaacttagagagttcggggctctattttctgaatgttctgacaatgggcatgagttggaaaagggacgttctgcagatatggaatgtttctccatggaatgtgacgttagagaaccaaatgaaaatggtacttcggggaattcagaaaatgatgctaatgctgaggggtgctgctgtcaaataaactcatgtgaaggtggaaagatatatttcaacagatctcccaaggtcaatgatattccagctggaggggttctgcggtatgctttgcacttacgttttctgagccccttctccaagaagtcatcaaagtcaaggtatcattgcaaattggatatgtcatcacaaccacacagtcgcagtaggactgaggaagagagaagattttatctttacaatgatattagagttgtctttcctcagaggcactcagactctgacgaaggcgagtggtcggttcttactgtgaaggcgcgccccaagagatagggacgctagtgacgcactgccttgacgagcccaatcaactccctctcgtaagccggaagcttcttggggtaaggtgccactgctcggctgaagaccttggtgaagcacgacaccgaagcatgtaccgatgtgtcataatct

SEQ ID NO: 10127 - DNA, 2785 bp, Zea Mays
cagacatgccctttcctttcgtctgttttcctacggtcgtccattttgttctcccgttccgcatagcgtacgctcgctccctctctatctctctctctcggttctcccgttcccccgcgcggcgatctctctcgtggcgaccagcgggcgaccgccgcacgcccaggtcgtcattggctcctcagccaggtgctgttcgggcccctaaactgggcgccggcgacgagcacgcgccaggactgtaatctgatctcgtggtggtatggttcgtcctaggattctcgtggcttgttcatgctccgagactccgagttgtgctttacctcgaattgctgcagtatccgtagggggcatgattgatggtggaacatcctcaccagtgtcagaaatgtcaatgtagctctaacgttcatttctcagtttgctgaagtaaacgatttcgggatgggtttgcctcaaattcctgtggttaaggaggaagagcctactgaagtgagtacacctgccggttctagtttcagtgtcgatggcccctgcgattcgggtaaacttctcgagggaagctcaagtggaagttggtttcagaacccatccatcagcgacttcaagagaaaatttgcaccaggtgctgcttcgaatggattaaatagtcagttcagaactagacatgccgttgatgatcctgcgggctaccaaagcctgaatcctaaaccaagagatccaaattatagatcatgcactaaaatcaaatctactctacatatacctgcaatgagggttgttgggtttgattcaggaactgatggttctaccgggggccctgatataatggtatctcacaaaatgcattcatctttagtcattggtaattgtgattcatcagttgtacatcacgaagttcaggcaaggaaaagggtgttgtcaccattaactaatgcgcttcctgctggacagttctatgggaatgcgctgaatattggttccggcgatgaaaaagttcagaaccctcgttgtgttagacagctctcttattctggcttccatgacagtaaaaaagctaacactggagctcttgattcctttcagccatctactaggtcagaattgagatactccgattggagtacagggcaggggttctgtaagtttagttctaacacattcactgatggtcctttgcttgagggtagggaattattttcatgctcagatcaacctggagttgaagggattatgaaccttgcaaaggtgcctgcaagattgtcacattctcctccacccactctttctccactccgtccaaaatggatgcatagaatgaaggctgcaagagctcagagggatttgacgggacgaattgaaaatgacatcattgatttgaaggaaatgggaaggtcaaattttgacgattattcagaatatgtcggtacgataaggatgggtgatatactagaagaaaccagtattttgcatgatggatttgatacaatgatccctaagagaaattttcataggagataccggtgcttgggtccagaatctgcccctgtgtctacacacattgaatgtattaatagctcgaacctcctccctgtaaggaggtcattagttggctcctttgaggaatctctcttatctggtcgctattcatgtggaaaagacaatcagtgagcagcattgatgaagatagctccctgttgtactactcgtcgattgatcttgcggggaggttgcctacaaacaataccaaaggcccaaaacttaaaagaagcctcagtagcagtgattcacggtcaacaaatagccgattacgcattcccgtgaaaggccgcatacaactggtggttagtaacccagagaagacaccacttcacacctttttctgtacctatgatttgagtgacatgcctgctggaaccaagactttcatgcggcaaaagatcactctatcctctgcttctccctctcatccgaccagagaagaaagcaaggccagtgatgtaaaggtcgagtcagtccagtgtggaagtgaacttagagagttcggggctctattttctgaatgttctgacaatgggcatgagttggaaaagggacgttctgcagatatggaatgtttctccatggaatgtgacgttagagaaccaaatgaaaatggtacttcggggaattcagaaaatgatgctaatgctgaggggtgctgctgtcaaataaactcatgtgaaggtggaaagatatatttcaacagatctcccaaggtcaatgatattccagctggaggggttctgcggtatgctttgcacttacgttttctgagccccttctccaagaagtcatcaaagtcaaggtatcattgcaaattggatatgtcatcacaaccacacagtcgcagtaggactgaggaagagagaagattttatctttacaatgatattagagttgtctttcctcagaggcactcagactctgacgaaggcgagctgcgggttgagcatgacttcccagcaaatcccaagtattttgacataagcaactaagaactccttgcacactcgtgaagctgcagataaaatttgtacataccatttcgtcactaatcaatctttactgcttattaccatcgatgtacagactaaccttgcaatgaaattatttacttcatgtatctatatattttttatgtataaggtagtgcttgtggcttccactagctggtagtagaggtttggttatatcggcttgtgagaccgtcgaagctgattgatcgcgggctgtttgggtacca

SEQ ID NO: 10128 - DNA, 1193 bp, Zea Mays
atttgttccctgagccattttgctgtggatgttagttgggatcagagtcaggcaattgcctgtgggagatggtatttggattgcccgtcataaggaagatcacacagagtatgttcttgatttcattgttgaaaggaaagaggttatggatttagatggctcaattgaagacaaccgatatagagatcagaaattaaggatgaagaaatgtgggctgaggaagttgatatatcttgttgaaggtgatctcaaccgtgcaccaaagagggttaaaacagcctgtttcaccactgagattctcgatggatttgatgttcagagaactactgggtttgccgatacccagaagagatatgttgatcttacacgttcggtaatagcatactatgatgcaagtttctcgatcgttggtaaagcttcccctgtttgcccaacctacgatgacttcaagagaaagtgttatgatcttaagaagaaaacagtgagcgacatatttggctgtcagcttatgcaggtaccacaagtaacagaagaagctgcacaagctgttgtagagctctatccaacccctttgttactggcaaaggcatactctatacttggtggcgatacctctgcacaagagaagatgctaaagaagaagaacgagatggtaaatgcaggagcaagccgaaacatatttcaccttatctggggtgacggatgaaaaatactctggactggaaccagttgcgggccaactgaactttggtggcttatggtgtcaccgtcgtggtgaccatcttttgtgtctccgagatttagaggctcccatgttctaaagcaaatagtggctccatagaacactagggatctagattaggaagagtttctctctacgtcgcgtctagagagtactctgctgtggtgtcgtggttgcacagtggaatgaagtggtcccttggatttacgtggtcgggatttcgtgtatcggtctgggttgtctggattatgtgctgtctcgagctacctcggggctgttaagtctacaggatagcataaaatatcgcagtgtacctacagggaagattgtatgggtcgcccatgtgttccatggtcggcgccttgtctggtcatctttggctgaggccctcctacatacaatgggtgtcgctttggctggccaagacaagagcagactgccctgccgtttg

SEQ ID NO: 10129 - DNA, 3052 bp, Zea Mays
ccgcaatggcgggctctctctttcccgctccgaaacattaaaccctagctccgcgcaccatttcccgaatccccaacccagcgatccgcctccagcgccgggccccaatcactgtgcgaccacgatgaggccgctgccgaagaaaccaaatgcagcgctgccggtgccgaagcaactcaaggtgcatcacccggaaaatgagtccctctctcgtttcttcctagagaagtggcgggcgatgatgcaggagccggatgggctctcgcagaacaactacctggccttcgccaacgccaaccgcagcctctgctcctccaaggagccaatccggaccctcaaggacttctcgaacgtcaagggtgtgggaacatggctcataaatcatatgaaaagtttctttgaaaagtcgagtcaggatttatctcctgccaaaggaaagaaagcaaaagggacaaaaagttatttgccaaggaagaacactgctgcttatgccatactaataacactccatagggcaaagactagcgggaaagattttatgatgaaacaagagcttattgatgctgctgaagccagtggactgtcacgagacgcgattggtccaaataaaagtaaagcaaaacagagttacgggaaggactggtacactggttggagctgcatgaagacacttctatccaatcgacttgtcaccaagtggagtaacccagcaaagtatatgctaacacaagaaggggaaggcactgcacgtgactgtctttcacggtctggattagatgattctgcacggcctctaacgataattggtgctcacaacacatctgctatggatccttctgttgccaggcacagtcctgagcttgtcagcgacagttctctgacaaaaaagaagagcaattgctaccgtcaagttcaagctactaattacgaaggaatcatttgttgcgattcagattcagaagagccatgtggaaaggacattcccctaaaaggcatggagcctattactagttgtggaccaccagatatttctcgtccattccaaggaacacccaaactgcaatcttctacaatgggttctgctaaactagctatgccacctcgtcgagccaatgaaaactttcttgaagcctatgaagttattttaatattggatgaccgtgaaaaattcgggtctcgttcaagaaaagttgctgataacatttgttccctgagccattttgctgtggatgttagttgggatcagagtttgcactcttctatatcatgtcctactttctctctgctgtagaaatgaaaatgggggcatagttatactgattagcgatatctcttatatggtgccagacctagagcctgacaatttcattggccactacattttcccgctttcatgtttatgcctctattacatagttggtttcaaaatataccattggagtcctaattctttcagtcaaggatctttgactattaacaagctacctgaaaaaatattagaaaacaattagaaatgaaaaaggcaaaaaaagtacataaaatacagtgaaaatttagtagaggtaacaagataacttgcttgatattttgtctgtttcaactttcaacttctcatgctggcagcctatagtatctccttgtgctcaaggtggctgatggcatcagtgtctaatgtcacattgtggacagtgttgcaaatcattggattagttttttgtataaacgtctagaatgcatcctcttggatatagtttttgttcttttttaacataagaaaggttgaggcgtgatgcttgattgattcgtttgcgtaatgtgccagagaaagtggttttgattcttcagtttgaaccttgtcgtccaggtcaggcaattgcctgtgggagatggtatttggattgcccgtcataaggaagatcacacagagtatgttcttgatttcattgttgaaaggaaagaggttatggatttagatggctcaattgaagacaaccgatatagagatcagaaattaaggatgaagaaatgtgggctgaggaagttgatatatcttgttgaaggtgatctcaaccgtgcaccaaagagggttaaaacagcgtatgtgcactgctcaagtcacctgggagatcaatactatgctgtttcaccactgagattctcgatggatttgatgttcagagaactactgggtttgccgatacccagaagagatatgttgatcttacacgttcggtaatagcatactatgatgcaagtttctcgatcgttggtaaagcttcccctgtttgcccaacctacgatgacttcaagagaaagtgttatgatcttaagaagaaaacagtgagcgacatatttggctgtcagcttatgcaggtaccacaagtaacagaagaagctgcacaagctgttgtagagctctatccaacccctttgttactggcaaaggcatactctatacttggtggcgatacctctgcacaagagaagatgctaaagaagaagaacgagatggtaaatgcaggagcaagccgaaacatatttcaccttatctggggtgacggatgaaaaatactctggactggaaccagttgcgggccaactgaactttggtggcttatggtgtcaccgtcgtggtgaccatcttttgtgtctccgagatttagaggctcccatgttctaaagcaaatagtggctccatagaacactagggatctagattaggaagagtttctctctacgtcgcgtctagagagtactctgctgtggtgtcgtggttgcacagtggaatgaagtggtcccttggatttacgtggtcgggatttcgtgtatcggtctgggttgtctggattatgtgctgtctcgagctacctcggggctgttaagtctacaggatagcataaaatatcgcagtgtacctacagggaagattgtatgggtcgcccatgtgttccatggtcggcgccttgtctggtcatctttggctgaggccctcctacatacaatgggtgtcgctttggctggccaagacaagagcagactgccctgccgtttg

SEQ ID NO: 10130 - DNA, 2321 bp, Zea Mays
cgaaaatgagctctctctggactgaactagtgagaatacttgagaaagagcgtataccagtctagcaccgaactaccaaaaccgaccgagccgcgaacttcacccctgccttctctcccttctccgtccaggccctggtgcccgagcgttctcgtgcggcaagtgggcgccgccgccggactacgccaggtgcccagttcctcgtcgggtccttcgtcgacgacgagcacccaccaaaaattcgagtattagactctacatgtcaagaaagtatggcgccaggaagcaaggcggagcggaaagcagcactagatgctggcgcatggatgttcaatgtcgtcacatctgttggtatcatcatggtcaacaaaggcttaatggcgactcatggctttagttttgctacaacactgactggacttcattttgcaatgacaaccttgatgacgttagtaatgaaatggctgggatatattcagccatcttatttaccattaccagaactagtaaagtttgccttttttgcaaacctgtcgatcgtcggaatgaacgttagtttgatgtggaactctgttggattctatcagatcgcgaagttgtgtatcattccagtcttatgcattctggaaatcatattcgacaaagttcgttactcaagagatacaaagctcagtatagtgcttgtcctcataggtgttgctgtgtgtactgtgactgatgttagcgtgaactctcaagggctattagctgcagtaatagctgtttggagcacagcactacaacaacatgctttctagaaattgccttccccagaccacaccttgtgtgggagctctcaacattagccaccaatgttttcagacggcctaatcgtttctgatcgccagaggatcaatcagcccgttcagatcgattaatcggacgatcagcccgattaatcacttctgagtccatgctaacaattctcagtttctcatcgccaagtggtcaagcccatcatgtagcaaacaacaaggtacaagaaatcgcgaagccacattcatgcttgcaggcttgcagcagcagcactcagtggacaggccctggaccgtacctgcaggctggcaccgccgcgccggggatggaggaggggccgagggggacgatgcgtcattttccgccgtcgccggtagcgcgccggcgttgcctgcatagtgctccgctaggttcctcgacagccagttcgtgtcgtgtctcgcgtgtgctccagcctgggcgttgttcactgttggctacttggttgtgttcatgtgggaggaaaaaggaagcctgggctgggctgctgggccgaattcgttgacgaaaaacaattgaagtggtccaaaatttcaaagcatacagccgtctgattgtccctgcgctaatcggacgatcagaaacctgatcgccctgatcggctccgaagctgcgatcagtcgattaatcgctgatttatggcgactaatctgacgttctgaaaatgctgttggccacccaaccatttttttcctttccgaaatacatatgttcaccatcttcaatggaagtactcgcttggctcattcaatctcttaggccatactgctccagcgcaggcagcatcattgttaatagtggggccttttgtggacttctggctgactaacaaaagagttgatgcttttaactacacatcaatagttacgattcacagccgtctcgttccaagtcctaggccacatgaagacagttctggtgttgaccttggggttccttttctttgggaaagaggggctcaacttccatgtcgcccttggcatgcttctggctgtgatcggcatgatctggtacgggaacgcgtcgtcgaaatctggaggcaaagagcggcaggtctaccccacaccgagcgagaagagtcagaagcatggggcgctgtcatcgcagtccgagctcgatcaaaaggtctaaacgagacacacaaaggcatccgatgcttgttgagcaccggtcgacctggctttatttttagtacttatttttgagggatgagatgtttctataggattgtaggtggggccatagcagaaagagggtgcctgggtaaaatgcccatgagtttacttttgcagtgagtatgtcaatctaagctggcagatacttgatttgtaatagtctttgtgtgtgtttcgctcttcatgtggcatgttcagtttgatctatagttgtatctttcactttcacactgaaattgaaaagtaaagcgcaaatttccttgtatatgtattacaagtaattaattaggtgctatatatcgcatctgtccg

SEQ ID NO: 10131 - DNA, 2052 bp, Zea Mays
ttgataggattaagtgtaggttgttggaaggaacaaatgcccaagatgtacgggcacttgtgttggacatgcaagcaagattacttctggatatgctaggcaaaggaatcgagtctgcccttacaaatccatcaactctgctacctgagccctggcaagcttccagtgatatgttatccagcatcgatgctgacaaaatgactgttgagccagctctgcttccaaacatccagggttacgttgatgctgttcttgatttagcatcacatttcataactcgcttgcggcgttatgcgagtttctgtcgaactctggcgagccatgtggggccatcttctaccacaggcacttctagaaatatggttacaagtccaacaaacagttctccttcgccatcaaataatcaaggtaatcaagggggatcaacatctgcaacagggaactcacaaatgcaggagtgggtccaaggtgcaattgctaagattagtaacaattctgatggtgctgccactgcaacacagaatccaatgagcacgaggacatcatttatgcccatcagcattaatacgggcactttccctggcacacctgctgtgagacttattggggattgccattttcttcatagattatgtcaattactgctattttgtctgcttttccgaagaaggcaatcaccaaggttacttgccagttcgcaaaaaaatcaagattctgccatgcagaaaatacaacacatgatgaatgctaagacagaagataacagttcgacagtaagatctggtctaggggctgccaaagtagaagaaggtcactctgcgcgtggtggacaatttgttcttggtggtgcaaagggtcctgaagaaaatccaattggcaaatctgttagaataggttctggcaacgctgggcaaggttatacttcagatgaggtcaaggtcctttttcttatactggttgacctatgtcgaaggacatctaccttgccgcatccattgcctgcctctcagaatatgcctcgtccacgaggagctgatgctgctggacttctacttcgagaattagaactgcaacctcctgcggaagaatggcatagacgcaacatgtttggtggaccctggtcagaaccagatgattttggtccattggacaatatgcctcgtctaaaaattagtggttccatcaactctcatttgtctgacatggaagtggatgctgtcagttccattgggattgatctttggccaagaaagcgtaggttatctgaaagagatgctgcatttggtctgaaaacatctgtaggtcttggaggttatctaggtgtcatgggatctcgaagagatgttgtcacggctgtgtggagaacaggtctcgatggtgattggtacaagtgcatacgttgtttgcggcaaacttgtgcatttgcgcatcctggtgccccaaatcagacaaatgaacgtgaggcttggtggatcagtcggtggagccatgcttgcccaatgtgtgggggttcatgggtgaaagttgtttgagcgctgtatttggcaacaacttcgctgctaattgctttcctgacaaacatgtatggagttccatagttatgcatctaacgctaggctactaggatcaggttcagccgttcatgccagatggttggtctacaggcacatgcacgtggcacgaccactgtggaagtctggtagaattaggagctattctgggggtctgaatatgtaactgacatttgcattatgctgtctagtgtattattaaccagtgactttccttgctaaaaaggtgtagcatcgttacttgttcagcgctggacgtacttttcatgttttgtcaaaggtttagtagcgcatggtgtgtgttggtaaggttctactcctttttctttttaagacaatgatacacagcttccagcgtgttccagaaaaaaaaacaaaagatcaagtattacttcttgggatcgtgttccattaaaaaagagatcaagtattgttccttgggacacgttccagaaaaaaagaaagtattgcctcttggcac

SEQ ID NO: 10132 - DNA, 2038 bp, Zea Mays
tccggccacgcgcgcccgtgccgggtctttcgctgaccagcggggcccagtcgtcatccttcttcccccactcgctcgacgcagacccaatcccaacagaaatcgccgcatggctcgccgctcacttcggatcggccgaacgacctcctggatatcgggctgccccacccgatggtgtataagggaccccggcactcgattcatatctctcgcctcgctgttactcgccctcctcgccacaatatcgataattttgcgccgtcgcggggaaaacaggggctgccgcgggggaacttcggctagccgtcatccgcgcctccagtgtgggcctcagagccttccctcggttgcggggcgggcgctggtggcctcgccacctggaattgtcgccggggacttcaccaattggtcgccggacctctcctatcacgatcgagccgccgcgcagcgagggcggacttcctcggagcttaatctgcgaacctttttgaacgatctaggcttcctggaatttggaacgtggatttgatctgctcctccaatggcaacctttagcaaggctagcaggctgtgtggtgcagtgactatgcaaccaaaacaggtgtggagtctactctcgagaatcctgtctaagctgctcggtcttcctggtattttgttgaagaaattccgaaaggaaggtgtgtcggaattggatgctgttgcattgccagagctatcacaggatgtgttgatggacatctttagtacacttgaggtccctgacctcatccgagcaggctcggtttgctcgtcatggcatgctacttacaaatgcctgctcgacctgaggcaatacaagcaaccccagacaccatgcctgttctacacttgtgaatctgccggtagcaacatagggtttctatacaacctcaaggaaaataggtcctacaagttaactctaccggagccacccatccgcagtaggttactgatcgggtcctcgaacggttggttgattactgcagatgagaggtctgaactgcaccttgtgaatcccataactggagaacaggttgcacttccctctgtgattaccatagagcatgtgaagcccatctttgatgcatcaggtactatccatatgtacgagttgtcatatgaaacaccacccgacctgtttgatcttggcgatctgcgcgatgaactctacttcaaggcatttgtgtttcctgatccatccaccactggaagctacatcgtggttcttattcatgagccacgttcacggctttcgtttgcacgaccgggagatgacaagtggacctcggttggacaaggtatcggatataaagactgcacatatgtggatggtcttttgtatacagtggattggactggagaaattgatgcttttgattttaccgcatcccctgttaaaatgacagtaattatggacagtctgaagtatcctccatgtgaaaacctgtacattattcaggctccatggggtgatctgctgcatgtttggaggactattgacgttccacccaatgctccatcgtgggaccctgaaaagtgcctggcagaaaccgtaaaaatacaagtgcataaagtggacttggaagcaaagaaatgggtgaaaataaacaggttgcagtgtgatggtgttttatttcttggccacaacgattcactttaccgtagtgctcaagtacatccaggactcaagtcaaatcatgcatacttcactgacgattgtaaagaattgactgttgcattcaaaaattccacacgtgatatgggagttatggacttggaaaataatgccaagaaggaaattgtctctcaaatttggtccaactggccctgtcccacttggataacacctaatcttatgaagctgaatcaggcattcaacaaatagctttttagcggtaaaggctcatgaacgagaaggccaggatgttgtccatggagcagaggaagcggctgcagctcgccaggctgctcgccatcgaccgacccatctggctgctggacgagccctccgtcgcgc

SEQ ID NO: 10133 - DNA, 5591 bp, Zea Mays
gggttggagcctttcttctggctggcccacttgacagcccagtccaagacgctgctctgactagtaaaccctttcccctctccggactcgaggattcggagtttcggacaaccgacaacatcgctcgccggcgacgagcgcggcgcggcggcggcgatggatgggggacacacgacgaggcatccgatgtctccagcgatctcggcttcgactgtgctaccgcagcagcggcagatgcagcctcaccaccacccggcgcggccggcaatcgccgatctcttcaccctatacctcggcatgaactcgaagcagcgagcggaagacccattgagagagagctcgaataagctgcagaagagagtgactgctctgaacagagacctgcctccccgtgatgagcagttcatttcagattatgagcagttgcgcatgcagtttcctgacgctgagcagttgcaggcaatcacagaatcagttctcatctcctttgtgctgcagtgcagtagccacgcaccacaatctgagttcttgctctttgctacacggtgcctatgtgctcgaggccatcttagatgggatagcctccttccatctctgcttaatactgtttcctccatagaggcacctatggtgcaaggagtttctgtgactggtggtggttctgtaaccccttcgtcagctattacaatgccaaatgctccaaactttcaccaatcaaacccagcctcacctttgtcagtaatgaacaccataggatctcctactcagtctggtattgaccaacctgtaggtgcaaatgtgtcgccaatcaaggcagctgaattctccagctctgcgcagcttggtactgcagcaagaggtgaccagtctcgcaggggagcagaagctagctatctgcatcatctatcctgcaggataattctagcagggctggagttcaatttgaagccagctacccatgctgtaattttccagcatatggtaaattggttagttaactgggaccagaggccccaaggcatggatgaaactgacacaatgcaaacatgcaggctagaaaaacctttgcatgaatggatgcatctatgcttggatgttatatggattctagttaatgaagataaatgtcgcattccattttatgagcttgttcgctgtaacttgcagtttcttgaaaacattcctgatgatgaagcactggttagtataatcatggagattcataggaggagagatatggtgtgtatgcacatgcaaatgttggatcaacatcttcattgtccgacatttggaactcatcgtttcttatcacaatcatacccaagcatagctggagaatctgttactaatctgcgttattctcccattacttaccctagtgtattgggagagccactacatggagaggaccttgcaaactccattcctaagggtggtttagactgggaacgtgctcttcgttgtttgaggcatgctctccgcacaaccccatcaccagactggtggagacgcgttcttcttgttgccccttgttacagatcacagtctcagcaatcatcaactcctggagctgttttctcacctgatatgattggtgaggcagttgcggacaggacaattgaactactgaagctcactaactcagagactcaatgctggcaagattggcttttgtttgctgacatctttttcttcctaatgaaaagtggatgcattgactttcttgattttgtggacaaacttgcttctcgagtcacaaatagtgatcaacagattctccggagtaaccatgtcacttggttgcttgcgcagattatccgcattgagattgttatgaacactctaagttcagatccaaggaaggttgataccacaagaaagataatttcattccacaaagaagacaaaagccttgacgccaataatattggccctcaaagtattcttcttgatttcatcagtagtagtcagactctgcgcatttggtctttcaacacttcgattagagaacatttgaacagtgatcagcttcaaaaaggaaaacagattgacgaatggtggaaacagatgatgaaagcttctggtgagaggatgatagactttacgaacttggacgaacgagcaacaggcatgttctgggttctctccttcaccatggcgcaaccagcttgtgaagcagtaatgaattggtttacgtcagctggaatggcagatttaattcaagggcctaatatgcagccaagtgaaagaataatgatgatgcgtgaaacttaccctctgtcaatgtcattgctttctggcttgtctatcaatctttgtctgaagcttgcttaccagcttgaagagaccatatttcttggccaggctgtccctagcattgctatggtggaaacctatgtgaggttactgcttatagcaccccattcattgtttcgtccccattttacggcattaacccaaagatctccatctattttgagcaaatctggtgtgtcattgctcctacttgagatactaaattacagattgctgcctttgtataggtatcatggtaaaagcaaggcgttgatgtatgatgtcacaaagataatatcaatgattaagggtaaacgtggagaacatcgtctttttcgattagcagaaaatttgtgcatgaatttgattctctcactgaaagacttcttttttgtgaaaaaggaattgaagggcccgactgagtttactgaaactctaaaccgcataacaataataagtcttgcaatcactatcaagacgcgtggaattgctgaagttgaacacatgatttatcttcaaccattgttagagcaaattatggcaaccagtcagcatacctggtcagaaaagacactgcgttattttcctcctctcattcgtgattttttaatggggagagtggataagaggggtctagctatccaagcatggcagcaggcagaaacgactgttattaaccaatgtaatcagctgctctcaccatctgctgagccaaactatgtcatgacttatttgagccacagtttccctcagcatcgtcaatatctttgtgctggtgcttggatgctgatgaatggacatcttgagatcaacagtgcaaatcttgctcgcgtcttaagagagttttcacctgaggaagttacagcaaatatctatacagtggttgatgtgcttctgcatcatatccaatgcgaggtgcaaagggggcatctagcacaggatttactatccaaagcaatcacaaatctttctttttttatatggacacatgaactccttccgctggatattctattgctagctcttattgacagggatgatgatccttatgctttacgccttgtgataagtctgcttgaaaaaccagaacttcagcaaagagtcaagaatttctgtaatactcgttctccagagcattggctgaaaaatcaacatccaaaaagagctgagctccagaaagctcttggcagccatctttcatggaaggaccgctatccacccttcttcgatgacattgctgcacgtctgcttcctgttattccactgattatttataggcttattgagaatgatgcaactgacattgcagacagagttcttgcattctattcttccttgcttgccttccacccgctaagatttacatttgtacgtgatattcttgcgtatttctatggtcatcttccaatcaaactaattggtaggatcctcaacctgctgggtgttagcactaagacccccttttcagaatcttttgctaaatatttagtgtcatcaaattcttcaatatgtccaccaccagaatactttgccaacctgttgctaaacctcgttaataatgttatacctcctttaagtagcaaatcgaaatcaaacccagcagacacaacacgctcgactttcaacaaacatcatgcatcttcacaacctggtggagttggtaacaccgatggccagagggcattttatcagaatcaggatcctgggtcgtatacacagcttgttttggaaacagcagctattgagattctctcacttcctgtgcctgctgctcaaatagtgtcctctttggtccaaataatagcacatgtacaagcaatacttatacagtcaaatagtggccaaggaatgtcaggtggtttggggcaaagttctgggctgccaacttctccttcaggggctgctgaatcctcaggtcccaaccaagcgaacagtgctgcaactggcatcaatgccactaactttgtttctaggagtggttactcctgccaacaattgtctgttttgatgattcaagcatgtggtcttctgctggcacaactcccaccagaattccacatgcaactatactcagaagcagctcgagtcataaaagactgctggtggcttgctgatggttccaggcctgttaaagagcttgactctgctgttggatatgcactgttggatcctacatgggcttcccaagacaatacatcaacagccattggtaacattgttgcccttctgcattccttttttagcaatcttccacaagagtggctggaatctactcatactgtcatcaaacaccttcggccagtcaattcagttgccatgttaagaatcgccttccgcatattgggtcccttgttacctcgtctagcctttgctcgacctttgttcatgaagaccttggctttactcttcaatgttttgggtgacgtgtttggtaagaaccctcaggtctcaaatccaaatcctgtggaggcgtcagaaattgcagacataattgacttcttgcatcatgcggtgatgtatgagggccaaggcggtcctgttcagagcacgagcaaacccaagctggagatactgacattatgcgggaaagtaatagagattttgaggccagacgtgcaacatcttctctcccacctcaagattgaccccacctcttcaatctatgctgcaacgcatccaaagctcgttcaaaacccatcctaataatgttatagcttacaagtgtattctaatgatgcaagatgcttcgaaccactgcagaagtctcaacatgtgatgctgttggatgagtagaattgcagtaactgtaacatgtgattcaggggcgtattctcaagtgattcgccgttgtcagttgtatcctttagttagaatgttgtaaatgctatctgcttagtgcatattaggacataactacatagtgtaagcagtaaccatggaggttatcttgccaggctaagaattttggctgccttgcctgtgagccatgcgacatatgtatcctgtcgcattaggatgagcgacaaccgacacggtcgcatgatgcaagatttgtgccggttggccgattgtcaccgtgcagatctcttcgtaacagtgctgcacgtggaaggtttgaccgagtgactgcatcaccagttaatagtgtgaactgtatcaaattcttgatcatcttgcttattatgaaatgcctacgttgtgtcaatcactcttgcattgtatagtcgctcatcaagtgttcaaacttaattgtgggtaaaattgtttggttcttcttgcatgacattcatccaatc

SEQ ID NO: 10134 - DNA, 916 bp, Zea Mays
aattaaactgctaatacgatcaattagcagtaggaacttgctgctgtagtagttgaggatcaagtggggaagacatcttcgagtggcaatttgctatccttggcccgagagacagcgagtttgagggtggaatctatcatggcaggatccagcttccctcggattatccattcaagccgccgtccttcatgctactcacgccaagtggacgctttgagattcagaagaagatttgtttgagcatatccaattatcaccctgagcactggcagccatcatggagtgtgcgcacagcgttggtggccttgattgcattcatgccaaccaaccctggtggggcattgggctcattggattacaaaaaggaagatagacgggcacttggtataaaatcacgtgaagcaccgccaaaatttgggtccccagaacgacaaaaactaattgatgagacaagaaaacactggtgaaacctcagcagttgaggttgccaaccatcatgtgcctgaagcaagccacagagagaacattccaagagttagttcgtctcaccagaatcctgctgttgcgatccagaagccaaatcatgacaggctgttgaccttggccgcatttgggctgactcttgctattatggcacttgtgatcaagaaattcttaaaaatcaatggcttgggcggtttcattgagggcaagttctgagtagggattgtgcataagttggatgtaagagatgactcattcctcatactaatatgctataagctatataaccccgtaagatttgtaaatgactgtttagttattatagatgaaatcaaaatggtgcggtactattaataccccattgtatctagtacacctgatggaaagtgccgagttttgaggcttctgatctgatgtatatgtttgctacaac

SEQ ID NO: 10135 - DNA, 482 bp, Zea Mays
atgaatgatagagcgtggctagcgctaaagaaaaatacgtatatatgtatgtgtgcgcatgcatgtatatacatatgtatgcgtgttcagcaggcggcagaattggtgaaagggctgaacacgtgtggcgctcggccgccggggccgcccgccttaggcttattatctgcaccggcggtggttgcggcggcggcagatgctccggtggcaacaaggcgctggcaggaggggcagatggagagcgcagcggcagcggcggtgggcatgaaaaaggcagccgggtgggggtgcgggtggctgagggcgcggagctgctggagctcgcggtggagacgccggttctcctctgttaacgtctcgcagcagcgcttgagaatctcgcagtccacttctgtctgcttcagcttggttctggctcttctgttttggaaccaaacctccacttgccttgggctcaggacaggacttacagggttgagggt

SEQ ID NO: 10136 - DNA, 1007 bp, Zea Mays
  misc_feature (1007)..(1007): n is a, c, g, or t
ggttatcacaataacccgactctcggacccacgacgagttaagcccggagggaaaaaggacaaatcacacaaaggcacagggaatcgcgccaccgtgggacgcgtacggcgcaccgcccgcccgccggatctgcgccggcgacgcgcccggacgtcggatctacgccgccgcaggaggggggaggcggcgctgtggccgttctctgcccgcgagcgcccggatccgtcccgccggtgacttcatctccgctaatccaacggataggcaaaactctaatctttgtcaaccatcaagactgtagagactatgaacaacactcattgtcttcttctcaattgaataagggagctgctacatataattgcattccaaggaaaaaaaacaataaggtggtgaaaacatcttctcttctccaaagactgctgactgcaagttgcaaaagtttgtcttcagcttgctgtgttctttcttccctctctggcggagtacacgagaagtttgtagatataggcactaggcagctcctttcagctcttctatgtccagggatttggactgtcctgttcagacacagatggctgtggcagtcctggaccggagcttcagcagtgaatatcctggaggcagcagaactgaggggaggcaactgagctggaagagagtctttgtgcaaactgacaatggttctgtccttggcattgagctggagagaggagaaaatgtgcaaactgtgaaaaagaagctgcagatagctctcaatgtgcccactgatgagagttcattgacctttggtgacctggttctgaatgatgatcttagcagcattcgcaatgactcaccgttgcttctcaaaaggaatcagattcaccgaagcaattccacaccttgcctctcccctactggccaggatgtttggcaaagagaccggagtggacccattgaaatacttggctgttcaagcccttcatctcggatgaagcagattgcgaaggatgtcataaggccn

SEQ ID NO: 10137 - DNA, 1064 bp, Zea Mays
  misc_feature (1064)..(1064): n is a, c, g, or t
ggttatcacaataacccgactctcggacccacgacgagttaagcccggagggaaaaaggacaaatcacacaaaggcacagggaatcgcgccaccgtgggacgcgtacggcgcaccgcccgcccgccggatctgcgccggcgacgcgcccggacgtcggatctacgccgccgcaggaggggggaggcggcgctgtggccgttctctgcccgcgagcgcccggatccgtcccgccggtgacttcatctccgctaatccaacggataggcaaaactctaatctttgtcaaccatcaagactgtagagactatgaacaacactcattgtcttcttctcaattgaataagggagctgctacatataattgcattccaaggaaaaaaaacaatatatatatatatatatcaatcaaaatggtcctgtgatatcgagcttcagttgatgcagaggtggtgaaaacatcttctcttctccaaagactgctgactgcaagttgcaaaagtttgtcttcagcttgctgtgttctttcttccctctctggcggagtacacgagaagtttgtagatataggcactaggcagctcctttcagctcttctatgtccagggatttggactgtcctgttcagacacagatggctgtggcagtcctggaccggagcttcagcagtgaatatcctggaggcagcagaactgaggggaggcaactgagctggaagagagtctttgtgcaaactgacaatggttctgtccttggcattgagctggagagaggagaaaatgtgcaaactgtgaaaaagaagctgcagatagctctcaatgtgcccactgatgagagttcattgacctttggtgacctggttctgaatgatgatcttagcagcattcgcaatgactcaccgttgcttctcaaaaggaatcagattcaccgaagcaattccacaccttgcctctcccctactggccaggatgtttggcaaagagaccggagtggacccattgaaatacttggctgttcaagcccttcatctcggatgaagcagattgcgaaggatgtcataaggccn

SEQ ID NO: 10138 - DNA, 1296 bp, Zea Mays
  misc_feature (1296)..(1296): n is a, c, g, or t
ggttatcacaataacccgactctcggacccacgacgagttaagcccggagggaaaaaggacaaatcacacaaaggcacagggaatcgcgccaccgtgggacgcgtacggcgcaccgcccgcccgccggatctgcgccggcgacgcgcccggacgtcggatctacgccgccgcaggaggggggaggcggcgctgtggccgttctctgcccgcgagcgcccggatccgtcccgccggtgagtccccgcgccagctcctcggcctgtgatgaatgtcgttcgacgggagccgcagcgggcggtgctactccgggctcgctaaatttccgcaccaccgcgaacgagagaaaaagggccaggtccggtcactggatgccaccgctccctccctagcccctgacaacgatctccaggcattcgcttccgcagtccgcaccaccgccatttcacgcacaccgccgctgggtgcgcggacgcgtggtcactcccacagtccaaactccacagtccccgcatctgccgctattgctgtgctcggctcggcacactcagactcggagtgagagcgaccaagaagaggggatgatggagaagtgacacggcgccggaggtgacttcatctccgctaatccaacggataggcaaaactctaatctttgtcaaccatcaagttgatgcagaggtggtgaaaacatcttctcttctccaaagactgctgactgcaagttgcaaaagtttgtcttcagcttgctgtgttctttcttccctctctggcggagtacacgagaagtttgtagatataggcactaggcagctcctttcagctcttctatgtccagggatttggactgtcctgttcagacacagatggctgtggcagtcctggaccggagcttcagcagtgaatatcctggaggcagcagaactgaggggaggcaactgagctggaagagagtctttgtgcaaactgacaatggttctgtccttggcattgagctggagagaggagaaaatgtgcaaactgtgaaaaagaagctgcagatagctctcaatgtgcccactgatgagagttcattgacctttggtgacctggttctgaatgatgatcttagcagcattcgcaatgactcaccgttgcttctcaaaaggaatcagattcaccgaagcaattccacaccttgcctctcccctactggccaggatgtttggcaaagagaccggagtggacccattgaaatacttggctgttcaagcccttcatctcggatgaagcagattgcgaaggatgtcataaggccn

SEQ ID NO: 10139 - DNA, 1388 bp, Zea Mays
  misc_feature (1388)..(1388): n is a, c, g, or t
ggttatcacaataacccgactctcggacccacgacgagttaagcccggagggaaaaaggacaaatcacacaaaggcacagggaatcgcgccaccgtgggacgcgtacggcgcaccgcccgcccgccggatctgcgccggcgacgcgcccggacgtcggatctacgccgccgcaggaggggggaggcggcgctgtggccgttctctgcccgcgagcgcccggatccgtcccgccggtgagtccccgcgccagctcctcggcctgtgatgaatgtcgttcgacgggagccgcagcgggcggtgctactccgggctcgctaaatttccgcaccaccgcgaacgagagaaaaagggccaggtccggtcactggatgccaccgctccctccctagcccctgacaacgatctccaggcattcgcttccgcagtccgcaccaccgccatttcacgcacaccgccgctgggtgcgcggacgcgtggtcactcccacagtccaaactccacagtccccgcatctgccgctattgctgtgctcggctcggcacactcagactcggagtgagagcgaccaagaagaggggatgatggagaagtgacacggcgccggaggttgcaccctgctccgcctcctcggcgccacagccgccttagcggtgacttcatctccgctaatccaacggataggcaaaactctaatctttgtcaaccatcaagtatatatatatatatcaatcaaaatggtcctgtgatatcgagcttcagttgatgcagaggtggtgaaaacatcttctcttctccaaagactgctgactgcaagttgcaaaagtttgtcttcagcttgctgtgttctttcttccctctctggcggagtacacgagaagtttgtagatataggcactaggcagctcctttcagctcttctatgtccagggatttggactgtcctgttcagacacagatggctgtggcagtcctggaccggagcttcagcagtgaatatcctggaggcagcagaactgaggggaggcaactgagctggaagagagtctttgtgcaaactgacaatggttctgtccttggcattgagctggagagaggagaaaatgtgcaaactgtgaaaaagaagctgcagatagctctcaatgtgcccactgatgagagttcattgacctttggtgacctggttctgaatgatgatcttagcagcattcgcaatgactcaccgttgcttctcaaaaggaatcagattcaccgaagcaattccacaccttgcctctcccctactggccaggatgtttggcaaagagaccggagtggacccattgaaatacttggctgttcaagcccttcatctcggatgaagcagattgcgaaggatgtcataaggccn

SEQ ID NO: 10140 - DNA, 1223 bp, Zea Mays
cccgtccgtccgcggttcctctccccattccccaacgttcctcgctccagagcgtttcaaacggtaaggaagccacccccgctgtgaggttacttaaggcacggtgacccgacgcgagcaaagctccaagacccgcacgcgaacgccctccctgccgctccgccgtttcgcgtgggagtcgtttcgaaaaagtctgtttcgcgagcggtgaggactgaggagtgtggaggcctaaaaccatggcggcgagcatcgggatcatggacggcgcctacttcgtcggcaggggcgagatcctgcactggatcaatgcgaccctccagctctccctcgccaaggtcgaggaggcagcgtctggcgcagtgcagtgccagctcatggatatggttcaccctggagtggtgcccatgcataaggtcaatttcgatgcgaagacagaatatgacatgatccagaactacaaggttcttcaggacgtgttcaacaagctgcggataggcaagaatattgaggtcaacaagcttgttaaaggacggccattggacaacttggagttccttcagtggttgaaaagatattgtgattctgtgaatggtggaattatgaacgaaaactacaaccctgtagaaaggaggtcaaagggatgcaaagaacgtgtctcaaagggttccaataagccatctaaatcattgcaagccaataggctttctggtgctgatccaacagatggaggccatggagttgggaaagtatgtaacactttttctgaagagcattacatagaacagattcagaagttgtctgaaaagatgactaaggcggtccggaagatactttatgcagctgatgcaaaggattcaccgctacctgaggcgaatgatataatcacaaagtcaccaagcttgttctcaaatgaaaccgagtgagatgtgcggctacatgagctaattttggtgcttattttccatcattgatcgtcttagttttgagtctgtaaatgcgtaaaataacatttgacacaagtctttttgctgtcaaaaacagttttcctgtaagaacttgagtggggttaattagttattacgcattcatgcttgatgtgactgtccctgtatggttcctctggagaatatagggtctgttcacttgactaatctgtaccggcgtctactacttttacagtgtttttgtctcaatggattgcagttgcaacagtctaaata

SEQ ID NO: 10141 - DNA, 1630 bp, Zea Mays
cactcgtccccttcctccccttccgtctcgcaacaggcgaggcgagagaactcgtcgtcgaagcgaaatatagccagcgcaccaatcccaattcccaacccgacgcaacgcaacgcaacgcacctcatcccggttgcttgcgccaacgtaggggatcgcccggccccgccccgctccgcttcgcgcccctccttcctgcctgccgtaaccgcgccgtgcaactgtgcaagggggacatcacagattctttggtatcttcctggaaatttccatcaattgttttctcctcaaccattgctggtcatgttgtttgtagtgattgtctgtcaggttcagtaggttgttgagtctagataccagatgatggacctgtccacgacttcagtgctggcagctaaagcttacaaatacaaagcagaatcacttgttaaggagtaccttcttgcagattcgtatgtttcatacactgctgtacttggtgggatcctgatgtgcaagatggcttatgacataacaagcataatcagctcattgtactacaagggttatggttcacttacaaaaacccaaaagcttgagtggaacaacaggggcatgtccactatccatgcgatattcatcacagtggtgtcagtgtacctggttttcttctccaacctattctctgatgagctggatggactagtaacttatcggagttcaaatctatccaatttcactttgggggtttctgttgggtatttcatcactgaccttgctatgatattatgggcttatccttctcttggtggaatggagtatgtccttcaccatatgctgtcgcttatttctatagtctatgctatgtattctggggaaggacagttgtacacatacatggttctcatctctgaaacaaccacacctggaatcaacctccgatggttccttgataccgctggactgaaaaaatccaaggcctatcttgtcaatggtgttacgatgtttattgcatggctggtggcacggatcattttgttcgtctacttgttttaccacatttacttccactatgatcaggtcaagcagatgcatacgtttagctgcattctgatatttgctgtgcctacaatactgctcgtcatgaacacaatgtggtttgccaagatcttgagaggccttaaaaagacgctagccaagaggcagtgaaaagaagaatggtaaaacaagctcaaggacatcgatagccaaaatccatcccctcgtacagtcactttacagttacatgcacttcccgagtaaagccgtcagtgcagctcgtagcacaagctaaagcccttgcacatgatcctgaaatacgctaaacacagctcatttttttccctggatgctctgccttgtacatacggccgtctgtattgggtgcttacaccttgagggatcgtttggtgaccaggaaaatagatgggaaagaaatccctttgttacggcctcgttcgtttcaactggtttggctttggcccgtttccggcctcattccgggtggaaatggaatttggttgtttctctatgagctgttcgatggctgagtctgacgattgcgctgttgcgtttgtcttttctatttcttccgatcttaaatatacgagga

SEQ ID NO: 10142 - DNA, 1646 bp, Zea Mays
cactcgtccccttcctccccttccgtctcgcaacaggcgaggcgagagaactcgtcgtcgaagcgaaatatagccagcgcaccaatcccaattcccaacccgacgcaacgcaacgcaacgcacctcatcccggttgcttgcgccaacgtaggggatcgcccggccccgccccgctccgcttcgcgcccctccttcctgcctgccgtaaccgcgccgtgcaactgtgcaagggtggggtggtggtgccatggcgagcacggtgtggagggaaggcggttgtggccagcatggcatttctgcattcatgtgggcaagctggatgattcaaagttgttgatatgtggtggttcagtaggttgttgagtctagataccagatgatggacctgtccacgacttcagtgctggcagctaaagcttacaaatacaaagcagaatcacttgttaaggagtaccttcttgcagattcgtatgtttcatacactgctgtacttggtgggatcctgatgtgcaagatggcttatgacataacaagcataatcagctcattgtactacaagggttatggttcacttacaaaaacccaaaagcttgagtggaacaacaggggcatgtccactatccatgcgatattcatcacagtggtgtcagtgtacctggttttcttctccaacctattctctgatgagctggatggactagtaacttatcggagttcaaatctatccaatttcactttgggggtttctgttgggtatttcatcactgaccttgctatgatattatgggcttatccttctcttggtggaatggagtatgtccttcaccatatgctgtcgcttatttctatagtctatgctatgtattctggggaaggacagttgtacacatacatggttctcatctctgaaacaaccacacctggaatcaacctccgatggttccttgataccgctggactgaaaaaatccaaggcctatcttgtcaatggtgttacgatgtttattgcatggctggtggcacggatcattttgttcgtctacttgttttaccacatttacttccactatgatcaggtcaagcagatgcatacgtttagctgcattctgatatttgctgtgcctacaatactgctcgtcatgaacacaatgtggtttgccaagatcttgagaggccttaaaaagacgctagccaagaggcagtgaaaagaagaatggtaaaacaagctcaaggacatcgatagccaaaatccatcccctcgtacagtcactttacagttacatgcacttcccgagtaaagccgtcagtgcagctcgtagcacaagctaaagcccttgcacatgatcctgaaatacgctaaacacagctcatttttttccctggatgctctgccttgtacatacggccgtctgtattgggtgcttacaccttgagggatcgtttggtgaccaggaaaatagatgggaaagaaatccctttgttacggcctcgttcgtttcaactggtttggctttggcccgtttccggcctcattccgggtggaaatggaatttggttgtttctctatgagctgttcgatggctgagtctgacgattgcgctgttgcgtttgtcttttctatttcttccgatcttaaatatacgagga

SEQ ID NO: 10143 - DNA, 2765 bp, Zea Mays
cgctcgtaattggccgttattattgtactcccttctccattccactcgtccccttcctccccttccgtctcgcaacaggcgaggcgagagaactcgtcgtcgaagcgaaatatagccagcgcaccaatcccaattcccaacccgacgcaacgcaacgcaacgcacctcatcccggttgcttgcgccaacgtaggggatcgcccggccccgccccgctccgcttcgcgcccctccttcctgcctgccgtaaccgcgccgtgcaactgtgcaagggtggggtggtggtgccatggcgagcacggtgtggagggaaggcggttgtggccagcatgtacttttctgtttcggtactctggttcgatcctgatggggttttcgtccatcgatcgcgtctcggtcctgcacgcaatgcagagggggttacggttctttctgttcttcctccccgcggtccgcgtcgggatgctggtctggtcgatgctttttttggcttaccgcggacgcgacgggatgcttcggccgttgttttcttttgatctctgtgacccttctgggaatcgattccatgccggattggtcgcaatgtgcgggaggttttttcttgtcctgttttttcctcgctggctggttggattctgccgcgaaaagttctcccccttatgcacctttcccccccccctcaagatatctttattcgtcgttttcgtggttccttatgggtgcttgggttcccttgtgtggttaaaaggccaataagctgcagtgtttttgttctcaagagttctttccttgtgacagggggacatcacagattctttggtatcttcctggaaatttccatcaattgttttctcctcaaccattgctggtcatgttgtttgtagtgattgtctgtcaggtgaaacatgttgtgtttggtgatgttcttactagcattcaaatgactcaagatacattagttatttgtcagttgttttgtatctgatggaccaatatatgctcaggattcatatttgggcacttgaggtgaaaaccatcttattcgattttgttgaactgtgataccactcattcttaatgaaatggatcatttccctttgccagtatcttgttgctttatttgcacccttgactatagttagtatagtttcagtattcgaggtgttgtcctatttgcaatatcaaacaggaagcataagataagagaaaagtgtatgtggcttcattgttagatttaaaatattgatactgtctaagtgattgtcaagctaggttgtcatatccatatggttcctcattacacatttaattgtgggatctgtatggtttcacagacgcatttataacattcattgtgcgtttcatggatcattatttaattgttgtatattaatgctccatttcttagggcatttctgcattcatgtgggcaagctggatgattcaaagttgttgatatgtggtggttcagtaggttgttgagtctagataccagatgatggacctgtccacgacttcagtgctggcagctaaagcttacaaatacaaagcagaatcacttgttaaggagtaccttcttgcagattcgtatgtttcatacactgctgtacttggtgggatcctgatgtgcaagatggcttatgacataacaagcataatcagctcattgtactacaagggttatggttcacttacaaaaacccaaaagcttgagtggaacaacaggggcatgtccactatccatgcgatattcatcacagtggtgtcagtgtacctggttttcttctccaacctattctctgatgagctggatggactagtaacttatcggagttcaaatctatccaatttcactttgggggtttctgttgggtatttcatcactgaccttgctatgatattatgggcttatccttctcttggtggaatggagtatgtccttcaccatatgctgtcgcttatttctatagtctatgctatgtattctggggaaggacagttgtacacatacatggttctcatctctgaaacaaccacacctggaatcaacctccgatggttccttgataccgctggactgaaaaaatccaaggcctatcttgtcaatggtgttacgatgtttattgcatggctggtggcacggatcattttgttcgtctacttgttttaccacatttacttccactatgatcaggtcaagcagatgcatacgtttagctgcattctgatatttgctgtgcctacaatactgctcgtcatgaacacaatgtggtttgccaagatcttgagaggccttaaaaagacgctagccaagaggcagtgaaaagaagaatggtaaaacaagctcaaggacatcgatagccaaaatccatcccctcgtacagtcactttacagttacatgcacttcccgagtaaagccgtcagtgcagctcgtagcacaagctaaagcccttgcacatgatcctgaaatacgctaaacacagctcatttttttccctggatgctctgccttgtacatacggccgtctgtattgggtgcttacaccttgagggatcgtttggtgaccaggaaaatagatgggaaagaaatccctttgttacggcctcgttcgtttcaactggtttggctttggcccgtttccggcctcattccgggtggaaatggaatttggttgtttctctatgagctgttcgatggctgagtctgacgattgcgctgttgcgtttgtcttttctatttcttccgatcttaaatatacgagga

SEQ ID NO: 10144 - DNA, 3746 bp, Zea Mays
atgcaaataaatacactcaatgaagtgcagcgccacttcattgaaattggtaacaggcctgtaaacaaaattacaatgatttaagtactagttgtaagtagctggtattttttaagaagtggtagaagttttggtacttacagaatagaaataagcaagaaacaatctagtattcgaaaacatacactacaacaataaactaggtttctacaaagtagttatgttgtggtttcggaaaccggggacacaatagaatttatggttcagcgggagggctagcgtggacgtactccgaattgtgaatcgagtgactcgtgaggacttatactggtttaggcaaatgccctacgtctagtgtagtgctaatcttgtattgctctcaagggctagtagcccgaaatatgttacaagtggcgcaagtgagaatgagaaagctgggaaggagaagacttctgcttaatgttccctctccttggttcatgttctatcgtccccttttatagttcaagggggaggcttacagagagatgggttagctggaggctggagcagatgagagtgggtcccaccatctacaggagtccttccagtgacgtcgccttctaatacgcgcgtaagcgcacgcggggtatggtgtgttgctccgctgcgtcccatcggcgttgcgactctggtgggtcctatatcgtagtatcgggggtgttgcagtggcatgtcgtgatgtcagtcgggatggtgttaggtggcgacgtgccccatcgtggctggcgtaggctaatgagcctctgtctcgttttcacactcgccgagcacatgcgtgcgtaagaccccacccagtgcgtgatagggggtcatggaactaggtctagggtccacaagcgtactggcctccgtcgcaagtatttgtgtctccgcctcgcccaattgctcggtgggagttggtcagagcgtccgcctcactcagttgctcagcgggagttggtcagagcatccacctcgcccggtttctcggcggtagttggtcgtcttacccccatggtcccttgcccttattgggctatcacaggtaatgggcctatttggggtaccccgttcctggggacccatcaagttacttgtctcactcctcactataaatgtaataaatacatattacatagagaacattaactatccagtttccagcttggatgatattgtattgcagttagcactaggcttcaagagatcaacccaaagaaagaagttgcacaagaattataactaaaatatggctctctaatgcaaattgcataatatgcatacattatcaaaaatgcttatcattcactataaaatgtaaccaacaaagctttaagttaatcctagccaaatgcaagctcaaagaagtgtctgtcagaggcaaactctagccggtgacggagagcacccgcctaatcctaagaaaaaaaggggcaacctatggttagcctgagatggtgtaagaacacacaagggtttagagtggttcgggccgccggagcgttataccctacgtccacttgtgagttgtattgctttgggtgtctgtgagcttgagatcataccgcgtgtaccttcgtttttatagtccaaggggggcacgtacaaggttgttgggtcttgggtcccgacaggtgaccctagcgatccattactaaataatgtacaacatggagcattaaatgttgtgacatgcggaggtctcgactgttggccttcgtgcggatcttctgaccaggcgtgcctttcccgtcctgtcggcgtgggttatgctgacgtgcgtaggagttatggtgatgtgaccatgttgtcacctttgaccaacattgcaaagggtgttttgcctgggccaacggtagttcatgatggacgccacccacgcgcgcggcgctgtgacacaactgtctgcctcggtaacgcgtgacttatagtgcgttcattcgagcctgcatggcctatcaaaagccagcccatgccctgcaccagcgacgcatacttccactacccgtatttaatgtaggtagcggagcaatcttgtagccgaaggttggtgctaggcatccacaagccacatggcggtgtcggacccctgccacgtggcggcgccgcacccctacctgagcgcatgctggcctgaagacttggcccccttctcccccttgtcggggatccggacagtacacgtgggggtccaggacccgcctgcgggggttcggacggcacacgtggaggtccatgacccaactgcggggtctggatgtatatgtggaggtccgggacccacctgtggggggtctagactcacggtagcaatccttgtgcattttcaccctagggcacgtggcggctccaggcctgttcatgagcggggagcaggtccaactgcacaggtccttagcacatagttacgggtaaccacgtgggtatttggtcatatttggtcttgatattgtaggagcgattaccccagttacgggccgacagtgtcaatacatcatacaaactgagaaaaatacggtaacaagtataccgtggaaagacaataaaccagcctaattttcctatgaaaatgcatgcggccttctaagctttaatgccagcttcatctaacaataacaaattaacaaaaatgaagctatatgtgagataactggttagagcacagaaataattagtatgggcaagacgatggttccagaagccaaatgtgcgacatgaggccacaataagagataaaggaggcaacacctacacaaaatttatacccacttgcacttacatcttcctcaaaaaacgatcatttgcaattccaacctgcttctgataagaacatcctaataacaaggctagcattccattcttatgataaaccttatctcactgaaaacctatttttaaaacactgtagaaacagcagtcaaagctttatgcacaaatcagattttggactagtaaatcttgaataaacaacctgaacacattcagtgaaaaacatttaagatccattttgcggcagcagattatattgataaaattccgcaaacaagacaagcaatcaagcattccacctggactaaaaatacaaccaaaattgtatgcacacagaaatagaggtagaaaggccatcaatacccaagagacttatatcatttaccgaatagcgcgagcaaaaccatactgcttagtttgaaaccctacgagagtaacttgaaccttgaggtatataccatactgaacgaaagccacttccttagcatcaatatcttcagcgatcctccgcgtgagcgcgatcttcccggtgccgtcgtcgagcgtgaacgacacgctggcctccatgttcaccacgctcaccaccctccccagaatccaaacgttggtggcgtcgacgccgtcgatagggatgacaaggtcgccatcaccggtggcgtcggcggcggcgaaggagcgggcgatgtgacgaacggtggtggaggcggatccggagaagcgggggtcacgcgacttagccggagaaggggtggcgaccgcggaattgtcgggcgccgcggtggcgtgctgcgacggcacgatggccggaccggcgaagtaggaggccatcgtactcacgtcggcgcgggtacggtggtactgcggtttcggtggggacgatgacgaggggatttgtttcgagtggggttgtgggggcggcagtcgtttgagcgggaaaatgaaaaaaatgagtacgg

SEQ ID NO: 10145 - DNA, 2727 bp, Zea Mays
tttacccgctggcactccccaccacgcattctctctccccacccccaacgcagcgattgcaggaaccatttcacttatctgggagaattcagagagatgggaggggcaactcattcacagtggcttatggacggggagtgcaagatgtggaggctgcaatgctggataacggcaatttcatcttaaggagcatcacgaaccaagctaagatcatatggcagagctttgactctcctactgatacatggttccctggaattaatattacacttggtgctaaattgctgacttcatggaagagctatgatgacccagcagtaggggattattcttttggacctggcataactaatgcatctcaactcattatctggtggaaagggatccaattttggaccagtttacgctggaatggtgataccaactctctcattccagagctgacatctcttggtatcatccctgttttatttcaatgtgacaaccttacatgtacatacactgccaatcccagagacacaatgacaaagattgtgttagatccaaatggttcattgaacatagcccaatttagtcctgtaactgagtcatggactctgttatggcgacagcctcctagctgtgaggtatctaacatatgtggtgtttttggtatatgcaacaacaatatgtcacccatatgtcattgtccactaggctttgaacaacaagcaggagatacccggaaagggtgcactaggcaaatccaactgcagtgtaatggtgataggtttgttaatatgtccaatatgcgattccctgactcaagagttaaactttctgttatgggagacggcaaatgccaattggaatgcatgaaaaattgctcctgcactgcatacacttattctgtattggatggttgcagcctatggtatggcaatttaacaaatatgcaggacggatataagagtggagcagggactctttatcttcgtgttgctaatagttcaggtcacaaattactttggatagctggtgtacttccttcaattggatttcttattttttgtctgatcttgtttatttggatcagcagatcaaaaaacaaaggaaaaggaaaacaggatggtcatcactccataatgacttcggatgctatcaaactctgggagggtgagaaaacaagcacttattttgcggtgttttccttttcacaaataagaaatggtacagacaaattttcaacagaaaacatgcttggagaaggggggtttggcccagtgtacaagggccacttaccggatgggcaagagattgctgttaagagactggcagcaaattcagggcaagggttaactgagtttaaaaacgaagtcctcctcatagctaaacttcagcacagcaatttagtccggctgttaggttgctgcattgaagaggaagagatgctattagtgtatgagtacatgccaaacaaaagcttggatttcttcttatttgaaaaatcaagaagagctttgctagactgggagatgcgcatgaacataatcgaaggggtcgcgcagggtcttatctatctccacaagcattctcggctcagggttatccatagggacctgaaagcaagcaacattttgctggacactgatatgaaccctaagatctcggactttgggatggcgagaatattcgatcccaaaggaacgcaagccaatacgaaaagagttgtaggaacatatggctacatggctcccgagtatgctatggcaggcaatttctccaccaagtccgatgtgtttagctacggagtgttgcttctggagattatcagtggaatgagaaacgctggacctcgaaggcatggcaactccgttagcctccttggttacgcatgggaactatggaacgaaggcaggtgccatgagctcatcgataaaccattacgcggcaggtgtcctgagaacgtagcgttaagatgcatccatgtcagcttgctgtgtgttcaggagcaagctgcggatcggccctccatgactgaggtcatttcaatgattaccaacggaagtgccacgttaccagacccaaagcagcccggtttcctctccatgttggtcccaaacgaaaccgatgtcgctgaagaaacatgctccctgaatggtctctcagtcaccatccttgacggaagatagcactagttcaaatcgccgcctttctttgcttggtccatgcatgcgcgttaccattgcatcactttgcatggtatttcccaaaagttatattacgggagcctgaaagttttgttctcatgcatccaggctaatggtatataagcatcgccgcatcattgagtccttgtccttagaggaacgtatggttgttgatggtgccaacctggcattatgactttctgatttcatcacatattttcatccaggctatatatatgctcgcttttattctgttcggtcaagattcaacacgaggatttaaacgacaatgcaaatgaactggcataaacatttcatcggtggggattgctttctctcttttcctctctctatctacatgatggagacaatgtcagtcgctgcatagtcgcggcatgttcttatgcatggctcgttcatcatgacttttgattggtttggcgagctcaggctggcacacagttgtaaaaaaaagtaagcgttctgatgtgtgacagttgcccaaatcaatctttgtccgttgcgtgacaacgatggt

SEQ ID NO: 10146 - DNA, 4162 bp, Zea Mays
cgagggtcttcgccctagtcgcctgtgcgcagcgggcctagaggcagcgactgagatatccattccactcccgtcaataattcgtcatgaccactgaccaggttgccttcacggagccgagctcatctatgacgttactgaaattgaaacttgaacggggatggggatccaaggaagaagatgacggatcgtgcaaataaggagccgctatgcccgcggaagaggaagaagcgaataagcgatatatctgcttccaaaaggctagaagctggaattccattcagacacatgtcacaagcaacatgatttggacatttcaacgaacacgtcgttggacgtagcagcagcagcaggtagttgactactagacttaataattgctaccacatgcatcctttcacatagcaggaattaataaaaaaacaccgctacttttgttcttagggggtgtttggtttctagggactaatgtttagtccctagattttattccattttagttccaaaattaccaaatatagaaactaaaattttattttagtttctatatttagcgatttatacactaaaaaggaataaaatgaagggactaaacattagtccctagaaaccaaacacccccttataaaatctatgtaacatactcaatttgtttgcctggaatctagacttgcatggtgtccgttagatgttttgatcccctctacacttctttctctttaagcgtttttagtgttgattattatctggtcaaagtcaagcagatagaaaaagtggagtatgattgcaataactgagagatagtcagttccctgtcaaactatcattctcaagtggacgagctggttgccaatcagtgcttagagtttagtatccattagagacgccaatgttgaccgacgactagaaaattgacctcatagttctatcatggaacttctaaaactcataactctgaatgttcatcccaaaagttttacccgctggcactccccaccacgcattctctctccccacccccaacgcagcgattgcaggaaccatttcacttatctgggagaattcagagaggtacatttcacttatttgggagaattcagagaggtacggagaaattcaatccctttcctcatgattatgtcagtgcatttctctcttgctgctttgatttgattagcctagtttggtaatcggagtaaagcagatagccatgtttgggaaaataagtttctgcagagagtgcacccttgttaatttgttgatcctgtctgtaatagcatcaagatgcttgtcagctcccacagaaagattaggcagtatttttcagaaccaatcaattttagatgggcagacactagtgtccatgagcagaattttcgtgctcggtttctttagccctggagcttcgagcaagcgatatgttggtatatggcacaacgatgtttcagaaagaagagttgtatgggttgccaacaggaacgatccattacaagatacttctggcatacttaagtttgataacagtagcaatctgatcgttttagatgggaggggcaactcattcacagtggcttatggacggggagtgcaagatgtggaggctgcaatgctggataacggcaatttcatcttaaggagcatcacgaaccaagctaagatcatatggcagagctttgactctcctactgatacatggttccctggaattaatattacacttggtgctaaattgctgacttcatggaagagctatgatgacccagcagtaggggattattcttttggacctggcataactaatgcatctcaactcattatctggtggaaagggatccaattttggaccagtttacgctggaatggtgataccaactctctcattccagagctgacatctcttggtatcatccctgttttatttcaatgtgacaaccttacatgtacatacactgccaatcccagagacacaatgacaaagattgtgttagatccaaatggttcattgaacatagcccaatttagtcctgtaactgagtcatggactctgttatggcgacagcctcctagctgtgaggtatctaacatatgtggtgtttttggtatatgcaacaacaatatgtcacccatatgtcattgtccactaggctttgaacaacaagcaggagatacccggaaagggtgcactaggcaaatccaactgcagtgtaatggtgataggtttgttaatatgtccaatatgcgattccctgactcaagagttaaactttctgttatgggagacggcaaatgccaattggaatgcatgaaaaattgctcctgcactgcatacacttattctgtattggatggttgcagcctatggtatggcaatttaacaaatatgcaggacggatataagagtggagcagggactctttatcttcgtgttgctaatagttcaggtcacaaattactttggatagctggtgtacttccttcaattggatttcttattttttgtctgatcttgtttatttggatcagcagatcaaaaaacaaaggaaaaggaaaacaggatggtcatcactccataatgacttcggatgctatcaaactctgggagggtgagaaaacaagcacttattttgcggtgttttccttttcacaaataagaaatggtacagacaaattttcaacagaaaacatgcttggagaaggggggtttggcccagtgtacaagggccacttaccggatgggcaagagattgctgttaagagactggcagcaaattcagggcaagggttaactgagtttaaaaacgaagtcctcctcatagctaaacttcagcacagcaatttagtccggctgttaggttgctgcattgaagaggaagagatgctattagtgtatgagtacatgccaaacaaaagcttggatttcttcttatttgagctttgctagactgggagatgcgcatgaacataatcgaaggggtcgcgcagggtcttatctatctccacaagcattctcggctcagggttatccatagggacctgaaagcaagcaacattttgctggacactgatatgaaccctaagatctcggactttgggatggcgagaatattcgatcccaaaggaacgcaagccaatacgaaaagagttgtaggaacatatggctacatggctcccgagtatgctatggcaggcaatttctccaccaagtccgatgtgtttagctacggagtgttgcttctggagattatcagtggaatgagaaacgctggacctcgaaggcatggcaactccgttagcctccttggttacgcatgggaactatggaacgaaggcaggtgccatgagctcatcgataaaccattacgcggcaggtgtcctgagaacgtagcgttaagatgcatccatgtcagcttgctgtgtgttcaggagcaagctgcggatcggccctccatgactgaggtcatttcaatgattaccaacggaagtgccacgttaccagacccaaagcagcccggtttcctctccatgttggtcccaaacgaaaccgatgtcgctgaagaaacatgctccctgaatggtctctcagtcaccatccttgacggaagatagcactagttcaaatcgccgcctttctttgcttggtccatgcatgcgcgttaccattgcatcactttgcatggtatttcccaaaagttatattacgggagcctgaaagttttgttctcatgcatccaggctaatggtatataagcatcgccgcatcattgagtccttgtccttagaggaacgtatggttgttgatggtgccaacctggcattatgactttctgatttcatcacatattttcatccaggctatatatatgctcgcttttattctgttcggtcaagattcaacacgaggatttaaacgacaatgcaaatgaactggcataaacatttcatcggtggggattgctttctctcttttcctctctctatctacatgatggagacaatgtcagtcgctgcatagtcgcggcatgttcttatgcatggctcgttcatcatgacttttgattggtttggcgagctcaggctggcacacagttgtaaaaaaaagtaagcgttctgatgtgtgacagttgcccaaatcaatctttgtccgttgcgtgacaacgatggt

SEQ ID NO: 10147 - DNA, 3653 bp, Zea Mays
tttccatagacatccctgtcccacaaaaaaaatgcagaaacagaaaaaacagtagtgcagcagtattagcagacagcaggggtgtgcatgtgaccccaagaggccaggacaggtaggcgcacatgccacatcccccgcgagcaactactaccatggcatcctcccctccacctcctcgccaggaagaggaccagcaacgggaagaagggcaccaccatggcgacggaggcgacgacgaccagatcaccacaccgctcctggtggaagcggcgacgacgtcgtcgccgtcgccgtcggagggagacgatccagagaactcgccgatcgagcaggtggcgctgacggtgccggtgggcgacgacccgtcgacgccggtgctgacgttccggatgtgggtgctgggcacggcgtcgtgcgcgctgctgtcgttcctgaaccagttcttctggtaccgcaaggagccgctgaccatcacggccatctcggcgcagatcgcggtggtgccgctgggccgcctgatggcggcggcgctccccgcgcgcgccgtgctccgcggcacccgctgggagttctcgctcaacccgggccccttcagcgtcaaggagcacgtgctcgtcaccatcttcgccaactccggcgccggcaccgtctacgccatccacgtcatcaccgccgtccgcgtcttctacggcaagcacatcaccttcttcgtctccctcctcgtcgtgctcaccacccaggtaggtaggaaagctggtgcaaggggaatgcgtgtgtgcagtgcgcggctagctagcgccactgtccatatgtttggttcacggatacgtagagcctgaccacatgagcatatacgagaagaaccaggctcctactaaacaggctaaacatatacaagagactcttgtttggttagctgtttagattcatacagaaatgtgtgttcagactcacatatgcatgaactcagcctgtacatgcagcgatgctcctcacgcgcgcaccgagagagcctggctgggagttaagttttgcatgtctagagcctggttggtccatgcagcaaaccaaacaagagatgctttaagtatccgcgactgcatatacttggcagatgcagggaaccaatcatacgatgtgtgtgtctctcgtcacgtacgtgttgtgtgcacgcaggtgctggggttcggctgggcgggaatattccggcggtacctggtggagccggcggcgatgtggtggccgtctaacctcgtgcaggtctccctcttcaggtacaccacaactccccaaccgtttctggccaatatgtgtgttatacgattattttaattttggagcagagggaatacgattattttgtatcagctctctgtttttttatttgttacgctttagataaaaaatgaaccagcgaataacaaatattcgagaacgaaaatagtagaagctatcattgattagttgattgtgtactgcttgattggatctacaataggggtgtgagcgaggagagatgtggtaagcaatgtgtgtgtttggcgttctgattcagcataaagacataaggacgtcgccaaggtagacaatggcgcgtggatcacgtggcatgggatatgccacgtcggcttggagctcgcttgcatccaaggccgaaaagggactattcaagattcttacagattcatacggatgtacattatttgttttgttttgccactaaaaactccagtggtgacaaggaagttgacacaaacacactggcctccgctccgcacgtgtgtgctggatcaccagggcgctccacgagaaggagcggcgcgtgaagggaggcatgacgcggaaccagttcttcctggtggcattcgtctgcagcttcgcctactacgtcttcccgggctacctgttccagatgctcacctccctgtcgtggctctgctgggcgttcccgcgctccgtggtggcgcagcagctggggtcggggctgagcgggctgggcgtgggcgcggtggggctcgactggtccaccatctcctcctacctcggaagcccgctcgccagcccctggttcgccaccgccaacgtggccgccggcttcgtcctcatcatgtacgtcatcacgcccgccgcgtactactggctcggcctgtacggggcgcgcagcttccccatcttctccgacgggctcttcaccgccgccgggcagacgtacaacatctccagcatcgtggactccaacttccggttcgacaccgaggcatacgagcgcaacggcccgctctacctcagcaccttcttcgccgtcacctacggggtcggcttcgcgtccctcaccgccacggttgtgcacgtcttcctcttccacgggagcgagatctggcagctgagcaggtcagcgttccaagagaagaaggtggacgtgcacacgaggctgatgaggaggtacaggcaggtccccgagtggtggttcatctgcatcctcgtcgccaacgtcgccgtcaccatattcgcctgcgagtactacatcgagcagctccagctgccctggtggggcgtcctgctcgcctgcgccatcgccttcttcttcaccctcccgatagggatcatcacagcgacgacgaaccagactccaggcctgaacatcatcaccgaatacatcatggggtacctgtacccgggccgtcccgtcgccaacatgtgcttcaaggtgtacggctacatcagcatgacgcaggcgctggccttcctgcaagacttcaagctgggccactacatgaagatcccgccgaggaccatgttcatggcgcaggtggtggggacgctgatcgcggcgctcgtgtacatcgggacggcgtggtggctcatggacagcgtccccaacatctgcagcacggagctgctccccgccgacagcccctggacgtgccccatggaccacgtgttctacgacgcgtccgtcatctggggcctcatcggcccgcgcaggatcttcggcgacctcggcacctactcggcggtcaactggttcttcctgggcggcgccgtcgcgcccctcctcgtgtggctcgcgcaccgggtgttcccgagccagagctggatcctgctcgtcaacatgcccgtgctcatcggctccaccggcatgatgccgccggccaccgccgtcaactacaccacgtggatcattgccgggttcctgtcggggtacgtggtctacaggtaccggcgtcactggtgggagcgccacaactacctgctctctggcgcgctcgacgctggcctggcgttcatggccgtgctcatctacctgtgcttgggcttggagaacgtcggcctcaactggtggggcaatgatctggacgggtgccctctcgcctcttgtcccactgccaaaggtatcgttgttgagggctgcccggtgtatacatgaggaattgagaacccatgcattcggagaagagaacatggcaatgcaagtggacaagtgtctcaagagcaatgtaaataatttatcttttcaaacaatttagggatgggaaattggtgttcctttcattgtaaaatggctggtaattacggctattccagctcggaatcaaatttattccgtggtacaacaaaacataatttattcaaaaaagcgatctcgcatgctc

SEQ ID NO: 10148 - DNA, 3100 bp, Zea Mays
cagcgcgtcaactcatctgatcccgatcggaccataaaaacaaatgaaataaacaaataaaaatacgcgcgacgaacagagctgaacacaaacacccacatcgatccaacccaagccacgcctcggcgacaggccgacagcccacgagcgagatccaacccaagttccgacgccgcgggcgagaccgatcagatccacctcagccgtctcggatggcgtcagcatcgacggcggtgcggatgctccccgacggcggcgctgacgacgaggagcggtggctcgccgagggcatcgccggcgtccagcaaaacgccttctacatgcaccgcgccctcgattccaacaacctcaaggacgcactcaagtactcggcgcagatgctctccgaactgcgcacctcgcgactatcgccgcacaagtactacgagctgtacatgagggcgtttgatgagatgaagaagctggagatgttcttcagggaggagactcgccggggcagctgctctgtggttgatatgtacgagcttgtgcagcatgctgggaatgtcttaccgagactctatctcctgtgcacggtgggatctgtgtacatcaaatcgaaagaggctcctgctaaagatgttcttaaagatctcgttgaaatgtgccgaggcattcagcatccccttcgtggcctttttctgagaagttatctttctcaaataagcagagacaagttgcctgatattggttccgagtatgaaggggatgctgaaactattaacgacgcagttgaatttgttcttcagaatttcatagaaatgaacaaactctgggttcggatgcaacatctggggcctgcccgagaaaaggaaaagcgtgggaaggaaagaaatgaactgcgtgatctggtaggcaaaaaccttcatgttctaagccagattgagggtgttgaccttgatatgtacaaagaaactgttcttccaaggatattagagcaggtggttaattgtaaggatgaccttgcacagttctacctgatggactgcataatccaagtctttccagatgaataccatttacaaacattggaaacattattgaatgcatttccccagcttcagccaagtgttgatatcaaaacagtactctctcaacttatggacagattgtctaactatgctgcctcaagtcctgaaagttcttgcaagttgaagcttttgctaagttcagtaatgctattggaaaggtgatagaagcccaacctgacatgccagttgttggagccgtaactctatatgtatcgcttctgacttttactctccgtgtacatcctgaccggcttgattatgttgaccaagtgctcggtgcatgtgtcaagaaactttcaggcaaagcaaaacttgaagatagcagggcaacgaagcaaattgttgcacttcttagtgctcccctagaaaaatatagcaatattgttactgcattagaactttcaaactatcctcgggtcatggattatcttgataatgctacaaccaaagtgatggctgtggtaataattcaaagcataatgaaaaacacaacctgcatatctacttctgacaagattgaggcactattcgatttaattaaggggctgataaaggatatggatggggctcaagatgatgaacttgatgaagaagattttaaggaggaacagaactctgtagcacgtctcattcacatgttgcacaatgatgagcctgaagagatgttgaagatcttatgtactgtacagaagcatatacttcagggaggccccaaacgtttaactttcactgtgccttctttagtattctccgctcttaagctggtcaggagattacaaagccaagatggagatgtcactggggaggatgttcctgcaactccaaagaaaatattccagatattgcatcagactatcgacgcactttcttgtgttccttccccagagttagctctgagactatatttgcattgtgcagaggctgccaatgactgtgatttggaaccagttgcttatgagttctttactcaagcgttcatattatatgaagaagaaattgcggattcaaaggctcaaatcactgcaattcacctgataattgggacccttcagcggatgaatatatttggggtggaaaatagagacactctcactcacaagacaacagggtactcagcaaaacttctcaagaagcctgatcaatgccgagcagtttatgcgtgttcacatcttttctgggctgatgaccaagatgggataatggatggtgaaagggttctgctttgtttgaaacgtgccttgagaatcgcaaatgctgctcaacagatggctagtgctacaaggggaagcagtggatccgtaactctatttattgagattttgaacaagtacttgtacttctttgagaaaggaattccgcagatcacaaataccgtgattcaagatttgattgaattgattagaacggagaagcaaagtgataactctgtagctgatccatctacagaggcattcttttctagcactttgcggtacattgaatttcagaagcagaaaggtgggagcataggcgaaaaatatgaacagataaagacgagttcatgagtcagaactagcgcggcgccacgactggtttcgattttgttgagaattgggtcgtttgtttggcatggttcagtgaaatagaaaccataagttttagctcgctccatgtaaaagatgtttatacgagctgttaattctcaaatctcacggtctgagcgggtctgttcgcccattggcaacactttcaggtttagtcaggtggcaataagctgtgtcctttggggagcacaggtctgtacaggattacttgtgttcgtgatcagttctactgctacctgaatttcatcgttgtatatttccgccccttatgcgaagcttatggattttagatctctgtaacattcggagtacatgccttcatttctgagttctgactggacattgatgattgtttcagagtggccagtgcaggacttgaacattttggatgcccgttcgttgacattttaatgttacccattactctgctgtgtggcatgacctcgc

SEQ ID NO: 10149 - DNA, 976 bp, Zea Mays
gactctgagataggaggtgggattgcagagtcacgcgtcagttcgttccctcctctgtgtaccggccagtaaaatccgaacccacagcgagaaatggcggcggcagcgctccgtccggcgatcctccgccgcatccgcctctccccctccccttcgctcgccctcgccgccgctgggacaggtgcatcccacccgcacgcgctggggcggtggctcgcgcggcccatgtcctcccacgacgcgcacctcacccgcgacgaagtcatcgaccggatcctcgacgtcatcaagagccaccccaagatcgacccctccaaggtggtcatggccatcgaggaggagttcaagctcgagatcccagacatggaggctgacaagatcgactcactccctctggccatcgagtacgtcgccaaccaccccatggctggctgagcctctgctcgcccgagaggaggcgagttgaggtgaggcttcgcttggttttgtttccgagggcaaataatctgctggagtggcacagaaaaacttgttcctggtgctctgcattgcttcacggtgacggatgatgatgtcgaaatggaacattaacattttcagcgttagattgttgtttttgtgtgcgtgttatatctatatatactggttgacaaactagtttggttgattgagtctgatcgttgttgggttatttgaattgggttcgtgatagtttcccatgatattttatctgttttccatgtgcttttgggaacctaaattgataagaacggcttacaaggattgatgtaggttaaaagtctcagggttcatgacagctgttagtgtggcctcttgttgtccaactcttgttcctgttaatgaggcttgagtctgttttatttgtcaacattatggttttgttggttggaagtattccacctattgcatgagaagagatcaaaggaaagtgtggcctcttgttctaacatttttg

SEQ ID NO: 10150 - DNA, 2048 bp, Zea Mays
gtcagcgccctcacctgacagcctcgctctagccttcagcccacgctcgtcgcgcccccacagccagcgcccttgccccggccatctttgtctagcctccagcccacgcccgccgctcgtcgcctgcgccatggtgccagctagccgctgcctagcccagccctagtaggcaccagtcgcactgccctaggccccacacatctgccctgtgagcgcaggaggtttctgtgcgttttttgggagaggactgaatcaataattggttctttatctcttgtacttcgttgggattctttactcttgtagaatttataattatgtctcatatagattatatatttgctggaatcaaagttaacttgatgttttattgaggcagggccaacatgatccgaagatgatgatacaagttccacactgacagtggaaacatttagcttctaagagctctctgctacaactaataatttcagtaagactctcaggataggctctcggggccaaggcacagtctatgaaggccacttaccccgcattgtataggtcaatttctgctatgtgtcatagtaatacatacatcttaaaacttgtcgttgtgtcaccattgagctaattgtggatatttgattctgtacttagaatatgctacatgtcttttatggttactattataattttcgtattataatagttcactatttgttcagccaagttgttgtcaagctgttactactataacatcttttattaggaagctccagtcgagtggcctcgtccattgtgtagctttgtttatggaaaacaaatagttcattttttggtctgctatgtttttcaactgaactggagggcaacatatagaggtaattccacaattataaaccacttgaactttcatcgtcggtactgctttatttattattttgtagagtgcacttgtctggccaatttggatcttttagatatcgtggctaaatgtagttcaggctcattaaaattgaactttatttgtttgcttaggaaaaatgcaggtctaggaataaaactgcaactccgttagggttatgtgttagggttatgtttgtttgtgaacatgtgtatgtagtatatccataaaaagaaagtagtttagcatctttggcgtaagagtgtgttgctgattgtgtgtgtgaaagcaatcttttatcattttaatcatggttgcttttgaaagttttgagtatatgccacatgcatatgttctaattttgttatttactattgtttacattccaaattataagttgttttggctattctaggttcatagtttttctatgcacctaaatataaactatgtctagatacgtagcagtcttgaaagtcaaaacaacttataattaggaacagatggagtaagttctaatgctcaagtggttagatatctgcatcactggaaattcaatgaaaatatcctcgtcatgctactaacggtgttatgtgacgatgaagtctggagtatctcactcgttcttactaattgagatttgatattttaaggttttctagttctctgtcttgttagattaaaactatgtcaattttagcttagatctaatgccatgttttttttatttttaccctctgacaggcaggttgttgcatgtcattcacattgattaaagaatagctcaagaaaaaagacctaaactaaaatgccaagatctttagttgttgggtttatatgtttgttgcgatgaaagtgattattatgttgtttcttttgatattacagttgggatccactgtgattaggttgaagacaaaggatggtgtcgtcctcgctattgagaaacttgtgacctcaccactactgattgtatagaagggaagagtcttcaagatattggtcttgtagttgcaacaaagagaagagacaatggtggtgatgctatatctatagaagtagcaacgttggtattgtagctccaagatttggttgttgatgaatgatatatatgataatacattgttaagtatatgtgataatcattgattgttatttaatt

SEQ ID NO: 10151 - DNA, 1241 bp, Zea Mays
cacgggtcagataagcttttctctccccttcgcagctgcaaccgctcgccgcgtgctccctttgtactgaaccgcatcctccccgcgccgacctgctccggcgagttaaacatggccgtcctcctccgcagcacctccgccgccgcctcgactgctggcccctcctcggcgctgctcgccaccaccttccgccgctcccgcggctgccttctgccccgtgccgcgccgcagcgccgcttgtatgtggcccgcgcctcggcccagcccctcgaggtctgcgctaaggagtccatcaccatccctggccgcctcggagactgtcctttcacacagagggttttgttgactatagaggagaagcatctgccttatgatctgaagctagttgatctagctaataagccagattggttatttgaaatcaacccagaaggtaaagtgcctatcgtgaagctcgaggaaaaatggattggtgattctgatgttataacacaagcattagaggagaaataccctgaaccacccttggcaactccaccagaaaaagcttcagtgttcactggtgcagagaccccgaccaaagaggcctccatcgagcgggcccggcattgaggggccgcgccaggcggcaacggaacgacaaagacttcgctacatcccgggagcgaagtccttgtcacccttggcgacgcatcgaaaggggagcccttgctaaacctccgttcagcccagccggccaaagggcatctggggactccatcatactccggaggcgactctttccctaccccttgtctagccgttgactgataggaagctcgcacaaagactcttgaggacaccgtcagcagttatgcttcgtaggcccacctgtcggcgtaacgcgcgagtgtgtaaattagtgtgtgccgtctgctgcatggatggcgctgtaattactctgttacatggaatattctttggatatagttggtagataggggtagggtcgtactttggaccaccttcccccggacgggcctataaatacgcccgtcctatagccaaataagacacgcacaacgagaagctatcattcccaccaaccgtcgtgttaccctctcatgctctgctttttgtcactgagtgtttgggtccacatgacggcgcgtcagtgcccaacaatcatccttgtcgagagcttatggttgtcacctcgaagcaacaggtgtgccatcaggcagtgtagtgagatcagcccc

SEQ ID NO: 10152 - DNA, 1337 bp, Zea Mays
cacgggtcagataagcttttctctccccttcgcagctgcaaccgctcgccgcgtgctccctttgtactgaaccgcatcctccccgcgccgacctgctccggcgagttaaacatggccgtcctcctccgcagcacctccgccgccgcctcgactgctggcccctcctcggcgctgctcgccaccaccttccgccgctcccgcggctgccttctgccccgtgccgcgccgcagcgccgcttgtatgtggcccgcgcctcggcccagcccctcgaggtctgcgctaaggagtccatcaccatccctggccgcctcggagactgtcctttcacacagagggttttgttgactatagaggagaagcatctgccttatgatctgaagctagttgatctagctaataagccagattggttatttgaaatcaacccagaaggtaaagtgcctatcgtgaagctcgaggaaaaatggattggtgattctgatgttataacacaagcattagaggagaaataccctgaaccacccttggcaactccaccagaaaaagcttcagttggatcaaaaatattttccactttcattggtttcctcaaaagcaaagatccaagcgatggaacagaagaggcactacttaatgagcttacttcatttgatagttatctaaaagacaatggtccatttattaatggtggaataatttctgctgctgatctctctctgggtcctaaactatatcacatggagataactctgggccactacaagaattggtctgttccagattcactttcttatgtaaaaacatatatgaagctctgacagaggatgtaattgctggatggcgcccaaaagtcatgggttaaattcatttctaaagttagacgttaaggagagggagagaggtgtcgattggcgaatggagggtctagatgcaaaggtttgtcgcatggctgtaatatgtacatgaaatgtggtggattttgttaggaattttctagggcatagcatatctggtattcatatccaatctcctttgctttgtatgtcaaatggaaaactccttcgagactcaggtttaatttctttagtggcaaattttttggattggttaaaaaaatctctcattgtgtctcatccactttcgggttacaatgtcatatatgttactctttggttggaccgctgcagaatgaactgttgatgttggtgcgttagtgattggaggcgagattttcatggctggtgcgagcacaataccctacgctcggcggcacgggcgaagggccagcgcgccaactcaggtgccgcgtcggcgtgtaggtgcgtttgggcgtagg

SEQ ID NO: 10153 - DNA, 2805 bp, Zea Mays
cacaaacccatcgccagaatccaaaatcaaaagcatcgatttgatctcggcacggcccgcccgcatcctcttctccttccctgtcgctttttctgtctacagcttccatggcgctctctctctctgaatgaatactcctccatcttgccttcacctttttcctcctttttatatcaatatataaaatgttgaggttccagggcaaccagcgggtttgaagtttgaactcagtccctccccccgcaagctttctctctctctctctctctctctgatcaaatgtggcgagatctgtgtgagtaagcgtgaataccactacggtttttcgtcctccccttcccttcttgagctacttgagctactctggtcacttcttggagccggcaactgccagttgggggttttttaggacaaagggagcaaaaaaaaacgaacaccttcctgagcttaagacagcatggatcagtacgaggtgctggagcagatcggcaaaggagcatttggctctgccctgctggtcaggcacaagctggagaggaagaagtatgtgttgaaaaagatccgtcttgcgcgtcagacagaccgcactcgccggtccgcccaccaagagggttgctacgtctgcattgttatagggtactgcgagggaggagacatggctgaagctattaaaagggctaatgatacccacttttctgaggagaagctttgccagtggctagtgcagcttctcatggcccttgactatttgcatgcacatcacattcttcaccgtgatgtgaagtgctcgaatatatttctcactagggaccaaaacataagactcggtatgtcagttgccatcactctacaaaaaggcaatctttgttgttgcaagtacatagttttggcacaatccaatttgccttataaacaaatgcaggtgactttggtctcgcaaaaatattgaccgccgatgatttggcattctcgattgtaggaacaccaagttacatgtgcccagaactcctcgccgatataccttatggtaccaaatctgacatttggtcactaggatgctgcatgtatgaaatggctgcgctcaaacctgcttttagagcttttgatatgcaaaaccttatcaacaagattaccaagtcgatagtatcacctttgccaacaagatattctggtgcattccgtacgtcctgcaactccatctgaagtcacacctttctcgcagcatagttcctgttcaccagtctccaagcgagaagaggatgacattcgccgcagagcccgtttgcagaagcaagggcaggaggaactctttaggcagcgaaaggatgatagcagcctttagcaaaccttctcctgatagaagttctgtcagctctattcggagtgtcaaggacgactacaccgccacacagagtgtcagagagctatcggttgatgaaagcatggtcgaggttgctagtaaacccgtggcatcaaggacctcagatgtcatgaggactccgaaggcgactccgtggaagatgatgacgactctgaggaatcggctagaagctccacaagcatcatatgacagaacgagtcatacagagttttcaagaacaccggttgacaagaggaacagccgcgtggcccgcagagcatcgcttcctctgcccgtatttgagaccccgaagcagcgcagcagcatgagcgtcctggagcggctggagtcccccgacgtctccgtgaactcgcctcgcatcgacagaatcgccgagtttccgctagcttcgtgcgaggaccccttgttctcgaccgtgaagccaccgacacccgccagcgccagcgccagcgccacgcctccgttcgtggaccggtccatcaccaaggacaagtgcacggcccagacgctccggtccgcggcccacgacggtggcaacggcagaagcgaggacggcggcggtttgtcctcgggtcgcaccaccaccacggcagcgtcaagcggtgggacgtcggggtcgttgcagccgaaggggcggttcgacacgacgtcgtaccagcagcgcgcggaggcgctggagggcctgctggagttcagcgcgcagctgctgcagcaggagcggtacgaggagctcggggtcctgctgaggccgttcggccccgacgagatggtgtcccccagggagacggccatctggctcaccaagagcttcaaggaggcgatggccacgggcttgtagcggtggcctcctttcaccggcatggacggatcaggaattcaggatcgcccatcagccttgcaggctgtagacggccggatggcatcgccggtgctggcgtgtgtaggtcaggtaggtaggctatgagaattgagaagagagaggcgttagcgttgacggatcagttgttagttgctgggagtggacacaacaccatctcagtgttggccccccggtttattttgttactatgctagcagttcttagttagttaatggcgctctggctagctagctagtgatgtaccaatgcaacccccccccccccccccccccccccccagcagaattagtagcatcagggagtagcagtagaggtagagctggaggagtcttgagctaggaaggagaaggggattagtgagatataattcctatactgtgatgtagcccaagtatgtaccagtagcttcatatgcatcagtgctgactgctgaagaacattcagacatctatggattcagccattcaggccgattgctacgcttatctgcagttatttgctcctgcaatccaggagtgtggaatgggcgctgacactgttttgg

SEQ ID NO: 10154 - DNA, 787 bp, Zea Mays
caggggttagccactcacaccgttcgtttcgtatatctgtctccctctccccatcttatcacaacggcactccatcgcctcatcttatccgccggcctcctcacgccgtcgctgctgcctgctcactccccactcccgactccccgacgcacgagctcccaggagttagccatggcctccaccaccctctcctccgccttcagcctcctctcccgcccctccacctccccgtgccccgccgtctcgctcccgaggtcctccttccccgtgcctgacagccgccggagacgccgcgccgtcaccgtcgcgtccaccgccaccgagtcccccaaggtcttggagctcggggacaccattgccgggctcactctcgaggaggcccgcaaccttgttgaccacctccaggagcggctcggcgtcacagctgcggccttcgcgccggccgccgtcgtcgcagcgcctggggcgggcggcggggccgcggccgaggaggaggcccccgttgagaagacggagttcgacgtagtaattgaagaggtgcccagcagcgcgcgtatcgccactatcaaggtggtgcgcgtgctcaccagcctcgcgctcaaggaggccaaggaccttatcgagggccttcccaagaagcttaaggaggccgtcagcaaggacgaggccgaggatgccaagaagcagctcgaggaggtcggcgccaaggtgtctatcgtgtgacactagggatgaagatctttgcggaataaggacacaggaatgcctccagctaataatatacaag

SEQ ID NO: 10155 - DNA, 1396 bp, Zea Mays
agacagcagccccatcaccccctgagtcctgactcctgagtcctgacgcaccgcgaggccgggccaaatcgtcgagagccaagtcagcgaagccccgaaccctccctccctcccatggccgtccgccgcaggaccgcggcggccgctgccggggacccgcctccgcaggcgccaccggcagatgaggcggcggcggtggcaccagacgaaccggtcctccgggcgccgaacctgcgcgtggccgctgtggcagcggcgctcttcctcgcgcccttctcgtacctcgcgttcgtgcactactccctgaccgccgatctgcagcgatccatcctcaaatgcggcgccatgagcctcgttgggttctgcgtcgcgctcaagctcatccctatcgcggcccgctaccacctccgccgccgtatgttcggctacgacatcaacaagaaaggcttgcctacgggtcaaatcaaagtgcctgaggcactaggccttgttgtggggattgtctatttggtcattgctattatatttcagcagtttcactatgccccagactccatttggcttgttgaatataatgcagcattgacatccatctgctttatgattcttcttggatttgttgatgatgttcttgatgttccatggagagtgaaattggcgctgccaacatttgcagcactcccattgttgatggcatatgctggtggcacttccatcatcattccaaagcctttaaccccttatgttgggctaacagttttggagctaggtttattttacaagctattcatgctcttgttagcagtcttttgtacaaactcgataaatatacatgctggcctaaatggacttgaagttgggcagacagttgttatatctgcggcggttttgatacataatgtaatgcgcatagcatcttctacagatattgaaactcagcaagctcatgaattctctatttatcttgtcttgccattcctaaccatttcattagctctgctagcttttaactggtatccttcaattgtttttgttggtgatacctacacctattttgctggaatggctttggctgtgataggaattttgggacatttcagcgagacgttgttgctcttctttttacctcaagttcttaatttcctgtgttcggtcccacagctctttcactttgttccttgcccaagacataggttgccgaggtttgatcctggagcgggtctgttgactggtaccaaagatgggaatctggttaacatattccttaggttatttggaaagtgctcagagagggccctttgcataaggctccttattttccagtagcccggaacatagacgatctaattggatatacatctgcatcatggatgttctgaacaagtcggttcacgga

SEQ ID NO: 10156 - DNA, 1718 bp, Zea Mays
atgtacgcgcatgcttgcttgttagttgttacacacaccctactaactggcacttggccgcatcagttagcttggtccgttgcgtcgatcgtctcattgcgtccgactcagcctggagaggcgcttccactcgacgagccgcagcaagaactccatcacctcggcgggctcctggagcgagtaggaggcgctggtctccttggggtgcttggacaccaggatgccgacgccttggccctggccccggcgccgcagcgccctgaaggcgtcctcgtcggtgcggtcgtcgccgatgtacacgggcaggacgttggtgcagcccgcgaagccgagcgactcgagcaggaactcgagcgccttgcccttgtcccacttgatggtgggccgcacctccagcaccatccgcccctgcgtcagccgcagcctggggtactcccgcagaacgcccttcaccgactcccacagctcgccccacatctgaacaccatcgatcgaatcgaccatagatcatcatgtcagttaggacgatgcgtctcgtagcttatttattaggtctagtgtttgccaatggagggcgtatagcagcaatacgcacaagtggaggggggcacgggggcgagagcagccagccagataaagctgaaaacgacggctgttttggctaattattgcgggcgggcgggcgaaccttttcgtcgacgcatctgaagtggacggagacgcagaacctgttgttctccaccttggccccgggtatgctgcgcgtcgtctctaccaggcgctcgtgcacagcctctatcatgggcaggaactcgctcgccgttgccggttggaacaggactccttttgcctgttaatttggttcgattcggttgtataaaagttaataaagttacaacaatggatgaataagctaggcgatgatgtgtcaccttggccttctcgtgccgggaagaagaggccttggccggacccttgatgtccatgccgtggctgccggcgtagtagagctccgccagcttcacgaacccgaacaccttgtcgcggcaccggccgctcacgatcgccgtcgggaaatgcttggcgacgctacgcacggccatccgcatctgcttggccaaaaccaacaagctctcgtgagcatgagcaagtgagcagcatcgaccgaccaccgaacagcaggtacgcaactaacttactaacgcgctagctagctggttcggcctgctcaccgtctcgctcatgaaggcggcgtcggggtcgtccacgatgggcgacagcgtgccgtcgtagtccaggaacatgacgatgcgcctgccctcggacgccgccacgatcctctcgaacttgcccagcgccgacgggtgccgcgccatccaggcggcgcgctcctcctcctcgtcggcgccggcgccggcgagcgcggctgcggccctggcgtgcgtgggcgacgacgcccgcatggactccacgccccagcaggcgccgccgcccacctccgcctgcaagcacttgcggcgcacggcggcggctgcgatcccgctggcgccgcgcggcggcgggtacgggaacagcgtcgtccccgggcaggggcacgagcacgacgcctgcgctgggacgccggaagcctccgccaccgccacgctcggcttcgccatcggcatccgatcggtcggtcgacggcgatcagaggctggctgcagattggaaaggaatga

SEQ ID NO: 10157 - DNA, 1400 bp, Zea Mays
gtgcgccgcggggaccaccccggacaggcccatgccgacgaacagcagcgcgcggcgggcgcggtagcgcggcgcgctcaggcggggcgacatgagcgcgtacaccgtgcccgccccggccgccgtgatcgccgacaggtacgccgcccgccagcgcggctcgcactggaagatgtagtagatgggcgggaagaaggagaccacgatcatgaccgcgatgcccgtgtagtcgaggcggatcagcagcaggttcagccggtgcgagtggcacgacagcaggtggcacgcgctgctgctcagcaggcagaacatggcccccgccaggaacacgaagaagggccaccgcgtcgtctgcgacgccaccgccgtgccatgcgaggccaggctcgggttcgtctggatgaacatggccgcgcctcactgataggacatctccaatattgctggagacattttcagcgaccttcgagattggcctgcacagcaacaaaggggcccaacaaaaaaaagcagagaagatcagtttttacaagtaacaaggtaacttctcaattatggaatacaaaatctcatcctagctgaagcaaagtgttttggaacggaaccgaaagtgaattggtgagacttttagaacacagctgaagttactagctcagaaattaagaaggttcagtacaaacgcacaagaaccgtgtgcctctggaccagagcctaacgctacgcgtggtgttctcatctcaatcgccactggataatggcatggctgggggatggatgggagcctcgaaacgccgagcaattcgcacagtagctgaattaatctgaagaggagtaggaggaggaggaggagcagcagcagctcaccaggagagatgcccaatcagatcagccacctgggggaagtactggccgaggtgcaccagggtgagaccgaagaagagcatgaacccgagcaggtacgtccagacgttgatggtctcgttgtgccaggagaagaggctgagcacggcgttgaggacgggccactcggagcggtagtagttgaggatgaactcgttctccttcatgtactcgggcagctcgtggtagctcaccagcgcgtacttcttcctcccgccttcctcctctcccttcctcggctgcctcctccgccgcctcttgccccttcctccttcctccttcatggccgccgccgccgccgccgctgcttcttggtcggcgtcggcacacactgtggtggcgacctcctcactcgccatgtgtgcccacagcccacgccttgccgctcctctctctgcacctccctagctgcgcgccttctctctctctggaattatcaaggggggcagggaaggcttgataaaggcctggagctagcaccgcagagcgatatggtgtga

SEQ ID NO: 10158 - DNA, 2134 bp, Zea Mays
tccaccccaaaatggcactcgcgccatcacccccagcgctgccgcccaacccggcgctccctttgccgtggtgggggcgggccggccgcggtgcgctcctcggcgcccgcgcccgcgtccgcgccgtccgcgcggcgctacggcccccgagccagtggtccgtcgggagctggcggggccgcccggcgcagcagcagcccgagtacccggacaaggcggacctggaagacgtgctgcggacggtgggaacgttcccgcccatcgtcttcgccggcgaggcgcgcaccctcgaggagcgcctcgcggaggccgccgtcggccgggccttcctcctccagggcggcgactgcgccgagagcttcaaggagttcaacgccaacaacatcagggacaccttccgcgtcctcctgcaaatgtccgttgtgctcatgttcggaggccagatgcctgtcgtcaaggtgggaagaatggcagggcagtttgcgaagccaaggtcagatggttttgaggagcggaatggattgaagttgccaagctatagaggggacaatatcaatggggatgcattcaatggggagtcaaggttgccagatccacaccgcatgataagggcgtactcacagtctgcagcaacactgaatctgctgcgggcattcgcaactggaggttatgctgcaatgcagagggtagcacaatggaaccttgatttcacagagaacagcgaacaaggtgataggtggggttgctgtgaatcaacaatgattaaccttcatgcctatcgattgacacacttatttcttcaatatttcaattcatcccaagatgtgtgcattttaggttcattctatggtcttagtgattagctatttgtttacacaaaaaatggaaatgttccttttttccgtccctggatccagaggtatcctgatttgcacaaagtgaccgcaacacatttattaacgttcgagagttattcaattgtgccaattcatggtttacatgtgggaaatggttaataggtacatggagttggctcaccgagttgacgaagctttggggttcatgtcagctgctgggctccctttagatcaccctataatgacaacagcagaattctggacgtcacatgagtgccttcttctaccttatgagcaagcgctcactcgtgaggattccaccacgggcctctattatgactgctctgcccacttcctatgggtcggagagcgcactcgccagcttgatggtgctcacgttgagttccttcgaggcattgccaaccctcttggtatcaaggttagtgacaagatggacccagcagaacttgtgcggttgattgatatattgaatcccgaaaacagggctgggagaataaccatcatcacaagaatgggacctgaaaacatgagggtgaaacttccacacctgatacgcgctgtccgtggggccggtcagatagtaacatgggttactgacccaatgcatgggaacactatgaaggccccttgcggactcaaaacccgctcgttcgacaggattttgggtgaggtgcgtgcgttctttgatgtccacgaacaagaagggagccaccctggaggagtgcatctagagatgactggacaaaatgttacagagtgcatcggcggttcacgtacggtgaccttcgatgatctggggtcacgctaccacacgcactgcgacccaaggctcaatgcctcacagtctctggagatggcatttatcatcgccgagcgccttaggaaaaggaggatggcctcgtcgcctttgtacacgaaccagctgggttccattccatcaatgggtctgtgaacaacactaggttcactgtcaaggactagtccttgggttttgtttcagctgctgtgtcaaactttgctggcatgcactggtaaactagatagcctgctgtactgctcattcccggcactgggtctgccctcaaagtataatagatactcatcactttttgaccactctatttatcttgttcattattcctggaatgttttcccgaaatgtctgtctaccatgtactgctgttcctctttcttacatgtgtgttaactaggagcgttttggtccaattgacatcacagaccgttttaattggttt

SEQ ID NO: 10159 - DNA, 2031 bp, Zea Mays
agttcctcttctgtgtcttccccagtccccactccaccccgccgcagggctggaatggtctgtcgccttgtcgcgtccgtgatccgtcccttggcctctcgcagcggacagcggccctccgccccctccaaatagcagcgaaacccctcgcgtttaaactattccctgatccaacccctcctcaaactctgacgacgcctccttccgtgcccgtccgtcctctataagggcgccgccgaggagagagaacgatgacttcagctctccggcggaaggcggcgcagatggcttccgcggcgacacagtgcttcagctactcctcgttgccggccacgtgggctctgcggcagcggggcggcggtgccagcgtgctccggctctcttcccggcggaccttctcggtctccgcggcggccgggttcgacaaccagaaccgcgagtatgtgatcgtcgggggagggaacgctgcgggttacgccgccaggacgttcgtcgagcatggcatggctgacggccgcctttgcatcgtctccaaggagccagttccaccatacgagcggccagccttgaccaaaggctatctttttcctccggacaagaaaccggctcgcctacctattacctgagaaaattggagggaaattacctggagttcactacatacgggatgttgctgatgctgatgctctagtatcctcattgggaagtgcaaagaaggtggtggttattggtgggggctatattggcatggaggtagctgcagcagcttgtggctggaatcttgacacaactattatattcccagaggaccacattatgccaagattatttacaccctcgcttgctaagaagtatgaggaactgtatcagcaaaatggtgtcaaattcataaagggagctcttatcgaaaaacttggagctggctctgatggaagggtgtcttctgcagtacttaaggatggatctgtagttgaagctgatacagtaattgttggtataggagcaaaaccagttgtcagcccgtttgaagctgttggagttaaccctaaagttggtggaatagaggttgattccttgttcagaactagtgtacctggcatctttgcaattggagatgtagcagcgttccccctgaagatgtacaatagaattgctcgagtggaacatgtggatcatgctcggaagtctgcgcaccactgtgtagagacgctcctaacatcccagacaaaagcgtatgactaccttccatacttctactcgagggtttttgagtacgagggaagttcgaggaaagtctggtggcagttttatggcgacaatgtcggcgaagcagtcgaagtagggaactttgatccaaaggttgcgactttctggatcgactctgatagccggctgaagggtgttttcctcgagagtggaacctcagaggaattctcgcttcttccgcagctcgccaaatctcagcctgttgttgacaagtcaaagctccaggccgcgacttctgttgaagatgcattagagattgcaagaagctcactccggtccagtgccatggtttagctctcagaatctagtactttcttgaacccgaggctgtgcgctgctcgagcggttcatagcgtcgagaccacgtcagcaataacgcacaattacatagaatctattcccactggggttgtaacattcttcagtgcacctgcgtcggctatttccagcttgaaataaacctggttgccctttgaggggttgatgaggatgatagattgaagcctttatgctacttttttcttgatggtcttctgatcactcatgcattcatgtttactgctcgacatatagttcgtttaacagtccctcttttccgaagttactgtaagacgtgttttcccctatattcattatttttgctgtgtatctagacatagggctagtttgtaaactcaaatttccttcggattagagaggattgaagaagaaattagttttgaagggaatttgagttttcaaactagttcatagtatatatgtgag

SEQ ID NO: 10160 - DNA, 6782 bp, Zea Mays
atttgttgttataatataatgttttgttcaatagaaccttggcccttgctcagccaaacaagcgactgcgttcattgtctgagcacgttcctcatggttaccgtaggaaatcactttttgaaggtctaattcgatataatgttccgttgctaagagcaacatggtttattaaagtcacatacctgaaccaggtttggaatctcttgtacccttctcttatttactatcaaatgccacattgcaccattgtgatgatgtgtattcaattttatatagctacagacccgacagacacctaacagtatttcagtagcgggttctgataaccaacgctctaatcagtggacaaaggatgttgttgaatatttacaacatattttggacgaattttgttctaaagagggtgcattcgtgcatccatcttttagagagcagtcatcaccaggacctactgctggaaccaatcagataaaaatgaaaactgaagcatctccagctgctggagacattgaagaacccttggtgcacttcaaatggcggtatatggttcgtctcatccaatggcatctcacagaagaattgcttgttccctcagtacttatcgaatggctatctaaccaactccaggagagagattcagttgacgttttagaacttctcttgcctattatgcttggtctggttgacaccattactctctcacaaacatatgtgcgcatgtttgtggagctactagtgagacgtctcaatgatgcttctgttgttgatagtccaaaaggaccttcagtttcttctgttatagcagagttactgcggtacatggtacttgcagtgccagatacatttatttctttggattgctttcctctcccatcttttgtggttcctgatgtatatggtagaggtgctttgttgaagataactagcagtggtggaatttcaagttctaaaaggtgtgatgcttatcggtatttgtcctgtggttatgctgtttgttcaattcaaaaacgtgcatatgatctcgcaacagttgctaaccctaaccttcaagcacgtggtgcagccaaagtggtacaggctttggacatagctcttgtcacaggaaatttgtcagtggcatattcttcactctttaatgatttatctgatacgttaatggaagagagatggattaaagaagtcagccccagtctgcagtcttctctgatgtggattgggactgttgagctatcccttatctgttctatatttttcctttgtgaatgggcgacatgtgattatcgtgattgtcgagcatctccctctcggaatgtgaaatttacaggaagaagagatttgtctcagatacatatggcagtgtctatcttgaagaataaaatggatgagatgaataatttgtctcgttctaagagtagcactcgcgttaccctgaataatatcaccaaaggttcttcactgaccgatgcttgtttgacagcagctgctgtggatgacacttctggattgcaaagtaatgcaaagaatgtggatgagaagaaggatacgaatgatatctttgaaagccctggtccactgcatgatatcattgtgtgttggttggatcagcatgaagttagcagtgttgcaggttttacccgggtggatgttctcatcgtagaacttatccgcaatggtatattttttcctcaggcttatgtcaggcagctaattattagtggaattactgacaagaacgacacaatgttggatgttgaaagaaaaaggaggcatcacagaactttgaagcagcttcctgggtcttctttatttgatattcttgaggaaactaggaccgtggaagagcaacagttatatgagatgatgtcgacatactccagcgagcggcgccttgttctctctgaactttcatgtgatcactcattttatgcaagtggcagaggcgagtatactgcaagttcctgcattcggaagcagagtgatcttccacttgcatcaggaggtgataagcatggaagagtgccagaacaagtagaagatgttaaagccctattgtcaagtctgttgggttttacatatccttccccagtggaatccgaacctcgccaaatcaaaacaagctttcaagaatcagcaacttcaacactctcacaagttgagactggagaagcaaaaagtggatgtgaggtttgtatgaggtccaaagggcagaaattggatgatactgccactcctttccaagggttttcattgattcaatcggacgaggaagatatttggtgggtgaggaaaggcacaaagttacaagaatctttcaacattgaacctgttcagaagtctgttaagcaaacttctaggggtagggcaaaagtggttcgtaaaacacaaagtcttgcacaacttgcagctgctagaattgaaggtagccaggggacatctaccagtcatgtctgtgaaagcaaaatgagctgtccccaccataaacctaatattgatggcgataatgttaaggattttgatcacacgagggtggcaaatctgactgaaattgggaagtcactaaaaagacttagattgcttgagaggcgatctgtctcttcttggttgttgaaaacagtaagacaacttattgaaggaaatgaaacaacggctgctaaagctaccaattccataagcattctttctttgcagtctgatgacaaaacgacatccaaatggaggctaggtgatgaagaactactgtcagttctctatttactggatacatgctgtgatttagtctcttgtgcaaggttccttgtatggttactagcgaaaattcgtggtggaatgggctcttcgggccaacctgggaggagttctatgcatacgaggaacagagatcaccaagtttgtcaggtcagcgaggcacttgtgttctcatctctgcttaggtacgagaacatacttcttgcggctgacatcctgcctgatgttctaagtgctttagtgaacagaaattctgtgtcagcaattgtcaggcatcctggttcaacagcttttgcttacgtacgatactttttgaagaaatatagagatgtggctggtgtggccaagtgggaaaaaagctttcggaccacttgtgatcagcgcctgttagctgagcttgataacgggcggtccattgatggcgaattgatttcttcttcgggggtttcagcaggcgaggagattgatgagcaggtccgccaaaagttgaatggaaggagttcaagacttgtgcagaatatgaaagaaatagtgcaacggcaagctgatgaaattcagcgcagtttgaaggaaaagaaagttctagcaactcccaggaatccacccacttttgagaaagaagatagctatcaaattgcacatgacattgtttcgggcttagtagaatgcatcaggcaaaatgggggtgcaaatccagatggagacctttcaacagttgcttctgctgtttctgcaattgttgcgaatgctgggcatgtgatagcaaaacatttggattttgcaggaggtaactatcaaggtgttaattctgtgagtaattcactaaatttcgttaggcacactttgcgtgtccatataaattctctttgcttgctgaaagaaactcttggggaccgcttcagccgtgcatttgaaatagctctggctgttgaaacttctggagctgttacagcagcttttgcttctccaaagatgcaccgcaatcagtttcaaccatctcctgaggcccatgatgcatatggaaatcatacaagtgatctcagcaactcagggaaaggttttgttgggagaactgctaaagtatctgctgctgtttctgctcttgtcgtgggggctgttgttcatggagctgttagtcttgagcggatggttgctgctttaaaaataaaagatggtttggatattctgcagctcctgagaggtttgaaatcaagttcgaatggtgtatcccgtcctactggaacttttaggattgaacattccacagatgttttggtacattggtttagggttctattggggaactgcagaactgtctatgatgggcttattgcagatattcttggagattcgtacattcttgcactctcaaggttgcagcagatgcttcctcttagtgtaatctttcctccggcctactcaatttttgccatggttctttggagacgatatatttttaaccgcgaagatccacagctttatcagtctctgtcaaacgcaataagcgatattaccagacatcaaccttttcgggagatttgcttccgcaatacacatcggctgtataatcttctggcttcagatgttggtgattcagagtttgcagcaatgcttgaaactcatagtcctgacaggaattcaaaaatactgccatttatacctctccgtgcccggctttttctggacgctcttattgattgcaacacaccaactattcagggagatggagcttcggagccttgtgaccccaaagataatgaattaaagctttcagagaggcttatgcaacttcttgatactcttcaacctgcaaagttccattggcaatgggttgagatgaggcttcttttagatgaacaagctcttatggaaaaagttgcagcaggcaagacagcacttgaatcacttcggtcgttatcccctaaagctgaggggtttaccctttctgatagtgaaaaagggtttactgaagtcattctgtcaaggctacttgctagacctgatgctgctcctctctattcagaagctgtccgccttcttggcaagcttcaggagtcccttgttatggatgtgaaatggattttacaagggcaagatgctattcttggccgcaggtcaacaagacagcagcttgttcatattgcccaacgaaaagggctttcaacaaaggcacaggtttggaaaccatggggttggtccagcttgcttagcgatgttattcctaataaaactgcaaaaaggaagttggaagtcacatcaattgaggaaggtgaagttgtggatgatactgttgatgctaaaaggcctagcaagactccccctcatagtgttgatagaagctttgaagcgattagatccataaataaatatttaactgagaaagcccttgctgaattagtattgccatgcatcgacagaagttctgctgatatccgtggtatactttctgttgatctgatcaaacagatggggactatcagtgaacatatcaaagcaatagcacggaatggtgctaaacaagctggttcagtcccttcaggtaatgaagtgccatcaagcaaatcaagtggtcgtaaaggaattcgaggtggaagcccaaacattggcagaagagctccggttggtaatgacccaagccctccgtcggcttctgctctgagggcagcattgtggttacgcctccaattcatcattaggttgcttccagtaatcatggcagataggagcatgagacaaacacttgcttctgcaatcctaggcctgcttgcaacgcgcatgatttatgaagatgcagatctgccccttccacctaccaatgcaactgctttaaggcgggaggtggattccctgctggagcctcccctggacgtcctgcttgatcggcctggtgaaagtctttttgagaggcttttatgtgttctccatgcacttcttggcagctacaaaccaagttggctgaagtcaaggtcagcctctaggtcgacaattagaatccaacgagatttttccgcatttgataacgaagcagccgagggtttacagtctgcgttggatcacatggaattgcctgaaacaatcaggcggaggatccaagcagccatgcctcttcttccaccatcccggcacccttctttgcaatgtcaacctccgcagttgtcgttggctgcattaacaccactccagagcagtacatctggtgtaggtccgcaacagaaaagttgttctgcgagctgggtgcccactaacgtctcaggcagaagcaaggcggcgttgccttcgcatgatcctgaaatggaggtagatccatggaatctgctcgaagatggcacaagctgcccctcaacagcatctggaagccatggcgcgagtggagtgacgggtgaccatgctaatctgaaagcgtgcagctggcttaagggtgctgtgagggtgaggaggacagaactgacctacattggctctttagacgatgacacctgacgtgtgtatgattattttggtgaattgtggaggaaattagtctcacctgttggcactggagtgaatggtggaaaccaaccatggcccttggctttaggatggttgttgttggtgtagaatacatacacatcgctgcccccgttttgttttgttttgttttgttttagggccttgtgggggcggctgtatataatggaaaaacatttgatccattactgaggcatggcccgagaagacaccttcaaatgggcttctgtgtaagcttgcttatttgagaagtaggaagccatgcagtagattttgtatccaaaagccgtgtacttgtttttgtctgatatgtaatctagcgcatgtcacacatatgtattcccttcctttgattgaagggctaatggtatgatgtcttttttttttgataaaacatgaggggtgagagcccctactggaaattaaataaaaaaatatgtacaaggagttacacgtttcttaattactcctgttctaaaatatagttttttctaaccctctttttttatgtccacattcaaataaatgag

SEQ ID NO: 10161 - DNA, 1811 bp, Zea Mays
tttcttcctcctttttcctcacctctcccccaccttgggctctgccggggacaccacaccacgtactctgactgtgaacctctgaaagaggataaggcgagagattcccctctggagttgcgattttttcctccccccttcactagttcacttgtctctccctttcgatgcgagggtaggggagtaatttttggtgtggagagcagagcagaggcacagatcactcctccgtttcggtccgcatccgcatgcatgctggtcttcttgttaccaaaaatgcggtcttgcacctgttgctggtcgtcctcctctcatttcgcgtctttttgggctgacgctgtcccttttcgaaccctcgagtccccaaacaaatctctcttccctcctcacgctgctcccaaactggactacttatctttttcatgatttcttttaatttataattaatggcgaggagagagagacacaatgtgtgtgcgcgcgcgtgattagagagaggcctatatttcatttccgacccgcggccactcgcacgcttctgcttccgttttccctctctcattcaaaaactcgccacctctctacctctaagtctctaaccgccgtgtgtccccttcccctctcgctcggccaggccaccagctgccaggtccggcggcaatgggcaaggcggcgcgctggttccgcagcttcctgggcaagaaggaccaggcaaccaccaaaggccagaggcggcagcaggaccaggctctgcctcctccggccagcgccaagcgctggagcttcggcaagtcgtcgcgggactcggcggaagcggcggcggcggcgacagccgccgccgcggtcgtctcgcccgacgcaggcaacgcggcgatcgcgcgcgccgcggaggccgcgtggctcaggtccgccgcgtgcgccgagacggaccgggaccgggagcagagcaagcacgccatcgccgtggccgccgccaccgccgccgcggcggacgcggcggtggccgcggctcaggcggccgtcgccgtcgtgcgcctcaccagcaagggacgcccgccgtctcccgtcgtcctcgccgccgtcaggatccagacggtgttccggggattcttggcgaagaaggcgttgcgcgcgctcaaggcgctcgtgaagctgcaggcgctggtgcgtggctacctcgtgcgcaggcaggcggccgccacgctgcagagcatgcaggctctcgtccgcgcgcaggcggccgtgcgcgagaggcgcgccgccctccaccaccagcccgtccggccgcgctactcgctgcaagagcggtacgcggacgacacgcggagcgagcacggggtggcggcgtacagcagccgccggctgtcggcgagcgtcgagtccccgtcgtacggctacgaccggagccccaagatcgtggaggtggaccccggccgccccaagtcgcggtcgtcctcgcgccgcgccagcgccccgctgctggacgcccgcagcagcggcagcggcggcggcgaggagtggtgcgccaacaaccccgcgtcctcgccgctgccgtgctacctgccctccgggccgcggcgcatcgccgtgccgacctcgcgccagttcccggactacgactggtgcgtgctggagaaggcacggccggccacggcgcagagcacgccgcggtacctgcaagcgcacgcgccggccaccccgaccaagtccgtcgcgggctactcgccgtcgctcaacgcctgcccgaactacatgtcgagcacgcaggcgtccgaggccaaggtgcggtctcagagcgcgcccaagcagcg

SEQ ID NO: 10162 - DNA, 1643 bp, Zea Mays
gccgtcgtctgttctcccatagctagagcctggttgggagggcaaaatgtacgagggagcggtgaaggaggacggcagagggaaaaccatctgggacaagttcgcgcacacgtttgggaaggttgcagacctgagtaacgccgatgtcgcggtcgatcagtaccaccggttcgaggaggatatacagctcatggcggacatggggatggacgcgtaccgcttttcgattgcctggtcgaggattctgcccaatggtaccggccaagtcaaccaggccggcgtcgaccactacaacaggtttatcgatgcactgctatcgaaagggattgagccatacgtgaccctgtaccactgggacctcccccaggccctggaagacaggtacaacggatggctggacaggcagatagtgtacgacttcgccgagtacgccgagacatgcttcgaggccttcggagaccgcgtgaggcactgggtcacgctcaacgagccgcacacggtcgccgtccagggctacgacgccgggctccaggcgccgggccgctgctccctgctgctccacctctactgcaggtcgggggactcggccaccgagccctacgtcgtcgcccacaacttcatcctggcacacgccaaggtctccgacgtgtacaggaaaaagtacaaggcggctcagaacggagagcttgggatagcgttcgacgtcatgtggttcgagccgatgaccaacactaccgccgacatcgaggctgccaagagagggcaggagttccagctcggatggttcgcggaccccttcttcttcggcgactacccggcgtcgatgaggtcgcgggtcggcgacaggctgcccaggttcacggcggccgaggccgcgctcgtcaagggggcgctcgacttcgtcggcataaaccactacaccacctactacaccaagcacaacagcaccgacctcgtgggccgactgctgcacaacaccctggcggacaccggaaccatcagcctcccgttcaggaacgggaaagccatcggtgacagggccaactcgatctggctgtacatcgtgcccagcgggatgaggagcctgatgaactacgtcaaggaaaggtacaacagcccgccgatttacgtcaccgaaaacgggatggacgacggcaacagccccttcacctccatcaaggacgccctcaaggacagcaagagggtcaagtaccacaacgactacctcaccaacctggctgcctctataaaggatgacgcctgcgacgtgcgtggctacttcgcctggtcgctgctggacaactgggagtggacggccggctactcctccaggttcgggctctacttcgtcgactacaaggacaaccttaagagataccccaagagctcggtgcagtggttcaagaacctgctggcctctagctgaagcctcgatggatatatatatactgcattgtcatttccttctttaatcttcatggcctgcccaagtggccatctgaaaccatgcatgcatgtacgctgtggcgtccccttctggatgccttctcctttcatctatatagccacgatacaatacaagttgcctggaagaaaactatcgaggcgaaataaagtcaaggcaatacttaaaatcgatgcac

SEQ ID NO: 10163 - DNA, 1225 bp, Zea Mays
gccctgctgctgtagaagtagaacttgatggggaatttggagtcgggtggtaaaggagagaaaaccccaaagaactctaccactattgctcttcagtcaccgttcccagaatacaatggccgtttcgagattggtcttggtcaatctatgtctggtgggagaatgctgttgccactaaatgcgacagctgatgcacccatctatgtgaatccgaagcagtacgaaggcatcctccgccgtcgccgtgctcgcgccaaggcggagagcgagaacaggctcgccaaaggcagaaagccctatctccacgagtcgcgccacctccacgcgatgcgtcgggtaagaggcaccggcgggcgcttcgtcaacacgaagaaagaagggcgtggcacgggcgttgcttcgaacgggggcagcaagacggctgcagcggcaccgtcgcgcctcgccatgccccctagcttccagagtagcgtcgccagcctgtctggctccgacgtgtcaaacatgtacagcggcggcttggagcagcaccttcgggcgccgcacttcttcaccccgctgccacccatcatggaggacggcgaccacggtggtccccccacccgcatctcctcctccttcaagtgggcagccagcgacggctgctgcgagctcctcaaggcgtgaaccgacgaggaggaggggatggctactcagacgaacggccttctcgccgatggctggtcgtctgtaggcaaatcattcttggctgttccgcattggggtgcaacctcatccacatcatctacctacccagtaggccagtaccccctgttccctgaacagtgcttgggttacaggggtcctcctgtgtgtgtgatgatgtggtgtgcctcccccacatgcatttgctgtaacataatagtgtacccaaaccactgcttcggactatcattgtctgtctcggtatggattctctgttgtcacagtgtctgaataattgaggcgtcagacttcaaagttgctccggttcttggagatgggtatgtttgaagcttgcttggaggtctgaaactttgtgcttggtcactcaagaatcaagatgctgagttattgcattctgaacctgtaatttggtgccagcattcagttgttgcagttgacgcatggcttgtattttaaggtagcatcatctgtgctctggtgacgaggtgttcgttctgattatctgagtttactatactgc

SEQ ID NO: 10164 - DNA, 2369 bp, Zea Mays
tggcgacctccatctttttactctttttttttcttaaactgggatgcaatggtaggggtaggggagagagagagagagatcagacgggagacgagagacttttcaaagcttagcttgcgccttgtagtctgtactctgtagctgtgcgtgcccacactaccatttgctccctctcctcgctacctatgtcctcgttcgctgcctggccgcgccagcgccacccctcctcctctagcagtcctctctctccgctcgtgtgctggtccatcgcctgcctcctcggtttgtcctgaatccttggaccgacgcacgcacacaagctcagctcagctcaggctgctgctgctggattctttggtgttccatcaggccaaggatcccgcaaagagctccggagccaagcctgctgcagccgtcgcgtcgggtgaggcaggcttcagcttcagtctcctactcgacgaggcaagcggatcggagcgggcctccgctccgccatgatgagcttcaagggccacgaggggtttggccaggtggccgccgccggtgccgggagccaggctgcctcccatggtggagcaggcccgctgccatggtgggcggggccccagctgctgttcggcgagccggcgcccccgtcaccggaggagacgcgccgggacgcccagttccaggtcgtgccgggggttcagggcacgccggatccagcgccgcccaagacagggacacctgaggtcctcaaattctctgtctttcaagggaatttggagtcgggtggtaaaggagagaaaaccccaaagaactctaccactattgctcttcagtcaccgttcccagaatacaatggccgtttcgagattggtcttggtcaatctatgctggccccttccaattatccttgtgctgaccagtgctatggcatgcttgcggcttatggaatgagatcgatggtatggtctgtttgttttcagaaaacagtgttctactttgttgcaccgtgtccttaagtatttgcgtgaacatagtactatttcctagcaagcttttgcaccaagatttttttcgcaccaaaatactcagatcacatgtattcttgctacaatcatgcatgtaaacacaaagatcacctgattaatatatatgctcgaactttaccttatactattattatatagcttcattgaataaaagagcaagtacaggttatgaagcatgatactgacagcatcgctgaaatttctaataaacgccagaactctaatggccttttgttttttcttccccacatgtaacgtagtctggtgggagaatgctgttgccactaaatgcgacagctgatgcacccatctatgtgaatccgaagcagtacgaaggcatcctccgccgtcgccgtgctcgcgccaaggcggagagcgagaacaggctcgccaaaggcagaaagccctatctccacgagtcgcgccacctccacgcgatgcgtcgggtaagaggcaccggcgggcgcttcgtcaacacgaagaaagaagggcgtggcacgggcgttgcttcgaacgggggcagcaagacggctgcagcggcaccgtcgcgcctcgccatgccccctagcttccagagtagcgtcgccagcctgtctggctccgacgtgtcaaacatgtacagcggcggcttggagcagcaccttcgggcgccgcacttcttcaccccgctgccacccatcatggaggacggcgaccacggtggtccccccacccgcatctcctcctccttcaagtgggcagccagcgacggctgctgcgagctcctcaaggcgtgaaccgacgaggaggaggggatggctactcagacgaacggccttctcgccgatggctggtcgtctgtaggcaaatcattcttggctgttccgcattggggtgcaacctcatccacatcatctacctacccagtaggccagtaccccctgttccctgaacagtgcttgggttacaggggtcctcctgtgtgtgtgatgatgtggtgtgcctcccccacatgcatttgctgtaacataatagtgtacccaaaccactgcttcggactatcattgtctgtctcggtatggattctctgttgtcacagtgtctgaataattgaggcgtcagacttcaaagttgctccggttcttggagatgggtatgtttgaagcttgcttggaggtctgaaactttgtgcttggtcactcaagaatcaagatgctgagttattgcattctgaacctgtaatttggtgccagcattcagttgttgcagttgacgcatggcttgtattttaaggtagcatcatctgtgctctggtgacgaggtgttcgttctgattatctgagtttactatactgc

SEQ ID NO: 10165 - DNA, 1600 bp, Zea Mays
atgatttgattacgacgcgcggtcggccgcgcgccggccgggaatctcgtagtccgccctcgatcgcgccctcgacgcaagccatcctcctctcctcgctcccctcccaactactcaagtttgacggcagctggcaaaccattctcttccttccttccttccgtgtccgtccgtcgtctccctcttgggctagctcttgcctcttgccatataaagatcggttagtccaagcttgccagcaagttgagtacagaactgcgggtcgtcgaccggtcggccggccgtggttgcattgcagttgcattgcagctgccacttgcattgaggatgtggtgttgcagcggcgcggacgacgagccccacgccgccccgctggccgccaacccggccgcgacgccgccgcgagcaccagcccaggcgagggggccgagcatgccgaggaccggaggcgccgccgcgtccgctgccaaggtgctgcccatcgacgtgccggccgtcgcgctgtcggagctcaaccgcctcacgggcaacttcggggacagggcgctggtcggggaaggctcgtacggccgcgtctaccgcgccacgctcgccaccggggaggtcgcggcggtcaagatgttcgacaacggcagctcctccggccagtccgaggccgaattctgcgagcagctgtccgtggtgtcgcggctcaagtgcgagcacttcacccagctgctgggctactgcctagagctcaacaacaggatcgtgctctaccagttcgccaccataggctccctctacgatatactccacgggaagaagggggtgaagggcgcggcgcccgggcccgtgctgacgtggatccagcgcgcgcggatcgcctacggggcggcgaggggcctggagcacctgcacgagaaggcgcggccgtcgatcgtgcaccgcgacgtgcgctccagcaacgtgctggtgttcggcggccacgacgccaagatcggcgacttcaacctcaccaaccagtcccccgactccgccacgcgcctgcactccaccaaggtgctcggcacgttcggctaccacgcgcccgagtaagcgtccacgcgcacgccacgtactagttccgactccgatccgcgctcaaccttcggcgtcgtgctgcttgagctcttgacggggaggaagcccgtggaccacaccatgccaaagggacagcagagcctggtcacctgggccactccgaggctgagcgaggacaaagtgaagcagtgcgtggaccccaagctcaaggacgactacccgcccaaggccgtggccaagctcgcggcggtggcggcgctgtgcgtccagtacgaggccgatttcaggcccaacatgaccatcgtcgtcaaggctctgcagcccctcgtgaacgctcggccaggaggagagtagctagatgtcgtaaaaggctcgccctgagcagagctgtgactgtgatggaccaagtttctggacgtcgtagtagttcatgtcatgtccacggcatttctgccagaatgttgccagcaacggcctgcttggcctgttcaatcacgagagcattaaccgcgcgtgccattgcgtgtgaaaagtgtgg

SEQ ID NO: 10166 - DNA, 2598 bp, Zea Mays
ggatttccttccgccttccgacagcggctgtctcggcgacccaaccccagcctgaccccacctcccgccgccgccgccgccgccgccgccgcgccttcgtcgtcaggagcagggtcccggtggctgcgtctctctcccctgcccccctgctccacactcggttcacgcgtcggctcgctaccgcaggccctcgactcgtacgcccgtccccggcggcgatccggccggcaccgtaaccctaggactccgacggagcaggaatgatgagtcatgaacagcaaattgtccctcctagtaagggttctgtgaatggattcccccatagaaaactggataaggagggcagtggaacgcaaagtagaataaatttggtgaggtcatcctctggtggttttactaattcaggcgtcgtcttaaaaatggctcaggtcataaaggatggttctgccagaggacaaagatatcctgctgttcttgtaaagaaacctgagactatgataataccggcaagggagcttgtacaagtttttgccaaggacatagaacttggcggcgagctgccaaaagttcctggcaatgacaaaaggaaggacttgctgattgattctgctattacccgctatcattatctcgaagagagggaacttgagcgctgggcaccagatggaggagattcagagtgtattgaactggagaagtatgaccggaagggaaataggagctgggaccagtttgaaaccaatgcagcattatttggggtaaagagtactttcaatgaagaaatttataccacaaagcttgagagaggtcctcacatgagagagcttgaaaagcatgcttcgagaatagctagagaaatagagggagaagataccagagatattcaccttgcagaggagagaggcttattcctgggtgatgacctggaccatgatgaagagataaaatattcagcagtgcgtagagacaccgataacagcaagtacaagccaccatttactaaggtcccaagcagtacatgccatgttgattcgtttaacaggacagtcaatattgatccgaatgattcactggcatgttcatcaacaatggacaaagaatcatcatcccacatatttgatgacactgatgcatctgccactatccatacaaatagcgttagccagccaacatctgattatctgtcagatagacccttgtccaatgatgaaaacaggttggacagaaagctgaacaaagagagtaatgaaaacatggataacagaaagttgcaacatgaggataatttacctgatggtgccagacctcttatttcggaagcgttggatgggcgatcctcaagttcacatgcatatgaaccgtctttttctggtcaaggattcaaatctccagaaacacccgattcgacagtgcctgtcaagcatccttctgcgatggaacctgtgacttcctctcaaagacctggcagctcaacatcgtcaacatcagagcgcattggtgcaaactcagccgcgggtgctcctggcttgtcaccaagctcttcaataggatctcttaccgctgaaaaatcgactttgaaccctaatgctaaggaattcaagctaaatcctaatgccaagagtttcactccgtcagcatctctgaggccaccacaccctacatcatctgatgcatcatattactatcctaataacatgccggcgatgccacttggacccggtttgcctgtgggcatggggttcccaccggcatatggcgcccagcctgtcatgtacaatactcaacctggagcatcaccgcacggttacatgcatcctgctggtccacagtatgggcaacaaatgacgattggggggcagactcgtccagtttattattatgcgcctgagatgcaacaatacagaggaagaaacttttagatataccattctgaactgctcttagatggaagtcgctgcaatccccacaagtgggattttgaccagcaaaaaccgctattacaatggaaaaaactggtcctgttgtgttgctcggattggttggacaaaaaagcgcaccgactttgtgttgctcggattgcctggtcaaaatgctcttcattgtcctgtatcagtgttgctcggaagcaggttcactggaatttcatattatttttgtcagactattgatgttgtaaattgaattgcgggtcatctgttcgacccggaaatgacattcataaatgtgtgaggttgccccatgtaacatttatgtgttccttaacgttgttctgatgtaagatttggacgaaatggatcaaattgctgacctatctgctcgtttatacccagctggagtagcaagcatggaggggacgtagagtcttactagcgtttgggatggagacctaaaaattgttagggcttacgtttataatttgcgaaccagggtggttataagattgttgccattatcgtgtagtcactggattgaaaggtgttggtgggcattgacatctgatgtggttcatgtgttggtaatggacggcggtattatagggaagtaggtagtgtttggtttaccatgggtaatggtatcgcaatggaagttaaaaagcgg

SEQ ID NO: 10167 - DNA, 2513 bp, Zea Mays
atttattctacctctttccaatgtcccattttccttgtgaatcactagtgtcgcaaatcccaatctcccagcttgcgcctaaaccctagcttgcctatcgatggcgccgaagaagcgcaaggccgatcccgccgagtcccccgccgccgtggaggcagccaccaccaaccaccgccacgagccggcgtcctcggagcccaagccacgcggctccatctacttccccatcactgacgacccgcccgaacccaacgccgccgaagaggacgaggacgagggcgccggcgacgacgaggacgacgcggaggacattgtcaagctacttgagccgctgtcgcgggagcagctcgttgcgctgctccgcacggcggcggaggcgagccccgccacgatggcggccgtccgccgcgccgttgaggccgaccctgccagcaggaagctcttcgtccacggtctcggatggggtgccggcgccgaggacctccgctccgccttctcacgcttcggcgagctcgaggactgccgcgtcatctctgacaagcaatctggtagatccaagggctacgggttcgtcctcttccgctcccgccgctctgcgctccgcgccctcaaccgccctcagctccaaatcggtggtcgtcttgctttctgtcacctcgccgcctcaggccccgcacccccagctcagtctcagaaccctatctccaacgccaaccccaatgctaactctaactccacgagcaacgcttctggatcctcatcatcacaaactgacaatatacaacgcaagatatttgttggtaatgtgcatgctgatgtggacgtggaccgcctatatgagtattttgcacaatttggtgagattgaagagggcccgttgggctttgacaagaacactggcagaccaaagggatttgcattatttgtttacaagtctgtggagagtgctcgccgtgctttggaggagccaataaagaattttgatggaaagacactcaatgtgcagaaagccatagatgggaggaccaagggctcatctggaatgaatacaaatactaactccaatcccactactgcatctgtggtcgccgcccagatgactgctccttccagtgttgccatcagcccatatgatgcatcagcatatagtgctactgtggttcctgacatgagttttgcacagcaagctgctatgctgggattaggtgcacagcaacaggcattcactcaacccaatgcaatgcttgccatgatagcagcaatgcagaacccagctgcgctagggatgagtccagccatgcttgctgctatgaacccagccttcgccgctgctgcattgggtgcaggggggcagcaggcacacacagttggtcttacaggttttggagctcagggttttgggacaccgtcgtttggagcaggtgccgctttcccaaatgcagcaggtgttcaagcagcagcagctgcatatcaaggaagtggagctcctcctggctttcaagggccacctgggtttcaggttggccaggcaactacccagacaagcactgcagcggcagcggctgccgcagctgccactgctgctggttatcaggctggggcatctgggcagggccaggtgcctggttctcaggtcggaggcactggttttcagggtggatattgacagaactagggtcctatctgtggtgtgccagacttcaagatgaggggaaagaagagtgatgagctcgaacctgtcgatgctggcgatgaagatgatgatggtggtgacgatggggacgaggatggtgactttggggaggagggtgaagaggacgtctcagaaggggagggatatgacaacccaaagggcaatgagaccaagaagcaaagaggtgatcctgaggaaaatggtgaggaagatgaggaagaaccagaagatcaggagggtggcggcgacgacgatgatgacgacgatgacgatgatgagaacggggatgacgaggacgacgacaatggggatgacgatgaggagggtgtagatgaagaagacgatgaccaggacgaggatgaggaggaagatgatgatgaagactcgctccagcccccaaagaagaggaagaagtgaagatcttctgccgctttagttaccgtgcgctgagttctgcctggcttttcgtcatatcctcgcatttcaactttcccatagagagttaagaaggatccacacgttcagcagcacgtgtgggcttgtaggagctttatgatttgaggcaattagggacaactcttatgtcattgttgcttgcttctgtggagtcgaacagatgtttcgctaacataattcgacttgagtgatgaaagcctccagattgaatatgccttctcttttatctcgtatggaatcattgatgcagccctggttgatagcgttccttcaataaatgaattatattggcatcatgacagcttcatgtgaattgcacgtttatactgtgcgttcaaatctcaactaatgtatgactgatcgg

SEQ ID NO: 10168 - DNA, 1283 bp, Zea Mays
ctcgggcctcccgacccctccgtcgaagccgcagccatggcgaccaccaccaccaccactccacttatcgtctccttctcgcgcagctgcagctgcccctatccacaccgccacttccccggcaagcccaagctgcccgcacccacctcctgctccctctccctccgcctcctcgctgccccccttgccgtcctgccgcggcgcccgcgtgacgtgtcggcggcgtacggcgacggcgacatggacgacgacttcggcgacttcgaccccgacgacgcggacggcgtcggcgaggacgacgacgtcgacaacgagcaggactacgacgtcgactacgaccgcctcctagctcccgtcgtcaagccgccgtcgccgccgggcgcgtcggcgtcgcccggggaggagggcgacatcgccatggtcgccgccgacagcttcgtctccacgcgggattcagcgtccgacaccgtcgtcgactacgccgtggatgaggacgagtttcacaagattaggctgctccactgcgacttccttatccgcaaggtgcccgaccccgacgacgacgtcttcgacttcagagagatgtatgtcacgccaccggacaccgacatctactccattccgagggttcttgccccgatgccgcagaagtacgcgaggtgcacgaagaaaaactttggccgttaccacgtgagcgagccaccagttgagcatttgcgcgatccactgtacaagacagagagggagatcatgaaggttttcttgaccaagcactacagaaacaggcgcgctgatgacccagatttttttcttgattttgaggagatctatgttattgactcgagaacaaggtcaatcacaagagctaaagttatggttagtgttcctgaaggaaagaaaagagaccggcggaacgacctgctactgatccgtgacggggactaaaagggacgacgcaagcactatcatacaaagagaggagtgggccaagtcgagacaagacgtggagaagcatttcaggaagctcagagactttgactactcgaattggttctaggaaaggttttcaccgcatctactgttgattatcctggagctagcagctggtttgatccactgagagatgaccatttcgaaattagataggttcggtgtaacgtagaacatatgccatctagggagcatggtaagctcaaaagtcaaaatattgtgattctgctgaatgtactactctttttttaaaaaaaaaatccttcacgaaatgagtttgttgaatatgttgc

SEQ ID NO: 10169 - DNA, 1428 bp, Zea Mays
ctcgggcctcccgacccctccgtcgaagccgcagccatggcgaccaccaccaccaccactccacttatcgtctccttctcgcgcagctgcagctgcccctatccacaccgccacttccccggcaagcccaagctgcccgcacccacctcctgctccctctccctccgcctcctcgctgccccccttgccgtcctgccgcggcgcccgcgtgacgtgtcggcggcgtacggcgacggcgacatggacgacgacttcggcgacttcgaccccgacgacgcggacggcgtcggcgaggacgacgacgtcgacaacgagcaggactacgacgtcgactacgaccgcctcctagctcccgtcgtcaagccgccgtcgccgccgggcgcgtcggcgtcgcccggggaggagggcgacatcgccatggtcgccgccgacagcttcgtctccacgcgggattcagcgtccgacaccgtcgtcgactacgccgtggatgaggacgagtttcacaagattaggctgctccactgcgacttccttatccgcaaggtgcccgaccccgacgacgacgtcttcgacttcagagagtgcgacatttcatcgaacacgtgctggcgatgctacccagattaacaacatcacatgtacatgtcttctgactcaattgtgtggcgctcatcttgctgagcacggcatttctgcgcaacagatgtatgtcacgccaccggacaccgacatctactccattccgagggttcttgccccgatgccgcagaagtacgcgaggtgcacgaagaaaaactttggccgttaccacgtgagcgagccaccagttgagcatttgcgcgatccactgtacaagacagagagggagatcatgaaggttttcttgaccaagcactacagaaacaggcgcgctgatgacccagatttttttcttgattttgaggagatctatgttattgactcgagaacaaggtcaatcacaagagctaaagttatggttagtgttcctgaaggaaagaaaagagaccggcggaacgacctgctactgatccgtgacgggggtgagtctttcagaatcatcgacaagtaaaagggacgacgcaagcactatcatacaaagagaggagtgggccaagtcgagacaagacgtggagaagcatttcaggaagctcagagactttgactactcgaattggttctaggaaaggttttcaccgcatctactgttgattatcctggagctagcagctggtttgatccactgagagatgaccatttcgaaattagataggttcggtgtaacgtagaacatatgccatctagggagcatggtaagctcaaaagtcaaaatattgtgattctgctgaatgtactactctttttttaaaaaaaaaatccttcacgaaatgagtttgttgaatatgttgc

SEQ ID NO: 10170 - DNA, 4206 bp, Zea Mays
cgctctagcctctggcaacggcgggtggcggcattgcggcaatggccgcgctgcggttatcaagagcaccggccacggccggcctggccgccgcgggcgttccgcaccgcctcgcgaccccagagcatccgctgccggtgcgggttctacccaacagggcccacctcaacgcgctgctcacgtcctacggccgccgcggccgcatccaggacgcccagcagctgttcgaccggatgccccgccgcgacgtcatctcctggacggccctcctcaccgcctacgccgaaggcggcgacttcgcctccgcgcgcctcgtcttcgacgacatgccccgccgcaacgccgtctcctggaacgcgctgctctccctctacctcggcgcggggcggcccgcggctgcgcacgcgctgttctgcaagacgcccgccaagaacgccgtgtcctacggcgtcatcataacgggcctcgccagggcgggcatgctgcgggaggctcaggcggtttatggggagatgccaccgcggttgagggaccccgtggggtccaacgcgatgattttagggtacctcagggccggggagattgacatggcgctgagggtgttcgatacaatggctgcaagggacgtcatttcttggagttctatggttgatgggctatgtaagtatgggactgtgtccgaggccaggaggctgtttgaggcaatgccggagcggaacgtggtgtcctggacctcgatggtccgaggatatgtgaaatgcgggatgtacagagaaggtctcttgctgttcctggacatgagaagggaaggtgttcaggttaatgcgattacactctctgttgtactagatggttgtgctcaggccagtcttgtcggcgaagggatccaggttcactgcttgatgacgagaatgggctttgtaactgatatatttttggatggttcactgataataatgtattctagatttggctggatggttgatgctagaagggtttttgctttcatgaagcagaaagacatagtatcttggaactcattgatcactggttatgttcagaataacatgattgaagatgctcatgtgctgttcaagttgatgccagagagggatgctatttcttggacgtcagtggtggttgggtttgctaatagaggttggatgagagagtctgttgaactctttgagcaaatgcctgtaaaagacgatattgcctggactgcagttatttctagctttattgcaaatggaaaccatgtgagtgtggtgcgttggttttgtcagatgtcacaggaaggatgcagacctaataccgctgcttttagttgtttgctgagtgctttggctagcctggctatgctgaatcagggattgcaagctcatgcttatgcagtcaacatgggatggatatttgactcagctgtccatgcttctttggtgacaatgtatgcaaaatgtggtaggttggctgaggctcatcgtgttttctcatgcattagaaatccaagccttgttgccattaattctatgatttcagcatttgcacaacatggcttggctgaagatgcactcaaactttttaacagaatgcaatatgatggccaaaggcctaatcatgtgacattcttgggaatactgactgcatgtgctcgagctggtttggttcaacaaggctataactactttgaatctatgagatcagtctatggcattcaaccaaaccctgaccactacacatgtatggttaatcttttaggccatgcaggcttccttgatgaagcattggaaatgattaattcgatgccccagaaagattatcctgatgcatgggcagctttgcttagctctagtagcctccattctaatcttgatttagcaaaactagcagcacagaggcttcttgagatagatccttatgacacaacagcttacagggtcctgacaaacatgttctcctcagcagggttgaagggagatgaagagatggtaaaagttgcacaattgtccaacatggctagtaagaggcctgggtatagcctcatcatacaggataagactacagaaaataactagcccaaaatgagcacttccatttacagataactggcatgtcataactcataagacagggatattgggttcacagaaaacaattctagcgccaagatgagatatcaatttgttgatgtatgctagtgcagagtcagttttagtacttaagaactgagaatgaggaatatctgataagagactggagagttgatgacacttctgcaaataattcatctgctactgttgttgaacaacaagaaaatcattggttgctgcatgctttcaagaatattttgctgcgtgatctatctattctcctcatcaattgatagagaagagtcgctgagagagtgtactggagaaggctgaacagcatgaggctaagacttccaccgggacctccaacatggccaattttcggcaatcttctccagttgagccctcttccccacaaagactttgcccaattttgcaccaaatatggccctctcgtctatcttcgcctgggaaccatcgatgccatcaccactgatgaccccgaagtgatccgtgaaatactcatccggcaagatgaggtctttgcttcgcggcctcggacactggctgccgtccatctcgcctatgggtgtggtgatgtggctctagctccactgggacccaactggaaaaggatgaggagagtttgcatggagcacttgctgacgaccaggcggctcgagtctttcgctgctcaccgagctcaggaggccgagcacctctgccagtttgtgtgggctaaatctcagtccgggaagcccgtgaacctcagagaggttctcggtgccttctcgatgaacaacgtcacgcggatgctgctggggaagcagtactttgggatccagtcggcaggccccggcgaggcaatggagttcatgcacatcacccacgagctgttcttcctgctgggcctgatctatctcggggactacttgccggcttggaggtgggtcgacccgtacgggtgtgagaagaggatgagggaggtggagaagaaggtggacgacttccaccagaagatcattgatgagcacaggagagctagggaggccaggaagagtcgttcctccgttgaggaagatggcggcaacggcaaagatgagatggacttcgtcgatgtgctgttatctttgcctggtgagaacgggaaggagcacatggacgacatggagatcaaagcgttgatgcaggacatgatcgctgctgctactgatacttcatcggtgacgaacgagtgggtgatggcggaggtaatcaagaacccgcgcgtgctccggcgcgtccaggaggagctggacgcggtggtggggcgcgaccggatggtggcggagtcggacctggcccacctcccctacctccggtgcgtggtgcgcgagtcattccggatgcacccggcggggccgttccttatcccgcacgagtcgctgaaggcgacgaccatcatggggtaccacgtgccggcgcgcacgcgcgtgttcatcaacacgcacgcgctggggcggaacccgcgcgtgtgggactccgtgggcgagttccggccggagcggcacctgccggcggaggagggggcgcgggtggagatcagccacctgccggacttcaagatcctgccgttcagcgccgggaagcgcaagtgccccggcgcgccgctgggcgtggcgctggtgctcatggcgctcgccaggctcttccactgcttcgactggtccccgcccgacggcctccgccccgaggacgtggacacccgggaggtgtacggcatgaccatgcccaaggccacgcccctcgtcgccgtcgccactccgcgcctgccgccgcacttgtacggcggcggcggcggcagctcggctccttagttcgatgacactttgacgcacgtgcgctgcactgccagtctcattagtcattatacgcatgatgtacttccctccatatacaatacaccgcataaaccaaacgatgaatgaaatgtagtcgttctatggtttcaatatgagaagatataattgatggttaacatcatttccctccgtttagtgataagccatatactctaggtatgtagtagtgtaacaatgcgatcccagcccaggtaacgaggtagcagagaggtgag

SEQ ID NO: 10171 - DNA, 2530 bp, Zea Mays
aattctccttgtctctctcactctctctgtctgtgggaggaagttgagaaggcgaggagccagacaagcgacgcggctccactcccttctcaggcggccccctgctgctcaccgcccagctccaggtacgcgcgagttattagagaaataagggtcggcttggttgcccgaggcctacccagcgcctgcgatggaggagaaggctatggcaaatggagcagcgactgctgatgttgctgctcctgataataaggataacaccaaggaagaggctagcgagagcaaggaaccagcagccaatcaggatgccgatgaccagaacaaaggcttggaaaatggcgccgagggccagtcaggtggagatgtcaatatggcagatgctgaggtcacagaggaaggcgatggtgatcctggtgttgcaaagcaggtggattctgaagatatcaaaacggatgccgatacaaaggaagatggcaatgcaaaggcagaagaagttgaggatgtcaagatgactgaggctgacacgggaagtacagaggtcaaagataaagaagagaagggagatgaagttgtggacacaactgtggataagcaggatgaatcgaaggagcaagaggaaggtgtttcggctgagcaagatgagaagcaaggagaggaagcagaagaaaaaggaaaagaaatggatgccgatgagaagcaagaagaggaagcagaagaaaaaggttctgctgatgagaaagatgaagatgaaggtgaccagaagatggaagagaataaggaggagactccgaagaataagaaagcaaggagtgccagggatagaagccagggaaatgataataaacatgatggatcaaaatctagggaagccaaaagtttgctgaacaccccaagcccatatggtaccgatcgtcctcaacgtgagaggaaaatagtggagaggttggttgaggtgattgagaaagagccaaacaggaatttcgtggttgagaagggacgagggactcctctgaaggatataccaagtgtggcacacagaatatcaaggaagaaaccttctgatcttaaatttcttcacagtattctttttgggaggaaaggcaaggctgtcgattttaaaggacatatactccagttctctggatttgtttggcatgaaagtgatgaaaagcacagagtcaaggcaaaagaaaagcttgacaagtgtgtaaaagaaacgctgttggacctttgttggacccttggcattccaactccaaaagcaaacattagaaaggaagatattgtgtcaaagctgttggactttattgctgaacctcactctgcagctgattctgggctctctgatgaccagaaatttatcaatgacagcacttctagtaaaaggcagaaaaaagcgctcgagtatgatactgatgaggatgaatccatgaagtcagacagtgaggaaaacagagatgaagattcagatgaagctggtgacaaacaggaaggtgactatgtatctgggaaagaaaaggcagggaagttctcagaggtaaaagaatcttcaggcaaaaagaaggcaaacacagggagtggccaccaatcaggtcctccaaagaaaattatcagaagtccggtaaaaaaagtatcatccaagattcatgaggaaaaagaaagccccaataatagtgcaaaggttttttctaggaagaagaaacccacagcagaaaaggagatcaaagaaaaaaagtcatcaggcaaaaaggtgacaaagggtaaaggagaatccgttgaagcagttcttcccagcaaggatgatctgaggaagaccattactgaaatcctcaagaaagttgacttcaacacggcaactttcagtgacatccttaagaagcttgacaatcactataaaatggatctggccccaaagaaagaagccatcaaagttatgatccaagacgagttaaccaagttatcagaggaggacgaaggagagggagccggagacaccgagaagaaacagcagcagcctcaggcgaaggagatcgaggcatgaggattcgtggaaccccatagctgtagtagccgctgttaattatcctgtacttaatgtgtttgtttgcgtcgcctgtacaggcatctcgttgattatcgccgcaccaactcgagaacctcacccctgatcgtgtatgttatggggcatgatgtgtaggcagcctccacacctttttagctgactgatcggagagttactcctaggcaactcttgtttctagatttgcaaatggtgtctgaaactctgcgtttgctgcggcagaacgtgtacttaattgttcgtgataggtctgaataacacatggatggtatcagtctgtagcttattttttttacttgatccgtttcttctgtgggttgtgatttgtgaatgaccaaaagatggatgctgtattccagtttctgttctctcagagtaggcatgcaagaataacagctgaaccaaaccgagaaacagaacagtggctatctcctatctttagtagcttcc

SEQ ID NO: 10172 - DNA, 1315 bp, Zea Mays
atcccgacgatccgcaacccgcccgctccctagcaatggcgtccgccgcgcacgcgccgacgccggtgctcaaggacgagctggacatcgtcatcccgacgatccgcaacctcgacttcctggagatgtggcggtccttcttccatccctaccacctcatcatcgtgcaggacggcgaccccagcaagaccatccgtgtccccgaaggcttcgactacgagctctacaaccgcaacgacatcaaccgcatcctggggcccaaggcgtactgcatctccttcaaggactccgcctgccgctgcttcggctacatggtctccaagaagaagtacatctacaccatcgatgacgactgcttcgttgccaaggatccatcagggaacgacatcaatgcacttgagcagcacatcaagaacctcccgagcccttctactccatttttcttcaatactttgtatgacccttaccgcgtaggcaccgattttgttcgtgggtaccccttcagccttcgtgaggatgttccaactgctgtttctcacgggctttggctcaacattccagactatgatgcccctacccagctcgttaagccccttgagagaaacaccaggtatgtggatgctatccttacaatcccaaagggcgccctcttccctatgtgtggaatgaaccttgcattcgaccgtgagctcattggtcctgcaatgtacttcggtcttatgggtgatggccagcctatcggtcgctacgatgatatgtgggcaggatggtgcacgaaggtgaccacggatcatctgggcttgggtgtgaagactggcctgccctaagtctggcacagcaaagcgagcaacccgtttgtgaacctgaagaaggaatacaacggcatcttctggcaagaagagctgatcccgttcttccagtcagtctcccttccgaaggatgccaccaccgtccaaaagtgctacctcgagttggccaagcaggtgagggcgaggctcggcaaggtggatggctacttcaataagcttgccgattccatggtcacgtggatcgaggcctgggacgagctgaaccccgcaaaaggtggagtccgagtccccacagcaaatggccctcacaagaagtaataaaaacacgatgtagtataaacttcacttgttcatgtggacagtcatactgaaaagaaatgatgtctttggttagtgctgatggactgagatttacacgtcccgggaaatcgtcctgccggttttagggcgtttacatgttttattgatcgtttttcgtgtgatggatgcaacaggtgtaatgtcgg

SEQ ID NO: 10173 - DNA, 2672 bp, Zea Mays
ctggcgaaggcaacaggggccgaagtgtcaacgtgtggctgcaatccacctccgcattcactccacgcgcacgccgctatacgcgacgctgccgagcgcatcgccgccggtccctccctcacttcctgtgcctgttctcagcccgccgcttctcagtccacttctgccgcagcccctcttctctcggtctagagatccgtccgggcgcggcagcctcgctttcgtttcggcacggagaacaatcactttagaagacttgtactccttggcgtgtcatactctttgtaacaatcttaccattcttgagaagaggtacatctgtccgtcagcaatgtccatagaagagaggaagataagtgtgataagcaagagcattgcgctaaatccaaatgcagaggaatttgttccttcatcccttagatctgtcaatgattcctccaagagatcatatgcaactacggttgtctcagggatatctaaagaatccagcactgacaagccagagtcaattttacgaagtaactctgatgaagaagcacatcagtactggcagcaacagctccctgacgacattacccctgatttcaaagtcatgggacaagatgaaagtcctggacctgacagtctatcactcacagacctgtccataaatgatggcattggcacatcaatattttctccgaaccagacactgagcatgcagcaccgtgcttcgccttttatcagggacaaactaaatacacacccaaagattaacttgtctatcccaacttatatggatgaacggtcccaagccacaattttgagtccaactgcaggttccatgagtccaaatgctgctccatgggtgaagactctaaggaatgggggacattataacacaagcataagggatgccagtcagtacaatggagattctagcattggagcttcattgcacaaccttactgatgcatatcatggaagcaggcgcagcttaagctcgactatggatatcatgaatcagctggaggatcgatcgtacatacactcgtattgctggatctatgttcaggcatagtgtactagtagctcaaatataggaaaatgcttatcctctagaaggcgctgaactaccccccctcctccttgtgtccaggtcaatctattcgctgtgactccgtgtactccggttttattctacttttgaacaagaacgagcgataatgaaacgattaattattcctttgatcttccttctactaacaaaattacatgtgccgtgtttgcacacgattttattctagttcgagcatgcttcacagaaatggctattgtacttgtttactgcatggatcttctacatacatttatgcctaataacagagtaaagtcgatggacgacgcagtcagaacctcaggtcactatcatttggaaattcaagtcctacatcaccagcatcatatgcccaaaatggtcttggaaactatgctggacgtgaacacgtatccctcgatgttcctagaggaaggtacaagacgactagtttgcctgttcctggtcttggttcaagcagaggttatcagttgttgggtggctcatataatggaaaccatgatatgatctcaaccaataccccacaaaacatggctggaattcagacaggaccagcttggcttgaaagtgacgctgaggcaagcacatatttggaatcaaaggatgaagttcatgattttgcaagcctgcgacatgcagttcttgaacaggagctatacagtatacaaagcctgttggctcaggagaaggctagagaaacaacatatcgacaaagattacaaacaccacaattgcaaggcctcatccaggagcaaaatcccccaatcgatctctgtggtcttcacatcagcgaggcaatacacgtcctgaactacgagctcaacaaccgaagaaagatcgtgagatcaaccggtcgccgactccaggtgcaaccaggcctgctccgcatcctgctctagtaatggaactggtcgtcctagctgttgttcacaactggatcagatgaaaaagaagggaaaaagaaaagaaaagaaaagataagttgacctgtacttttgtatatggcagagattgctagcaggatagtagcgttaagaacttaagatagctcatgtaacattcatgtcaggctttttgtcagcaaatgtatacgtcttaaaatttgggagttagggaatattctcgttgtctttggtgccggtggatgcacacggcatagcgtcttcacagaatcacaatcatattctcgatcacaatcttcggtgctggtggatgcttaagttctgttcctgctggtgaattcaaattgtgagtaatgcctggtcgatgcattagttcttcacaatagtcgattcaaattgtgcgttgttagattattgttttgtattttgtctaagtgtaatgggcattggttagtctatatctctttactgatatatacaacattcagtctctataggatagggttttcaacattgtatccagtctagttctctcttccttagccgttgccaccacctggccgttgtcatcacagctcctggatggtgtgtctcttataaatatgttctagagataataacatagatgagcatattttttgtatccatgatatattgcttaattgaatatccat

SEQ ID NO: 10174 - DNA, 3988 bp, Zea Mays
aaaaacccaatctatttgtttccgccgccgtgtctgtctcggcccaggcaagccaccgcatgcaccgccgtcgctcacaccgttccagcgcctcgtaccctcactgacgtagtgcgcgctgctccgccaacgcccccagcgacccaaacagactccgacccgcgccgtccgttccgtgtccggcctcgccgccgattctctcggagctcctgccctgccgtgcgggagcacttcttcgaacagatggaggctcgccgcgcgaggccgagcaaccagacgcactccagctgttggacgaatccctcctcctccacgccaggccctgcgtcgcctgaattcctcactacggtccgcggagcagcattttgcggccgtggcttcgcctccgccacagcaaggttgtcgtcatactcctttttatgtgtgaagaaggagaggaggtgcttatcgtagtcagtgacagtggtggatccagcagctcttgtggaaagcggcggaggggagttgacagtaacaacagcaacaaccgcggaagggggtgtgatgcttgcttgcagatgttgctgttatcgccttgggggtgattattctgtcctgtgctctaatgatgctcggaatgatgatggaactccccgtcagtgcgcctggttaatcacaagtaaattcatctcttttaatttgttctctctcttctccgattccctttgcacttttcttttctgcggagagagacgaggaggaatctgaatgtgtgggcgagtgttgaaagaggacgaaaataaatatctgacgagcagaggaatgctcgtatatatatgatgcttgtagaaaaagatcccggtgcagcaactcgctttcggccccgatcgtcttttcccctgctgccaaggtccaaccaaacacgatcggaggatagggctcccctcccggcttttctatccctccctctcctctgctcctgtgctatcctccgttcatcactcccccaggatcccctgcagctaccattgctacaacacgggtacagtacaggtgaggagggagaaaacaaacgaacgaaataaagagagtacgcatgggtttgcagatgatccatggcaggccctgcgccttgtgctgcccgtcctcctcctcctcgtcctccgccttgtggatgaggatgcaggcccagctgcccccaaagcagtctcaccatccatgtcagtgctctctctctctctctctctctctctctctgctcgtcaacgctagttccacgtgcattttcctgtcgtcctgtgtgctgcatggaattctctattggttgatggcgtacaagattactattgccgcggactgacggcacggcaggtaggctaggcagcagcaacacagacacacaccaaggatgacatgctcttgccatttcttcgttgtctgcagtgaacggaggaagggcaatctcctctgaatccctcgcggcactggcatggcatttcctgctaaggcgtcgcagcagggacggtgccacagctctcgcatcttcatccggggtgcttcaaatcgcagaggacaaatcatctgcggccaacttgacaaagcacaaggtgagtgcagaaaggaagctcctcaacgacgctcttgacagaactggtgtgcgatatgagactgagagctggatggatgaagagacatcgtcctggatggacagggatctcacggacagcgatttgcggtaccgcttgctaatgcagaacctcgaggaactggagaccagcttggttggtaaagacctggagatggacatccttgagcagcttggggctctgggatcgttcaacgcttctgtggccaggggtgtctcggcgttacatggtcgaccagatggctctctgcttgatgatccggagccggagacgactcctctggatgcggggcaagaagacagccaagtggtcgtcgtccggagtggcaagagccaggagaggaagctgagaaggatgagagcatcatcagatgagaaaggatccaggacctcggtgaaggtgaacccaccacgaagacccaagaaatcccgtaaggcgagtagcagccagtttatatccgagtggaaaagtcacccaggccaaaggaggatcattgtgcgtgagcaatcagcactgctgtccaccatcaaggaatgtgcaggtcttgagaagataagggagaagatggtgaaggaagggcaggaggtgagctaccacaggtgggcggaggcagctggggtggacgaggcagagctggtgagcaggctgcaggcaggttactgctgccgggacaggctactggtgaccaccgagtggctggtcaggtgcatcgcgagaacatacaccggcatggggacggccttggacgatctgcttcaggctgggaagatgggcgttcttgacggcgccgagaagttcgacagccggaaggggtgcaggttctccacgtacgtcaagtactggatcaggaaagggatgctcgctctgctggctgaaaactcaggagtcaccctgctgcctgcaagaatggagagcatcatgcgcaaggtgaaggaggcgcggcgtgggatccggtacaggcagggcaggaacccgtcggactcagaggttgccgccgccgtgggcgtgtcggtagccaacgtgaggctggcgcgcaagtgctctcgcagggccgtctcgctctactcggaggtcgcgatcggacaggacgtcaagttcgcggaggtgatcccggacgagtcggcgtctccggacgaggcggcgctgttccggggccagctgagggagcggctgctgctggtgctgggcaggctgcccgcgcgggaaggacgcgtgctgcggctgcggcacgggctggaggacgggcggtgcaggtcgctggaggagatcggcggcatctacggcgtctccaaggagtggatcaggaagatcgagaagtcggccatggccaggctccgggacgacgacgccgtgcgccgcgacctccacgacttcgtctagtctgtctgcagtgcactagaacaatttgttagctggtagggaacgatgtcatgtacgtagtaccatactatctatcagcagactgaaattgaagctgctattcacacgaaatatacaatgatagagatttgtgattcatgacggttataatgtcatgcttgctttcatgtttcaccccccatggagtgccactagctctaaaaatttctgaacacttgttgtaagtggcacgcacgcatgctgggttccgatggacatgccaggctccaggttcagcggcgagcagtggtatcgtcgtcgtcctgctcctgatgcccaccgtcgatgccttccagccagtacgcgccgccgttcggagacggagagctcgctgaagggccggcggaaacccgacggcgcgacaggcagagaggccagccgccctgcaggctcaggtagcagttccacgctgttgctcctgtgctagctaatccagccgtcatttccgttcttttctaatcacctgattatgctagctaattcgccagtcttctcttctctaactacgtactggatctctctttgatgcactgcaagatttggagctcaagtgcttctcagtccatgatggagacaggcatttatgtgcatggccaagttcactgtccatggtttatttctgatacatgtgtgtatgcaccattgtggcagagcgtcttgtttaggtccatgcatgggccctgctgatttgggacagccacctaaattgtccagttcactcttgctggcttcaggtactggcctgcaagattcaacatctgcattagcaccccagctctgtctaattaaccaataacgctcagggctagtttggaattccaaaaaccggagggaaatagagagactagaatttcctcttattcaatttattccagcccctccaatcccctccggttttgtggctctcaaactagtcctacgcgtgaaaaaaagaaaagacttct

SEQ ID NO: 10175 - DNA, 1932 bp, Zea Mays
cgccgcccgtcaccacccgcagcgagccttgctcgtcaccaactcaccatcacgcgcgagcgcgacgcttcagctctctctcgttgaagagctgcatctccagccagtgcctagcccgtcgagggaccggtcgccttggcggactcccgctggtgctcctccacgcccatctctctcttttcctcgctgcagccacggatcttggtagcagggacgccaccgcatttccagaatccaaacggaattttacaggaatcgcgctggaatttcacaggaatcagttcaatttcacggaacaaacgcaggagcaaggaaattttgtcacgttcccctcatttgtttccttcggcgacgactaggcgagtgctgcccgctcttcacgaggttttcacctgcgagtctgcgacgaacatcctccagggatggagtactttgatgcaaggcggaagcctcgtaatgttggaaaaatcattgcagccctggtcctcacaacactctgtatatttgctctgaagcaatctcctggttttggtggcaatagtgtgttttctcgccatgaacctggtgttacccacgtcttagtaacaggaggagctggttatattggttcacatgccgctttaaggctcttacaggatagctatcgagttaccattgtggataatctatctagaggaaatatgggagcagtaaaggttctgcagggcttatttccgcagcctggtagactacaattcatctttgctgatctgggggaccagaaatctgtcaacaagatatttgctgaaaatgcatttgatgctgtgatgcactttgcagctgttgcttatgtgggagagagcacattggaaccccttaggtactatcacaatattacatcgaacactttactgattttggaggctatggcatctcatggagtcaaaacccttatctactccagtacatgtgctacctacggagaaccagagaagatgcctattacagaagccacacctcagttccctatcaatccatatggaaaagctaagaaaatggcagaggatatcatattagatttctcaaagtcgaagggagctgacatggctgtcatgattttaagatatttcaatgttattggctctgaccctgagggaagattaggtgaggctcctaggccagaactccgagagcatggtcggatatctggggcatgcttcgatgcagcattaggagtcattacaggattaaaggttaaaggaacagattatcccacaactgatggaacctgcataagagattatattgatgtcacagatttagttgatgctcatgtgaaagcactcaacaaggcagagcctagaaaagtcagcatttacaatgttggaacaggaagaggtcgctcggttaatgagttcgtcgatgcctgcaagaaggcaactggggttaacatcaaaattgagtacctcagcagaaggccaggagattatgcagaagtatatagcgacccaacaaaaatcaacaaggagctcaactggacagctcgatatactgatcttaaagagagtctgtcagtcgcatggaggtggcaaaagtcgcatcccagtggctacgggccaaatcgaatatagcctgctgatttataattcactgaatcaatacatattaattctttagttagcgataaaaaaatcttgctatgacactcctctcaaaatcactccgtattcttctcgttctttttatttcaaaggtttgctgtttttttactagtagaaacatgaacggtgatttggatacaaaaaacttgtgatgacaatttcattgtttttgacacaaattgttgatagaaaaaatgtacatttttcagccagtgagctgcaaggtttggttgcatcgagttaagaaaaaccttatgttgtgaccaatggaaatgctgtggattttgtgctg

SEQ ID NO: 10176 - DNA, 2169 bp, Zea Mays
ttatcattcacttgcacttcaagtcctcctcctcccctggcttcttcttcttcctcctcctgctggctgctgctgctcttctttcttcctcctactcgatccgtctccaccacctcacacgtacggtactcatcatctcccatccgaaacccgctctcccctgccagagctagctagatctatatagcctgcagtcctggagcttgcgagcaaaggcatacgtacatacatacatacgcgttcgccgtgtcgggccgtacgtacgttgtcgtgcgatgggtgcggcgccggcggcgaggaggtgcgcgctgctcttggcgctggtggtgctggtcgcggccgcgggcgagcgcggtggcagtggtgccggcggtgaggcgggggcggagcaggttctgaggctgtggtcgtcggcggattcggctaggggtggtgaagccgtggacgaagaagaccgcttcttcaggtgggagtgggaggaggaggaggaggacgacgacaacaacgacgaggaggagggggaggaggaggacgaccacgccgtcgtggtgcagcggaagggcgcgtgcaggaacgtggtgaacgtcgacagcttcggcgcggcgggcgacggcgtcgccgacgacacccaggcgttcgcgagcgcgtggaagacggcgtgctcgctggacaacgcggtgttcctggtgcccgccggccgtcgctacaaggtcggcgccatccagttcgtgggtccctgcaaggacaggaggatgatcatccagatccagggcacggtcgtggcgcccgaggagccgtcggagtgggacccgcggagcccccggctgtggctgctcttctcgggcctcgccggcgcgcgcatccagggcggcggcgtcatcgacggctccggctccaagtggtgggccagctcctgcaagatcaacaggtccaacgtacccgtgcaggccggccccgacggccgtgacgatcgactcgtgccggggcgtgcgcgtgcggggcctccgcgtgcagaacgcgcagcagatgcacgtgacggtgtcacgctcacgcggcgtgcgcgtcgccgggctgcgcatcgacgcgcccgaggacagccccaacacggacggcatccacgtggccgagtccacggcggtcaccatccagagctgccgcatcggcaccggcgacgactgcatctccatcgtcaacggcagcttcggcgtcaagatgcgggacatcgactgcgggcccgggcacggcatcagcatcgggagcctcggcaagggcggcgcgttcgcggctgtggcggacgtggcgctggacagggcgcggatcagccgcgcgcagaacggggtgcggatcaagacgtggcagggcggggccgggtacgtccgcggcgtgcgcttcgccgacgtggccgtggacggcgtcgaccaccccatcgtcatcgaccagttctactgcgacgtgacccgccggcagagggacggcggcggaggcggcgcctgcgccaaccagacctccgccgtggccgtgtccgacgtgtcctaccgcaacatcagcggcacgtcgcgccgcgccgaggccatccggttcgcctgcagcgacgccgtgccgtgcaccggcatcgttctcagcaacatcaacctgcgccgcgccgacgatgacggcgaggtgcagacggtgtgcaactgcgccgtcggcctcgactacggccgcgtccagcccgccgccgactgcctccgtagcagcacctgcggcggcacgcctgatggccaccaccaccacgacgacgacgacgaggagcaggggaaggacgacgccgtcctgcacaccgagctctgataaaagcaagcagctgcacgcctgcaagtgaaaccaatggccgccgcgctcgttcgtccgacatttaggagattgattggtctaaaatctcttattatatatttttaaatagtaagaaattataaccctcgaatcttctcccttccatttgttcacaaacagacctttactggggtaacactgaatgctaatgcttagcgagaggctctctccaacagagcgtgtaaaggctcctctaccataaatatgataatcgaacggtcatctactctctcgagcaaagttctctaaatttagagaactttgttgcattctctatatatagagtttctctaaatg

SEQ ID NO: 10177 - DNA, 2197 bp, Zea Mays
cacgctcgttttttttatcattcacttgcacttcaagtcctcctcctcccctggcttcttcttcttcctcctcctgctggctgctgctgctcttctttcttcctcctactcgatccgtctccaccacctcacacgtacggtactcatcatctcccatccgaaacccgctctcccctgccagagctagctagatctatatagcctgcagtcctggagcttgcgagcaaaggcatacgtacatacatacatacgcgttcgccgtgtcgggccgtacgtacgttgtcgtgcgatgggtgcggcgccggcggcgaggaggtgcgcgctgctcttggcgctggtggtgctggtcgcggccgcgggcgagcgcggtggcagtggtgccggcggtgaggcgggggcggagcaggttctgaggctgtggtcgtcggcggattcggctaggggtggtgaagccgtggacgaagaagaccgcttcttcaggtgggagtgggaggaggaggaggaggacgacgacaacaacgacgaggaggagggggaggaggaggacgaccacgccgtcgtggtgcagcggaagggcgcgtgcaggaacgtggtgaacgtcgacagcttcggcgcggcgggcgacggcgtcgccgacgacacccagtcgtcacttgattatcaggcgttcgcgagcgcgtggaagacggcgtgctcgctggacaacgcggtgttcctggtgcccgccggccgtcgctacaaggtcggcgccatccagttcgtgggtccctgcaaggacaggaggatgatcatccagatccagggcacggtcgtggcgcccgaggagccgtcggagtgggacccgcggagcccccggctgtggctgctcttctcgggcctcgccggcgcgcgcatccagggcggcggcgtcatcgacggctccggctccaagtggtgggccagctcctgcaagatcaacaggtccaacccgtgcaggccggccccgacggccgtgacgatcgactcgtgccggggcgtgcgcgtgcggggcctccgcgtgcagaacgcgcagcagatgcacgtgacggtgtcacgctcacgcggcgtgcgcgtcgccgggctgcgcatcgacgcgcccgaggacagccccaacacggacggcatccacgtggccgagtccacggcggtcaccatccagagctgccgcatcggcaccggcgacgactgcatctccatcgtcaacggcagcttcggcgtcaagatgcgggacatcgactgcgggcccgggcacggcatcagcatcgggagcctcggcaagggcggcgcgttcgcggctgtggcggacgtggcgctggacagggcgcggatcagccgcgcgcagaacggggtgcggatcaagacgtggcagggcggggccgggtacgtccgcggcgtgcgcttcgccgacgtggccgtggacggcgtcgaccaccccatcgtcatcgaccagttctactgcgacgtgacccgccggcagagggacggcggcggaggcggcgcctgcgccaaccagacctccgccgtggccgtgtccgacgtgtcctaccgcaacatcagcggcacgtcgcgccgcgccgaggccatccggttcgcctgcagcgacgccgtgccgtgcaccggcatcgttctcagcaacatcaacctgcgccgcgccgacgatgacggcgaggtgcagacggtgtgcaactgcgccgtcggcctcgactacggccgcgtccagcccgccgccgactgcctccgtagcagcacctgcggcggcacgcctgatggccaccaccaccacgacgacgacgacgaggagcaggggaaggacgacgccgtcctgcacaccgagctctgataaaagcaagcagctgcacgcctgcaagtgaaaccaatggccgccgcgctcgttcgtccgacatttaggagattgattggtctaaaatctcttattatatatttttaaatagtaagaaattataaccctcgaatcttctcccttccatttgttcacaaacagacctttactggggtaacactgaatgctaatgcttagcgagaggctctctccaacagagcgtgtaaaggctcctctaccataaatatgataatcgaacggtcatctactctctcgagcaaagttctctaaatttagagaactttgttgcattctctatatatagagtttctctaaatg

SEQ ID NO: 10178 - DNA, 377 bp, Zea Mays
ccacgctttgtcgtccgccgacctcgctggtgagccacgctcaaccttgcagctccttcgcgtcgtcgatttccttgacccacaacctctcttccgacctcgtcgtgctcgcgatgtcatcgtaaagctgctagctgcctgtctcgctgttcctgatacccagcaagccgttgtgctcggcatactttctccatgtggttctctcgcttcgtcggctttccgcgtgttagagcagagtacccagaagaagtgatttgtgaaggagcatgttccagttctactgatccagtggtggattccatctaactaattatcgtaatagaagatctcagatctcctcctgtgataagaatgaggacccgctctggaaaggatca

SEQ ID NO: 10179 - DNA, 1749 bp, Zea Mays
ggagaatttattcgcttgtccatttctcccacatacccctcccctctccaccgcccatctcttcctcctccagtcccgaaggaaggtctcaggtctggctggcctaccaccaagaacacacgctgcggcctgcggctgcggtcacgctactcaagtgtgaacaaaaagtccgacaccgcttctagcttcccctcggcgatctgtgaagctatgaagccacctctcgagaggaacccgactaagaagcgccactcgtggtggtgggacagtcacattagccctaagaactcgaaatggctcgccgaaaatctcgaagaaatggacaagcaagtgaaggaaatgctccagctgatcgaggaggacggcgactccttcgctaagaaagcgcaaatgtattaccagaggcgtccgatgctcgtcacccacgtcgagaacttctaccgtatgtatcgtgctctagccgagcgctatgacaatgtaaccggcgagctgcgcaagaacatccctacaaggctgcagacaaccggatttttaaccagttcagagtacggttctgagctgcagaggtcgccctcaccgtctcctgagccgttacagaggtcgtggacaagggagcagagccctagggccgctggcttcgacttcttcctgagcaataggagcaatgactcgccacctgtctacaggaaggaacccgaggacgcggcatcgcagtcggagtctgacgcgaagtctgcagacggtgaggatgatggcatcgcctacacgctgcaccagagagttcttgagctagaggacgagctcaatgcgacaaaccagaaactacaagatgcaaacgagaagcttgaggttctggaggaaaagagcttgaggtgccattgcgattataaagagaatggaaacggtgctcagcgaactacagaagtttcaggcaaagagggggagctggaagccgaaatcgtcaatctccaggagcaagcggactcggcaagaaggcgattcgaagaggcattgtctgaacgagatggagaaatcagcaagctaaagcaagagcttgctggtgcttctgagaagctgcagcgagagaagtacgccaatggcgtgcaggtatctgagctgcagcgatcggttgaacacatcaggtccgaactagagagagtttctgaagagaaactactgtccgagaacaagattaaggagctggaggcagcaaacgctgaagccgataagtacggccacgagctcacgcgagctgccgagaagatttccgaggagaagttcgcgctcgaagctgagatcctcacgatgcggcagaacattgaagatctgaaatccaggatcgagagcctcgctcgagagaagtccctgctcaaatcatggtttgaggacttggagcaagtcgtggggcgaggaaggggcatcttcgccgattaaccgagtttttctatccagaacatcatcggtagctagaatttagcaagctagtaacattttgttttgttttctggtacccataccatcttgcgaaattgagatacgtcagtgtacttcctttttgtttgctgaatcttaaacttagacgtgatggatggtggtgatgtactggtaatatatgaaatattatactgaaccgcgctcgacgtcaataataagattcctatagtgcatctaaaagttctgtctcaatgtaagtccagttcggatactgatactgttcatattgtttgaaaatcatgttcttgcataatt

SEQ ID NO: 10180 - DNA, 2806 bp, Zea Mays
ctccaccgcccatctcttcctcctccagtcccgaaggaaggtctcaggtctggctggcctaccaccaagaacacacgctgcggcctgcggctgcggtcacgctactcaagtgtgaacaaaaaggtccatgcttctcctccctttcgctcgcttccttttctctgcccatccacgtgaaaagcagcagcagtggtccctaagtagatcttggattcgtctcatcaatcacactccaccaggagtaacccgcacacgtagcgtagcagcaggagtaggagcttggcggcggccgtgaccggcgctggagagtggagatcttggacgcgtgcgacatcctggtctccgctctgtgcctctggtcttcgaaggcgccgccaccctatttttttttttaaaaaaaatcctaaggtgagatcgagctgctctttgctttgctttgctttgctttgctgcttgcgcggaatctggcctgcttgctttcacagttccacttcgttgcgtgtttcggtttattgattgatagatttcaatcgaagcttgcagattaggtttcttttctagctagatcctgcagcatctacgaggccaggccacggtcgactggttctccttcgatctagtcttccttcctttccttcctttctttctgaatgcgcatggtagtaccaccataacacagctatccttttggtgagacatccagttttctctgtctttgccaaagacaaaaaaaccccccgctattggtaatacaggcagaggtcgtcttgagaagacggatagctatgactgattatatattttttttgctgcacatgtttattaccgagtccattgctctgacgaactgatctcctgtaccattgttacatgtacctttgtttgaattggaaatcattcataccatattactatcaatccaactaacaggactaactaccttcccaaggatcgtacactaacttcttcatccgaagtaccttgaactagcatgcttgctggcatcactgtctgttacacgctgatgccgcactatttctagccttgattacccaacgccgagttcacctcaaatgcttccgttataggaaaacatgattctatatgccatactcatttttcgctgtattttaaccattttaactctcatatttgtgactgctatagtcactgtctctctctggtgctgctgcgcatttctgaatttttcagatagtttcttcagtccgacaccgcttctagcttcccctcggcgatctgtgaagctatgaagccacctctcgagaggaacccgactaagaagcgccactcgtggtggtgggacagtcacattagccctaagaactcgaaatggctcgccgaaaatctcgaagaaatggacaagcaagtgaaggaaatgctccagctgatcgaggaggacggcgactccttcgctaagaaagcgcaaatgtattaccagaggcgtccgatgctcgtcacccacgtcgagaacttctaccgtatgtatcgtgctctagccgagcgctatgacaatgtaaccggcgagctgcgcaagaacatccctacaaggctgcagacaaccggatttttaaccagttcagagtacggttctgagctgcagaggtcgccctcaccgtctcctgagccgttacagaggtcgtggacaagggagcagagccctagggccgctggcttcgacttcttcctgagcaataggagcaatgactcgccacctgtctacaggaaggaacccgaggacgcggcatcgcagtcggagtctgacgcgaagtctgcagacggtgaggatgatggcatcgcctacacgctgcaccagagagttcttgagctagaggacgagctcaatgcgacaaaccagaaactacaagatgcaaacgagaagcttgaggttctggaggaaaagagcttgaggtgccattgcgattataaagagaatggaaacggtgctcagcgaactacagaagtttcaggcaaagagggggagctggaagccgaaatcgtcaatctccaggagcaagcggactcggcaagaaggcgattcgaagaggcattgtctgaacgagatggagaaatcagcaagctaaagcaagagcttgctggtgcttctgagaagctgcagcgagagaagtacgccaatggcgtgcaggtatctgagctgcagcgatcggttgaacacatcaggtccgaactagagagagtttctgaagagaaactactgtccgagaacaagattaaggagctggaggcagcaaacgctgaagccgataagtacggccacgagctcacgcgagctgccgagaagatttccgaggagaagttcgcgctcgaagctgagatcctcacgatgcggcagaacattgaagatctgaaatccaggatcgagagcctcgctcgagagaagtccctgctcaaatcatggtttgaggacttggagcaagtcgtggggcgaggaaggggcatcttcgccgattaaccgagtttttctatccagaacatcatcggtagctagaatttagcaagctagtaacattttgttttgttttctggtacccataccatcttgcgaaattgagatacgtcagtgtacttcctttttgtttgctgaatcttaaacttagacgtgatggatggtggtgatgtactggtaatatatgaaatattatactgaaccgcgctcgacgtcaataataagattcctatagtgcatctaaaagttctgtctcaatgtaagtccagttcggatactgatactgttcatattgtttgaaaatcatgttcttgcataatt

SEQ ID NO: 10181 - DNA, 3225 bp, Zea Mays
gaacccaccttcggcttcctctgtcgtccggcctccaactccatcgaaggggctagggagaggagggaacccgaaccacagcaggccggcgcaatggcggcgccgccaaaggcgtggaaggcggagtatgccaagtctgggcgggcctcgtgcaagtcatgccggtcccctatcgccaaggaccagctccgtcttggcaagatggttcaggcgtcacagttcgacggcttcatgccgatgtggaaccatgccaggtgcatcttcagcaagaagaaccagataaaatccgttgacgatgttgaagggatagatgcacttagatgggatgatcaagagaagatacgaaactacgttgggagtgcctcagctggtacaagttctacagctgctcctcctgagaaatgtacaattgagattgctccatctgcccgtacttcatgtagacgatgcagtgaaaagattacaaaaggatcggtccgtctttcagctaagcttgagagtgaaggtcccaagggtataccatggtatcatgccaactgtttctttgaggtatccccgtctgcaactgttgagaagttctcaggctgggatactttgtccgatgaggataagagaaccatgctcgatcttgttaaaaaagatgttggcaacaatggttagatgaaagtacatctgaaggtacagtgcgaaacaaagggcaacttgtagacccacgtggttccaatactagttcagctgatatccaactaaagcttaaggagcaaagtgacacactttggaagttaaaggatggacttaagactcatgtatcggctgctgaattaagggatatgcttgaggctaatgggcaggatacatcaggaccagaaaggcacctattggatcgctgtgcggatggaatgctatttggagcgctgggtccttgcccagtctgtgctaatggcatgtactattataatggtcagtaccaatgcagtggtaatgtgtcagagtggtccaagtgtacatactctgccacagaacctgtccgcgttaagaagaagtggcaaattccacatggaacaaagaatgattaccttatgaagtggttcaaatctcaaaaggttaagaaaccagagagggttcttccaccaatgtcacctgagaaatctggaagtaaagcaactcagagaacatcattgctgtcttctaaagggttggataaattaaggttttctgttgtaggacaatcaaaagaagcagcaaatgagtggattgagaagctcaaacttgctggtgccaacttctatgccagggttgtcaaagatattgattgtttaattgcatgtggtgagctcgacaatgaaaatgctgaagtcaggaaagcaaggaggctgaagataccaattgtaagggagggttacattggagaatgtgttaaaaagaacaaaatgctgccatttgatttgtataaactagagaatgccttagagtcctcaaaaggcagtactgtcactgttaaagttaagggccgaagtgctgttcatgagtcctctggtttgcaagatactgctcacattcttgaagatgggaaaagcatatacaatgcaaccttaaacatgtctgacctggcactaggtgtgaacagctactatgtactccagatcattgaacaggatgatgggtctgagtgctacgtatttcgtaagtggggacgggttgggagtgagaaaattggagggcaaaaactggaggagatgtcaaaaactgaggcaatcaaggaattcaaaagattatttcttgagaagactggaaactcatgggaagcttgggaatgtaaaaccaattttcggaagcagcctgggagattttacccacttgatgttgattatggtgttaagaaagcaccaaaacggaaagatatcagtgaaatgaaaagttctcttgctcctcaattgctagaactcatgaagatgcttttcaatgtggagacatatagagctgctatgatggaatttgaaattaatatgtcagaaatgcctcttgggaagctaagcaaggaaaatattgagaaaggatttgaagcattaactgagatacagaatttattgaaggacaccgctgatcaagcactggctgttagagaaagcttaattgttgctgcgagcaatcgctttttcactcttatcccttctattcatcctcatattatacgggatgaggatgatttgatgatcaaagcgaaaatgcttgaagctctgcaggatattgaaattgcttcaaagatagttggcttcgatagcgacagtgatgaatctcttgatgataaatatatgaaacttcactgtgacatcaccccgctggctcacgatagtgaagattacaagttaattgagcagtatctcctcaacacacatgctcctactcacaaggactggtcgctggaactggaggaagttttttcacttgatcgagatggagaacttaataagtactcaagatataaaaataatctgcataacaagatgctattatggcacggttcaaggttgacgaattttgtgggaattcttagtcaagggctaagaattgcacctcctgaggcacctgttactggctatatgttcggcaaaggcctctactttgcagatctagtaagcaagagcgcacaatactgttatgtggataggaataatcctgtaggtttgatgcttctttctgaggttgctttaggagacatgtatgaactaaagaaagccacgtccatggacaaacctccaagagggaagcattcgaccaagggattaggcaaaaccgtgccactggagtcagagtttgtgaagtggagggatgatgtcgtagttccctgcggcaagccggtgccatcatcaattaggagctctgaactcatgtacaatgagtacatcgtctacaacacatcccaggtgaagatgcagttcttgctgaaggtgcgtttccatcacaagaggtagctgggagactaggcaagtagagttggaaggtagagaagcagagttaggcgatgcctcttttggtattattagtaagcctggcatgtatttatgggtgctcgcgcttgatccattttggtaagtgttgcttgggcatcagcgcgaatagcaccaatcacacacttttacctaatgacgttttactgtataaatctaccaggagtgagtaatttatatattagcgggactggacctcttggtcgcgtgctatttt

SEQ ID NO: 10182 - DNA, 1615 bp, Zea Mays
agaaatgcagtctgtggctgagatggcttctaatgcctatcgcaaacccagtgtcagtccatcagctacgatgctgaaagctctgcctatgcggttcctcgcctcgccggagcccggtgggtggagccggcgactaccacgacgatcgctgcggtcggtttcggcagcgctcatgaccaaccccgcttacttcgaggtgggaagattcttgggtggctatggcttcatgaacatcacaagttactcatcatctcaatttggagagccttcaaatgttgccggtattcaagaccttggtcttggatattcaccagaagagatcgaacggttgagggtccaagatattggagaaggagaagtgacaattagactttatgagggaagagttgttcaaggtccattcaggggcacacgggctgtatttaaggtataccctggagcccgtgctgatgcttctgaagctgatttgatggcactgaatgagttaaggactcatgcgtttcttcagagtgatgctagtgacatatgcgagaacatccagtttcttttaggggccttcgagacagcaactggagaacagtggctcgccttccgtgatgacgggagatatagtgctgcagactatgcaaatgtaactagtgcaaggcaattgaaggaaaaatctggagggacgccattctggaaccctttcgatcgagcatacaaattggagttaaggagatactttgttcttaagttgctgaacggtgctatgagtggccttgttcacatgcacaatcatgatagactgcatcaaagccttggaccttcttctgtaattctcaatacggcattggataaagagggacgctacttggttccaaggctgagagatttggcattttctgtagatattgggtactcatctattggggctggagtgctgtcggacggactatggcgtcgagcctctgctgctggggcttccactcctttggagaagcgagcctttggaatagctgatgacatgcaagtatttttttttcccccttcaacaaaaaatgaacaccacagtttacatgcactttactaaacagttatggagctgggctgcttcttgcatacatgtcattcattccattctgcaaagcgggcgttatggatggtatctccttgcaggtattgtctggcagatgaccagctgtcggaagcagtaagttttctagatttaggggatggtgctggctgggagttattgcaggcaatgcttaatccggattaccgcaagcgaccaattgcagaggctgtactgaaccacaggtttataactggagcagttttacgaaactactaatcagcattttttttacttgtataaagttgctacgtggaaattgtaaaagtacaataattttagtgggtgaagaggtgatacgtttcttggatgaacagtgcgtgttctctgtctgtcgcttcccattgcatggctatggctatggcgagcaaatagccgatgagcatacccactttcagctgcgctgcaggcaatcacctgagggaccgtagtgctgggagtagagatggcaatgggtacccgaaacccgatgggtttttaccccattagggtacgggtttg

SEQ ID NO: 10183 - DNA, 1617 bp, Zea Mays
gacagaaatgcagtctgtggctgagatggcttctaatgcctatcgcaaacccagtgtcagtccatcagctacgatgctgaaagctctgcctatgcggttcctcgcctcgccggagcccggtgggtggagccggcgactaccacgacgatcgctgcggtcggtttcggcagcgctcatgaccaaccccgcttacttcgaggtgggaagattcttgggtggctatggcttcatgaacatcacaagttactcatcatctcaatttggagagccttcaaatgttgccggtattcaagaccttggtcttggatattcaccagaagagatcgaacggttgagggtccaagatattggagaaggagaagtgacaattagactttatgagggaagagttgttcaaggtccattcaggggcacacgggctgtatttaagacataggatttgaaacaaaggtataccctggagcccgtgctgatgcttctgaagctgatttgatggcactgaatgagttaaggactcatgcgtttcttcagagtgatgctagtgacatatgcgagaacatccagtttcttttaggggccttcgagacagcaactggagaacagtggctcgccttccgtgatgacgggagatatagtgctgcagactatgcaaatgtaactagtgcaaggcaattgaaggaaaaatctggagggacgccattctggaaccctttcgatcgagcatacaaattggagttaaggagatactttgttcttaagttgctgaacggtgctatgagtggccttgttcacatgcacaatcatgatagactgcatcaaagccttggaccttcttctgtaattctcaatacggcattggataaagagggacgctacttggttccaaggctgagagatttggcattttctgtagatattgggtactcatctattggggctggagtgctgtcggacggactatggcgtcgagcctctgctgctggggcttccactcctttggagaagcgagcctttggaatagctgatgacatttatggagctgggctgcttcttgcatacatgtcattcattccattctgcaaagcgggcgttatggatggtatctccttgcagagacttttagagagcacctttcggcttgacatttacgctgcaagagagtattgtctggcagatgaccagctgtcggaagcagtaagttttctagatttaggggatggtgctggctgggagttattgcaggcaatgcttaatccggattaccgcaagcgaccaattgcagaggctgtactgaaccacaggtttataactggagcagttttacgaaactactaatcagcattttttttacttgtataaagttgctacgtggaaattgtaaaagtacaataattttagtgggtgaagaggtgatacgtttcttggatgaacagtgcgtgttctctgtctgtcgcttcccattgcatggctatggctatggcgagcaaatagccgatgagcatacccactttcagctgcgctgcaggcaatcacctgagggaccgtagtgctgggagtagagatggcaatgggtacccgaaacccgatgggtttttaccccattagggtacgggtttg

SEQ ID NO: 10184 - DNA, 1072 bp, Zea Mays
tggcgctccggctgcatgtatctgtccgttcgatctgttccagatttgttgatcaaagaaccatggaaggatcgttccagttgaatcccaacgccagtcctttcatacctggattgctgggttcatctgcacaaaaagccccagaaaaacaaggaggtcttatcatttctgcagggtcatcatcaaagggagagccttctggtagcacctttgatccttctgagtatgaggaaaatgacatggatgaacttgctctagtcaaaatggtcttttcaatgttcccaaatgtctccacggacttcattgatgagttaatcaaggcaaatgattttgacatgaatctgactgttgatatgctttatgagctgaactcacaagatatggttcatgatgattctgaggttatcaatcattttcatgatgattctgaggctaccaatgaccttcatgatggcaagggcgtacctggtgctgattaccacaagactgtggtgcccgagagtagcagcaacatgaatcaagacctgcagaacgaggagtcagcaacaacttctgatgtgaaatctgtgctgccaaagttctcacagatcaatttgcttcacaatgacctgggcctgcctgatgatgataagtcagcggggacttctattgcaaattgatctttcatatcaaggcgctccgtttgacccgagttagtgggttatggtgtacatactagttgcacccagaagtagaagtgtggcttggaaggtcaaagcagcggaagcaactgtcccatttccgtttgccggaccagttaactgtttctggtggttatcctgactttgaaatcccctgttcagctccttttgggccgagtagttaggtatttctggtggtggttgtcatgagtttttacatctagttcgctcttcaagactgagtagtacttggtggtcatcctgattttgcatgtcagggttagctgtgttgggtttggtacccagttagtacaaacaatccaagttatggcgtggctgtccgttatgtgtgatgttgtgggagggttgcatccatactgcttgtgcctccc

SEQ ID NO: 10185 - DNA, 2105 bp, Zea Mays
ttttttttacaacttctccctctcagtttactgttgaaaaggcaaacaaaatcacttagccgcgctgcctctgtgtctgtcttttcgtttaattagggtttccggatctgctctgcgtcgccgccgaccaacctccaccgcgcgacgccatggacttcgacgagtacgagtatctggagaagacggtggaagcgttcgcagcgccggccaacggttcgtcgccgcccgggtcggggtacaaggacaaggagcgcagctcacgccgccgctcaacgggcggtgacgaagagcgcgacaacgtagaacgcagatcgaagcgttctcgccccgaggaaggccgcgaccgcgatagagagcggcacaggtaccgcgacggcgaccggcaccgcagcagtcgggagcggcgggaccgtgaccgtgacgtcaaggagaaagagcagggcagggagaacgacaaggacaggaggagccgcgaccgcgaacgggagaaggaggagagggagaaggataggcagcggaggagtcggagccggtccgagcggcgccgtgatgacgaagagcgtgatcgctaccgtgaacgcgatgtcagacgtaggaaagaggaagttgctgaacctgaagttgatccagaaagagatcagaggactgtgtttgcttaccagttatctttgaaggcagatgaaagagatgtatatgagttcttttctagggctggaaaggtccgggatgttcgcctgattatggatcgaaattcacgacgttctaaaggtgtcgggtatattgaattctatgatgctatgtctgttccaatggcgatagctctttctggtcagttgcttcttggtcaacaagtgatggttaagccttcagaggctgaaaagaatttagttcagtcaaatgcttcaagtggagctgcttcaggtggagcaaggaagttgtatgttggaaatcttcactcaaacattaatgaagaccagttgcgacaggtctttgaaccatttggacaagtggagcttgttcagttgccattagatccgctcagtgggctatgcaaaggttttggttttgtgcagtttgcacgtcttgaagatgcaaaagcggcccagagtttgaatgggcaacttgagattgctggaagagtaatcaaggtttcagctgtgacagaccaagcaggcatgcaagttagtggagctacgggagatttggatgatgaagaagctggaggcttggcactgaatgccagttccagagctcttctaatgcagaaattggaccgcagcggcattacgaccagtttgactggtgggacgggcattgctggtttgactactccagtggcaataccaactgtatctgtccttggtgctgccccagctgcagcccctcttctgcaccctacagtgcctggtcttgcaattcccggggcaactcttccaattactaccccatctattgatttggctccacctagtcaatgcctattgctcaagaatatgtttgatccagctttggagacagatcctgatttcgatttggacatcagagatgatgttcaggaggaatgttccaagtttggtcaattaaaacatatttttgtagacaaaagtactgccggttttgtgtacctgcggtttgatagtataacagccgctatgagcgcacagaaagcactccatggaagatggttcgcagggaagatgatcacagcaacttttatgaccccacaacagtatgaaatgaagttcccgagctagtgaacagatgcatgattaatatggacgtagttgcttgggctcggtgggtgctggcatttctatattttagcgttttgagcttgtgtcaacttattactggaggtaattataaaaaaaactagtggaggaaaatttagtggaagctagtgtatcgggaaatggctaacgaaaaatggtgaaagaaagagtttccttgccctgtgggttagtgctcgaattgaaactgtactgtgtaatggagtttctccctgaagtgctagtactaatacctaaaatgatggaagaaagagttgacttgcgttgcgcttgttgatttgattatactcgtccgtaccctttgcattattgttt

SEQ ID NO: 10186 - DNA, 2158 bp, Zea Mays
ttttttttacaacttctccctctcagtttactgttgaaaaggcaaacaaaatcacttagccgcgctgcctctgtgtctgtcttttcgtttaattagggtttccggatctgctctgcgtcgccgccgaccaacctccaccgcgcgacgccatggacttcgacgagtacgagtatctggagaagacggtggaagcgttcgcagcgccggccaacggttcgtcgccgcccgggtcggggtacaaggacaaggagcgcagctcacgccgccgctcaacgggcggtgacgaagagcgcgacaacgtagaacgcagatcgaagcgttctcgccccgaggaaggccgcgaccgcgatagagagcggcacaggtaccgcgacggcgaccggcaccgcagcagtcgggagcggcgggaccgtgaccgtgacgtcaaggagaaagagcagggcagggagaacgacaaggacaggaggagccgcgaccgcgaacgggagaaggaggagagggagaaggataggcagcggaggagtcggagccggtccgagcggcgccgtgatgacgaagagcgtgatcgctaccgtgaacgcgatgtcagacgtaggaaagaggaagttgctgaacctgaagttgatccagaaagagatcagaggactgtgtttgcttaccagttatctttgaaggcagatgaaagagatgtatatgagttcttttctagggctggaaaggtccgggatgttcgcctgattatggatcgaaattcacgacgttctaaaggtgtcgggtatattgaattctatgatgctatgtctgttccaatggcgatagctctttctggtcagttgcttcttggtcaacaagtgatggttaagccttcagaggctgaaaagaatttagttcagtcaaatgcttcaagtggagctgcttcaggtggagcaaggaagttgtatgttggaaatcttcactcaaacattaatgaagaccagttgcgacaggtctttgaaccatttggacaagtggagcttgttcagttgccattagatccgctcagtgggctatgcaaaggttttggttttgtgcagtttgcacgtcttgaagatgcaaaagcggcccagagtttgaatgggcaacttgagattgctggaagagtaatcaaggtttcagctgtgacagaccaagcaggcatgcaagttagtggagctacgggagatttggatgatgaagaagctggaggcttggcactgaatgccagttccagagctcttctaatgcagaaattggaccgcagcggcattacgaccaggattcaaccaccactacagcaacactgtttccatatatatctagcttatcaagtttgactggtgggacgggcattgctggtttgactactccagtggcaataccaactgtatctgtccttggtgctgccccagctgcagcccctcttctgcaccctacagtgcctggtcttgcaattcccggggcaactcttccaattactaccccatctattgatttggctccacctagtcaatgcctattgctcaagaatatgtttgatccagctttggagacagatcctgatttcgatttggacatcagagatgatgttcaggaggaatgttccaagtttggtcaattaaaacatatttttgtagacaaaagtactgccggttttgtgtacctgcggtttgatagtataacagccgctatgagcgcacagaaagcactccatggaagatggttcgcagggaagatgatcacagcaacttttatgaccccacaacagtatgaaatgaagttcccgagctagtgaacagatgcatgattaatatggacgtagttgcttgggctcggtgggtgctggcatttctatattttagcgttttgagcttgtgtcaacttattactggaggtaattataaaaaaaactagtggaggaaaatttagtggaagctagtgtatcgggaaatggctaacgaaaaatggtgaaagaaagagtttccttgccctgtgggttagtgctcgaattgaaactgtactgtgtaatggagtttctccctgaagtgctagtactaatacctaaaatgatggaagaaagagttgacttgcgttgcgcttgttgatttgattatactcgtccgtaccctttgcattattgttt

SEQ ID NO: 10187 - DNA, 2160 bp, Zea Mays
ttttttttacaacttctccctctcagtttactgttgaaaaggcaaacaaaatcacttagccgcgctgcctctgtgtctgtcttttcgtttaattagggtttccggatctgctctgcgtcgccgccgaccaacctccaccgcgcgacgccatggacttcgacgagtacgagtatctggagaagacggtggaagcgttcgcagcgccggccaacggttcgtcgccgcccgggtcggggtacaaggacaaggagcgcagctcacgccgccgctcaacgggcggtgacgaagagcgcgacaacgtagaacgcagatcgaagcgttctcgccccgaggaaggccgcgaccgcgatagagagcggcacaggtaccgcgacggcgaccggcaccgcagcagtcgggagcggcgggaccgtgaccgtgacgtcaaggagaaagagcagggcagggagaacgacaaggacaggaggagccgcgaccgcgaacgggagaaggaggagagggagaaggataggcagcggaggagtcggagccggtccgagcggcgccgtgatgacgaagagcgtgatcgctaccgtgaacgcgatgtcagacgtaggaaagaggaagttgctgaacctgaagttgatccagaaagagatcagaggactgtgtttgcttaccagttatctttgaaggcagatgaaagagatgtatatgagttcttttctagggctggaaaggtccgggatgttcgcctgattatggatcgaaattcacgacgttctaaaggtgtcgggaatatttgtaatatggtgtacctgctgggatactcagcaacttattaagatggaaaacaagatcatattggtatattgaattctatgatgctatgtctgttccaatggcgatagctctttctggtcagttgcttcttggtcaacaagtgatggttaagccttcagaggctgaaaagaatttagttcagtcaaatgcttcaagtggagctgcttcaggtggagcaaggaagttgtatgttggaaatcttcactcaaacattaatgaagaccagttgcgacaggtctttgaaccatttggacaagtggagcttgttcagttgccattagatccgctcagtgggctatgcaaaggttttggttttgtgcagatgcaaaagcggcccagagtttgaatgggcaacttgagattgctggaagagtaatcaaggtttcagctgtgacagaccaagcaggcatgcaagttagtggagctacgggagatttggatgatgaagaagctggaggcttggcactgaatgccagttccagagctcttctaatgcagaaattggaccgcagcggcattacgaccagtttgactggtgggacgggcattgctggtttgactactccagtggcaataccaactgtatctgtccttggtgctgccccagctgcagcccctcttctgcaccctacagtgcctggtcttgcaattcccggggcaactcttccaattactaccccatctattgatttggctccacctagtcaatgcctattgctcaagaatatgtttgatccagctttggagacagatcctgatttcgatttggacatcagagatgatgttcaggaggaatgttccaagtttggtcaattaaaacatatttttgtagacaaaagtactgccggttttgtgtacctgcggtttgatagtataacagccgctatgagcgcacagaaagcactccatggaagatggttcgcagggaagatgatcacagcaacttttatgaccccacaacagtatgaaatgaagttcccgagctagtgaacagatgcatgattaatatggacgtagttgcttgggctcggtgggtgctggcatttctatattttagcgttttgagcttgtgtcaacttattactggaggtaattataaaaaaaactagtggaggaaaatttagtggaagctagtgtatcgggaaatggctaacgaaaaatggtgaaagaaagagtttccttgccctgtgggttagtgctcgaattgaaactgtactgtgtaatggagtttctccctgaagtgctagtactaatacctaaaatgatggaagaaagagttgacttgcgttgcgcttgttgatttgattatactcgtccgtaccctttgcattattgttt
